United States Patent Application Publication US 2004/0123343 A1 - sequence listing, part 29

SEQ ID NO: 80653 - DNA, 1309 bp, Oryza sativa
  Clone ID: PAT_MRT4530_80256C.1
ccggccgggaatcgtctctctcggccgatgaggtaagccgcctcgccgcggcgatcgatcccatttcagattgcgcctttaagaaggaggaggatggacagttgctaacctcacctcacctcgctttcgatttctccggtcttctcttctcttccgttccatccactttcttcttctgctggagcgcgcaaaggagcttgctttgcttccgccgtcgccgtggttgccgcgccaagattgtgtgactgcatattttccttggtcaactttgtttcataaccggatagatgggttctgaaggaccttctggtgttaccgttcacgttactggattcaagaagttccatggagtcgctgagaatccgacggagaagattgtgcgcaatcttgagtcatttatggaaaagagagggttgcctaaaggtttaacacttggaagttgcactgttcttgagactgctgggcagggtgggcttggtccgttgtatgaagtgtttgaatcagccatcgtagacaaagagtatgggttgaatgatcaggggcaagtgattctgctccattttggagtcaacagtggcacaacaaggtttgcccttgagaatcaagctattaatgaagctaccttccgttgccctgatgagctgggatggaaaccacagagggcccctattgtgtcatctgatggaagcatctcaaatttaagaaagaccactgtgcctgtgaatgaagtgaacaagtccctacaacagatgggcttcgatgtggcgccttcggatgacgctggtcgattcgtatgcaactatgtctattaccaatctcttaggttcgcagaacagcgcggtatcaagtctttgttcgtccatttccccctcttcacgacgattagtgaggaagttcagatgaacttcgtcgcaaccctcctcgaagttcttgcttcccagaactatgcacagtaacctgatggggggcagggtctacttcctaaggtttcttcttccaattttattaggaagttgccaagtgacaaaacctctctagtgctctgtttgctgtccgactgtaggccgtcgtcgccttttgctgtgaagatgaagtggagtgaataagattgtaaaatcattcatgacattgcctgtgctccaaattgtgtataaaaaaaggctggttagagctgttcttgtggtgaaaaaaaaaaaaaaaaaaaaaaaacattgctgctttatttggtggtggatgttgcacttagaacatggataatactaatctggatcactgaatacagctgctaccttaaaaaaaaaaaaaaaaa

SEQ ID NO: 80654 - DNA, 231 bp, Oryza sativa
  Clone ID: PAT_MRT4530_80257C.1
atggcggagagagaggtggtgcttgagagtgatgccatgacgctctcgtctctcgtgcctgatgttcagatcgagccatcgagagtgttcgaggagagagtaaaatggaaaagattgcgaatttgcaatattagacagtacaagattcgatacaagttctggctcaggtggtcagttttgactatcaggcttgattcgtttaatccctctcatgggattgatgggatttga

SEQ ID NO: 80655 - DNA, 1147 bp, Oryza sativa
  Clone ID: PAT_MRT4530_80258C.1
cccacgcgtccgcccacgcgtccgtttttttttgatcaaacagaaaataactttaactgcacattacaaagtccaaacacatgattaagcatgttatcctgaatggttgtcactaacaacaaaaattctagcacaaaacatgaaaacactagcaagataatttcacatctttaaatcaatgccaggtagtttcagtgtcatcccacattcccactagtaaaaatagaagagaacctcatttctccttcactgcttctgcgtgatactggtccaattcagcatcaagatctgcagctgatttttgtatgcgactccgttcatttccacgggttttcccctggctgcagccaccaccgccctgactaccgcttccaggacgaccgctaccttgaaatcctcttggcccacctccaatgccctgactgtttccagggcgaccattaccttgatgaaattgtcctctttggccacctctccgtggtacactgttagggtagttcggaaaaggtggattgtacaacaaaggtgctgttgggggcattggggatgtctcagaattatttccgatgagatctatcttcatggggttaccatcaagtattacaccatcatatctcttaatagcctccaaagcatccacttttcttgcaaacacaacttctgccgttccctgtgattttccatccttatcatagttaacagaatagcgtttgagctcaccaatctccgagaagagctcctggacgtcgtcgacggtgacgccggggtcgaggttggagatgtgcagcttcgtcccggtctccagagaccgcgcggcggcggcggcggcggctggcggcggccgcggccgcggcacgacccccgccatggcggccacgtgctcggagtagaccccgtacggcgaagcgccgccggcggccttagggccggccggtgggtacggcgccgcgcgcgccgccggcggcgccgcgcggcgggtgggccccgacgaggagggggccccgcccttgggcttggtcttggactgcttgatgaggtcgtccagggacatgtccaggccactcgacatggtcgccggctcgcggggaaggggaaccagcgctacgtcggtgccgccggccgcggcggcggcggtgggccctcgtgc

SEQ ID NO: 80656 - DNA, 798 bp, Oryza sativa
  Clone ID: PAT_MRT4530_80259C.1
atgcctggagcagctaccaccgccgccgttgttgacagccgccgtagcgcacagcgcgcggaaggccccgccaccatcatcgccatcggcactgcaaacccagctaatattgttcctcaggataactttgccgactactacttcggcctaaccaagagcgagcatcttactgaacttaaggacaagatgaagaggatatgtaaaaaatcaggcatagagaagcgatacatccaccttgatgaggagatcatccgtgcccatccagagatcattgacaaacaccagccctcccttgaagctcgtgttgaaatcgccgccgccgaggtcccaaagctcgccgagtctgctgcaaggaaggccattgccaagtggggccgtccagccaccgacattacccacctcatcttcagcacctactctggatgtcgtgcccctagcgctgacctccagctggcatcgctccttggcctccgtccttctgtctcccgcacaatcctcagcctccacggctgctctggcggtggcagggcgctccaactcgccaaggagcttgctgagaacaaccgtggcccgttttctgatggcgagtgcccgttgttcgagatggttgctgcctcacagaccatgataccaggaaccgagcacgcacttggcatgcaggccactagcaccggcatagatttccacctctctgtccaggtgccaatgctgatcaaggataacatccagcagagcttgctcgaatccttccaatcggtcggatacacagatcctgactggaacaatctcttctgggcg

SEQ ID NO: 80657 - DNA, 249 bp, Oryza sativa
  unsure (1)..(249): unsure at all n locations
  Clone ID: PAT_MRT4530_8025C.1
cggacgcatggacgaacgcgtggncgaacgcgtgggcggacgcgtgagcggcggcggctcgtgcctcggcggtaagctgttctgcggcatgagggaaggagaaggccggacgcactccgctggctggaactagcatggccgtaccgacgagacagctgtacccactagatctttatcaaggaggggggggtcttcacctncatcntcataaacctnctcctnatcctccccaaccanatgcttttcaac

SEQ ID NO: 80658 - DNA, 553 bp, Oryza sativa
  Clone ID: PAT_MRT4530_80260C.1
gttgcctaaaggtttaacacttggaagttgcactgttcttgagactgctgggcagggtgggcttggtccgttgtatgaagtgtttgaatcagccatcgtagacaaagagtatgggttgaatgatcaggggcaagtgattctggtcagttctcatctttacagatttactcaattgtacattattagaaagttcatgatgttatcctgagaagtccacagtaatgacttgacaagtttcatttgcccttaaatgtaattggatgctatagtgaaacttattttgcagccaaatttactgtttgataagaaaatatgaaacgcttttatattctagttttaaaggtccgtcaaggttctatttgtctaacatttgtgtgttggaaagaattgtttctctttaccttttattttttgattgaaaccaattacttttatggattttttttcagctccattttggagtcaacagtggcacaacaaggtttgcccttgaaaatcaagctattaatgaagctacctttcgttgccttgatgagctgggatggaaaccaca

SEQ ID NO: 80659 - DNA, 1200 bp, Oryza sativa
  Clone ID: PAT_MRT4530_80261C.1
atgcctggagcagctaccaccgccgccgttgttgacagccgccgtagcgcacagcgcgcggaaggccccgccaccatcatcgccatcggcactgcaaacccagctaatattgttcctcaggataactttgccgactactacttcggcctaaccaagagcgagcatcttactgaacttaaggacaagatgaagaggatatgtaaaaaatcaggcatagagaagcgatacatccaccttgatgaggagatcatccgtgcccatccagagatcattgacaaacaccagccctcccttgaagctcgtgttgaaatcgccgccgccgaggtcccaaagctcgccgagtctgctgcaaggaaggccattgccaagtggggccgtccagccaccgacattacccacctcatcttcagcacctactctggatgtcgtgcccctagcgctgacctccagctggcatcgctccttggcctccgtccttctgtctcccgcacaatcctcagcctccacggctgctctggcggtggcagggcgctccaactcgccaaggagcttgctgagaacaaccgtggtgcacgcgtccttgtagcactctcagagctaaccctggtatgtttctccaccccagacgaaagcaaaattgtcggacatggactgtttggggatggtgccggtgcaataatcgttggcgcaggcccgttttctgatggcgagtgcccgttgttcgagatggttgctgcctcacagaccatgataccaggaaccgagcacgcacttggcatgcaggccactagcaccggcatagatttccacctctctgtccaggtgccaatgctgatcaaggataacatccagcagagcttgctcgaatccttccaatcggtcggatacacagatcctgactggaacaatctcttctgggcggtgcaccccggcggccgtgctatccttgacaacatagagggcaagctacagttgcaaccatggaagcttgcagcaagccggcaagtgctacgcgagtttgggaacatgagtggtgcaactattgcattcgttcttgatgaactatgccaccgtcgggagaaggacgaagatgagtcacagcagcatgaatggggagtgatgctggcctttggaccagggatcacaattgagacaattgttatgcgcaacccattggcacgtggtcttaagcaaaattag

SEQ ID NO: 80660 - DNA, 116 bp, Oryza sativa
  Clone ID: PAT_MRT4530_80262C.1
atggatcatgggcgttatgctccacagcatggatgggagaacaacagtgcattggatgggtatggtgtcatcaatggcccagattatagggccggtggatcctacaatggtaggag

SEQ ID NO: 80661 - DNA, 1570 bp, Oryza sativa
  Clone ID: PAT_MRT4530_80263C.1
tagtctcctcttctaatattccttattttttaattccgaatttcatctatttctaaattgtatttctatatggactctagtctcgtggaggcggcgctcgcgaccgcgtcgtcgttccaggcggcgtacctccacctgcaggcggcccacgcgccgttcctcccggatgccgcggcggccgccgacgccgccgcggtgtcgcacctgcggaggctgtcggaggtgaagcggctcgcgcgggatcccggcgtcggcggcggcgcgctcacggcgcacctcgaggcccaggtgcgcgagaaccaggcgctgctgcggtcgttcgacgccgtggtgaaccgcctccaggccgcgctcgacggcaaggacgccgcggcggcctccctgcggagggaccacgccgagctcgccgacggcaacgcgcggctcggggcgaggctcgacggcgacgacgccctcggcgccatgctctccgccggcgtcttcgactccgtcctccgcgacgcgctccgcgtcgcccaccgcttcacccgctcgctcgccgatctcctccgatgcgccgggtgggatcttgctgccgcggcggcggcggtctaccccggtgtagcctactccaggcctggtcactgccgctacgcgctcctctcccgggtttgcctatccatgtttgatggcttcgattcataccaatttggtggttcaactgatgccaccacactggaaggaatcgatctcgcaatccgaaggaatgagtcactgcagcaattcatcgagcactcagatgcagacccaatggagcttatcaattcaagcccagactgcgaattcgcccaattctgtgaccggaagtacaagcagctcattcatcctggcattgagtcctcactgtttgggaattctgattgtggcaaattgccagtgttgggcgtggccggaccactctacgagctgttcgttgcaatggcaagctcaatatggacacttcatagattggcttgggcgtatgatccggcagtcggcatattccagattggccagggagcggagtactcggtggtttacatggagaacattgtgcgttcaaaaggattttcaggaagcaaggagctcggaaagatgatgcgaccgaaggtcggtttcacggtggtgccgggatttcggctcggtgggacggtgatccagtgtagggtgtacctagattgtggcaagagggaaggaattataggtgaatgaaataatatagtcaaaaaagaaactgtacatttggaaaacaaaaggaggtttgtgtaaaggcgatcaagaacagtgccaaaataaccttcggagagtcacagttgctgctcgatgagtagtacagaaatagctacttatctttcattttagttttggtttgggtaaaagcgggttattcgtgatttgtagtgttgtacaaaggccatcagattctgagagctgtgttctaacattgtcaaagagctatttatctaattatttgtaatttatttctctgtagttctataaaaaaaaggtatatttatgattgtgtgcccctgtgaaaaaaaaaaaaaaaagg

SEQ ID NO: 80662 - DNA, 276 bp, Oryza sativa
  Clone ID: PAT_MRT4530_80264C.1
atgggccggggcagcaatgcggtcgtcaccctcctcctcctcggcgtcgcgctcctctcgctcgccgccaccccggccgccggcgacggcaaggtgggtcaccaccacggcatcgacgaggcggtgcggcagctgatggtggcgacgaggctggaggacgtcgtggcggcggagctcgggatggacgacctgcaccagcgcgtactcggtggcggcggctcaaattcggatggctttcgtgtaatgcctcttgctattgttggcatgcggatttaa

SEQ ID NO: 80663 - DNA, 313 bp, Oryza sativa
  Clone ID: PAT_MRT4530_80265C.1
gggaggattgggtttgtattatatcggatggggtccatagtctctgaggtctacttggagacttaggtgattcacagtataaaaggcacacctcctgaggggtttggatcatcgaatcatagcatcaacacaaccaccatagcctataatctagaggatgcgaagcctactcaccgggagatctcgtcgaatctatctcgacaaggatctcgccgattagggctattaccttacgaggggcctgaatcagtataatcctcattttcttatttgcttgatgtcatgtcgtgtagatcctcgtaccaacgtaccc

SEQ ID NO: 80664 - DNA, 566 bp, Oryza sativa
  Clone ID: PAT_MRT4530_80266C.1
aaaggaaaaaaaagggctttatcatcattagccaaaaaacgggcccgaccaaaacaaaaaaacaagggggggcaaataattaattaaattattttttacccccaacccccccaaaaaggattcccccccaaaaaaaacccctggggaccccttgtttgggatgggggggaagccccccaaccccccccccttattaggcgggacccccggacccctttttttggaaaggcaaaaggcctttgctaaaacatctttggggaaaccccggaaaaaggaaccctttcccgcaagggggccccccaaaaaaaaaggaagggccttaaaggcaaggaaacccccccctttttttggggccttttttacaacgggaaagggggggggaaaaaaaaaaaactgccccggggaaacccccccgtaaaacactgtttttccattgggggggaaaacttaaacccgggcccggccttgaaaaaaaaccccaaccctgggaccgttgatgtcccaaaagggggaaaggggggcctccgggaaaaaatttacttggacggcccccattgggccaaaaa

SEQ ID NO: 80665 - DNA, 192 bp, Oryza sativa
  Clone ID: PAT_MRT4530_80267C.1
cagaaagagatggcactcacgcggccacgcgcgggaacgagaggagagaggcggggagcgcgtcattgggagcggaagaggcaagatcatgctccctttaccaatagagcgagaagtcaggagacgggaactcagtgcggcgagtggcggccgctgggcttggtggtaggcgggaagaagagaggctcggtg

SEQ ID NO: 80666 - DNA, 297 bp, Oryza sativa
  Clone ID: PAT_MRT4530_80268C.1
aaaccccccaaaaaatttccccttgggtttataataagccttgggccttttgatttaatttagatccccccttgggactaaataaaaccaaatccccggtgggaacttttccctaagtttacaacaccccagtggcgcttgcccctataacccaaatatgggtgttgcccgccccaatacaaattttcagggttgatacaacaaacaggcctttaattgcacaccaaattttttttttggcggacaggccaccaatttttttgggaattttcaccatttaaattcgaatttgggcaa

SEQ ID NO: 80667 - DNA, 242 bp, Oryza sativa
  Clone ID: PAT_MRT4530_80269C.1
gcgccgccgcaccgccgccttcgtgccgccgcgccgtgcgccatcgtcgtgccgccgtcgccgccgccgccgtcgagcccgagggagttgcggatccaagtgaaggccaagacccgcaagactttgagcaaggcaagtcatcactattctttgaacatgttgatcccaattgcgaaattgttttgtttacaaataaaatcgcatgcaatgatgaacatcctacttgtgattatgccatgcca

SEQ ID NO: 80668 - DNA, 329 bp, Oryza sativa
  Clone ID: PAT_MRT4530_8026C.1
cccactcgtgcggtcactctttgatgtacaaagctgacatggttcattattggagacactcgaccagccggtggttttaaaaaaactggcgcgactgttaactgacttgcgcgaggaaaacctaaaaaaaaagagattgagagggctacatatttgcgtaggttctgaaaaaaaacagagggggggcttatcgaaatgctgacaaacatggtggttccatgtgtcggggggagcatacaaaaataattttttttgtaaaaaaatgtggaataaaacatgcgaatgaatgcatgccgggtgctctgattaaaaaaaaaggcttgtgttgt

SEQ ID NO: 80669 - DNA, 1335 bp, Oryza sativa
  Clone ID: PAT_MRT4530_80271C.1
atggatgtggcgtcgttggaatcttcggtggaggcaacgttggatgccctcagaggagatcaatggagggcgcggcagccatttaccatcttccgcgttcccgccaacgtccgcgagagcaatcgcacctcgtacgagccgcgcgtggtgtccatcggcccctattaccacggcggcgccgcactgcgcaccatggaggaccacaagtggcactacctacagggcctgctgtcccgccacgccggcgacggcagtgtcgcggcggtcagcgcgtccactttggtcgcagagatgagaaccctggaggcccaggcgcgcgcctgctacagcgagcgccccgccggcctcgcctccgacgacttcatcgtgatgctcctgctcgatggctgcttcatcctcgagttcctcttaaagtggcacgccaaggagcccgacgcgctctgcgacgctggaaggggcctcacgcttgtccccgcggccgccgacctgctcctcatggagaaccagatcccgttcttcgtcctcgagaggctctatggcgcagtcaccggcggcggcgcccagcacggcagggagtccctccttcaccttttcgtcaagtacctcggcagtgaggacgaagagccaatgagatggccttccggcgactgggaggtccaccacctcctccatctgtactaccagagcttcattcccaaccgaacaccgccgcgaagccgccgaggcccacggtctgaccgacggacgatcaccaggacgccacgggtgataccatgcgcaaccgagatgagagaggcgggggtacagttcgtcgccgcgcagagcccagcggccgccgcaggggggacgaggtacgacgtggcgttcgacgcccgctggggcgtaatggagatacccacagtcctgatcgacgacgcgaggcggccgctgctcgcgaacctgctcgcgttcgagcagagccagcgcggcgaggaggaggggctcctgagcagctacgtggcactgatgagccagctcatcgtgacagcacgcgacgtggagctgctccgccggcgcggcgtcgtggtgaacctgttggacaacgacgaggaggcggcccggttcttcaaccgcctcgacgactgccacccggcgggctacgactcgcaggccttctccggactgtacgacgacgtgacgcgctactgtgggacatggtggcacagccacatggctgggctccggcgcaattattttcccagcccgtggtcggccatctccgttgccgtcgccacattcgtcatcgctctagccgctacacagacatacttcacggtgttcccacccaacaagtga

SEQ ID NO: 80670 - DNA, 348 bp, Oryza sativa
  Clone ID: PAT_MRT4530_80272C.1
attaaccctaatccacaccctctcaagcggggcatgtataagcgcgacggcgtttgtcgcccccagcgcggcgggttcggccgcggcttcgggcgcagcggacgcggcgaccgctgagggcagccgggcggacgccgcggcccgcgccaggaggaggagaagagggtgcccgaaaccaagctcggccgccttcggaaggaaggccaggatttcaagatcgaggagatctacctgcactccctccccgtcaaggagcaccagatcgtggagaccctcgtgccggggcttaaggacgaggtgatgaagatcacacccgcgcagaagcagacgcccgccgggcagcgcacc

SEQ ID NO: 80671 - DNA, 462 bp, Oryza sativa
  unsure (1)..(462): unsure at all n locations
  Clone ID: PAT_MRT4530_80273C.1
ggacactccataatggttttcttttccagtgacagccggcgctgtaagcataccaatgaatgttattcttgctttttgtaataaaaactgcaccgaagtacaaagacaagtcaacggttgagttggattgcttgttaccttcctgcgtggagaattttgttttttgtattggcaatgtgaacgccaagcagcttactgtcaaaaaaaaaaaaaaaccaaaaaaaaaaaaaaaaaaaaaaaaaaaaaaaaaaaaaaaaaaataaaaaaaaaaaaaaaaaaaaaaaaaaaaaaaaaaaaaaaaaaaaaaaaaaaaaaaaaaaaaaaaaaaaaaaaaaaaaaaaaaaaaaaaaaaaaaaaannngggggggggcccttttaagggacccaagtttatttcccggggttgggaggttaaatttttttttttggggccccaaaaataaaatcacggggccctgtttt

SEQ ID NO: 80672 - DNA, 354 bp, Oryza sativa
  Clone ID: PAT_MRT4530_80274C.1
atggtgttggtgtcggtgcggttcaaggcagcaggaatggtgggagcggaggcgtctcatctcatcgtcggtgcctcctccaaccttgtcggcgccgccttccctccctcgcccatcctctgccgcctcatccccaccctcccctcctctaacctcgccaccgcctcatctcctttctctgcaccgccgcctccctggcctcctcatcccaggcctcccctcctccgaccttgccgccacctcctctcctccctccccgccgtgttaagggtggcggtcaggttgatggcgacgtcgacggtgttggggtcggcagctaagctgttggcagcgtcggcagcgttggggtcctag

SEQ ID NO: 80673 - DNA, 349 bp, Oryza sativa
  Clone ID: PAT_MRT4530_80275C.1
ttgttatcatggcatcgggaaatagcgatgggggggaggatttacaaggcgggcccgatgtctgcaaagaagacgacttggcggccaggaactaatccgctgacacgaagcctcgcgacataccaagtttgaagtggtgcaggcgtacagctatatgatttcataggctggggtaaggacacacgagagaaacattgagagcaccaacaataggctagccacctactaccggccggagaatactcctggagcgtacaaattacaggcgcgagggagagacccctcaaatgaaagctggatactgagcaacaggggtgcgcaagctgtagcaaacagacaaacgtcggga

SEQ ID NO: 80674 - DNA, 4507 bp, Oryza sativa
  unsure (1)..(4507): unsure at all n locations
  Clone ID: PAT_MRT4530_80276C.1
nnnannnnngnaattgtaatacgactcactatagggcgaattgggtaccgggccccccctcgagttttttttttttttttttttgtgaaatggcacataaactcactctgatagcataaaagtacactgaatctttgccaagagagggttattaacagttcgcattcagcatgtcatttgaactgaatggatcaagtaacacagttcctggcacagaatatgaaagtgggaagcaatttcattcagaaaagaagatctagtctaacaatctattcaatgctgaaccatttacaacaaacatacaatgtgacaaggggcattacataggggcgaccacgtagtcttctagtctaccgaaagaacgatatatcctaagttctggtgcaaaaatttccaccgtggaaagctatagtgtggtcaggcgggtgcgctaagtattttggatcatgagaatgctctaccaagaagcatgccaccacagcatttactcaaaatgctggattctgaactccggtaatgaacaaaatgcccaagcatatataatgatgtcatcctaagcaggtgttcatccatccattttctcatatctttgcacatggaggatgagtcacaaacaatgtacgatggtctaccatgaatcgtcatcgctccattgctgtcgatccatctaatggatgtcccaatctgctgtttgcgctttgcgcctaacttccatttgtctttaattgttcaagttcaagtctgccattcaatctgtggtcacatccgttcattatccgttccaagcttacaactgcaaagcaaggtctggctgttgtgcttccaaattgatgcccgaagactgtcgagctggtggtgaaccaggagaagggaacccgatgttcaagtctgggcgaagcatatccttgtttggtttctgttgcatcgggggaaccaggccttgccattgtggttggccctgtgatcttgagaagtctgtctggaccaactgggggaatattaccaaacccttgttttgccctggactttctctaaccatctgaacgggttgcctaaagaactgtggaacagcagtcatctttgcttcatcaggacgggcatttgcaaatggcatcttccagccagaattactatcatggaaagttggactgacaatggttggtttgctctctgacgaagcaccaaatgagatccaagattgagccactggagcagatggaatgctctgattctccctgacagctggtggaaatgctgagaaaatattccgggaagaatcaggccctctgtttgttgtatttacctgcacaggcattacagttgatcccactgattttacattgtcattgacattcttttgcccgttcaaattcattgcaaagctggccgcatttacttgttgatttttagtgataaaacccatgctgctcattggtctgcttttgtcggttgtcccatacttcccatcaccaggtcgtccatggtatacccatgtattttcatttctgggttgtggaacagctgcttcttgcgactggaagaagggtttaggctgcccacttgtattgtttaaggaaggcatatcatgaacaccagaagcaccttttgcacactcaagcctctggtgtgccatttcaagtggatgagaacttttaggtgtctcgctttttctcatttgctgagttatagctgcttctgctggttggaagaagggtctgggctggccagtcattttgttcaaagaaggcatatcaagcacattggaagctccttttgaaatttcaggcctctgtggttgcttttgaagagggcgagaactggaggacgagctccctttccttgtttgttcactgggtgcccttttggtctttgcaacacttccaggcgcccgatgattttcatgcagagatggtgcttcagtgctcctctgctggggctcagctgtaacaccgaataatcttggcttaatttctggactttcaagagggccaggaactccaaccacattattaccagtggttattcgattaagtagactcaaactcatatcctttggattgacactttctgttggtctgatcctttcattattcctagtcattgaagcactcctttgtacattagcctctgagctaaccagacttctcggttggttttgcacaaacagaataggtggtaatggtggctcgtattctccaacccaaccacgtccaaactttacatcagtgggtaatacccgttgaatgcgttcagaagcaagtctccagccttgagtaccaagtgagccagcaaaacgagcaagacttcttgcatatgagtgctcagaatgaggtccaacattaacaagctcttttggctcctcacagaatacgtcgaaaattgtgtcagattccgatgaaggctgttcttcatatgtatcatatgttttgcgtcgtgtctcatctactacaattgacttgtagcttggcttcactgaactttccctagctgaaatatcatctggcttctcagatcttatttcatcaagtggggaactgatatctttgtccataaacccgttggctgcaatacaatcttggggctcaacagcatttgcctgcgacatgcttaaaccattagaatcatctcctgcagaagcaatggttgcagcagaaacatctgaacccaaagcatcttggctattcatacgcactggcttcttaacagtctctccattgcaggagtaacccatatcatcctgtccatctccacaaatagacttattattcaacccttttttgtgggagtgacctaggtcatctctatttcggcaaatgggcttctcaactagccttttcggggacaagacgcctacatgttctccatttgtgcaaactggattctctactgaatctcggtgtgatgagaaatctggttcttcaccattcgtgcaaacaggctttcttatgtgttttttctgcgatggcaattcatcttttgaactccgggaagtgggtctcttgtcatgctgtttgtggaaagatgcaactctatcattttctgaatttctggagatgactttccttccttgctccttgtggaatgaagagcttatatcatcccctgagtttctggaaatgggcctcttaacttgttctttttggaaggaggaacttaaatcatcgtctgaattcctgacactggatttcttaactcgttctttctggaaagaggaacttaagacatcctcagaattccttgaaattgtcttcttaacttgatctttgaactttcgatcatcctctaagtctttggaatttggtctactaacttgctctttgtgggacatgaagcctagatcatcatctgaatacctcaaaacaggcttcttaattggttctctattgctagggtgtggtctaattttctgttcactctttattaggttttcagtgggaatgccttcatctctcagttcctgaaacttttttcttgccaattcatgtatggaatgggcctgtctgaagtagattgtatcaggtgcattgtactgcatcgcattactgcaaattaagaatacatcatccagtagaaagacgaaatctacagatgtaattgtaaacctgtgattaatttgatataatgctatgccattgcatctgttgggctgtaactcaaattgctcgaacgagcgatatgcattcctggcaagcttcctcctgacggtgccaaagtccattgggtgctcaatcacatcatggtagtcaggcaactcctccggatcgacgggctccgcgaacactccgtaagtatccttcttctgcagcttgtcgagaatcatgtccagcgccttccggtcaggcagcggcgtcgtcctcgccatccctggcaccgggaggcgcttcgtcctcggcgcgctggcggcgtcgctcctcccaccaaccagcttggggttggcggtctctccccgcacctcccgatggcgagatctgtcgccgcgcggctcgatccggcgcttcttgggcggcttgacccgctcctcgccgccgctgacgtcgtcgccgccgttgccgccggcctcctcctcctcctcctgctcctgctcgccgccggaggagtccgagtacgaggggggaggcgggccccgccggtggtggttctggtcgggggcgagctgtgagagcttcacgacgagcttgagcttccgccgccgtcggtcagaggccgaggagcccccacccccacccccgccgccgccgccatggccgtccgagtcggagctcgacggctccggcgacggcctccgctgctgctgctgctgcggcggcggcggcctcgacggcgacgacgacggcgaggaagggaacgggaagaagtcgtccaccagcggcctcgacgacggcgccgccgccctcctcggccgcagcgaccgcggcggcggcgccgccgccccggcgggccccctccggcgcgccgggtggtggtggtggtggtgcctgtcaggcggcggcgacggcgaccgcggcat

SEQ ID NO: 80675 - DNA, 285 bp, Oryza sativa
  Clone ID: PAT_MRT4530_80277C.1
atggcggtggcgctcgtgggtgaaggagacggtggaggacgccggtggtcggggggagagggcgtggacaccggcggttgggggatggaggcggcggtagccggatccacgtaccagaaccccgtggaggccggatccagcggcggctgttgggtgggcgttggaaggcgacgcgggcggatccgagttccagaaaaagaagctccagagtattggctatctgttctgcagtatctgtatatgaagttagtgtgcgttccaagttgccgtgctgttcatatataa

SEQ ID NO: 80676 - DNA, 411 bp, Oryza sativa
  Clone ID: PAT_MRT4530_80278C.1
attacattcaataggcgggtcgcatattgaatataatggtccacacctttgaaacccatgggcacgttgtatatactatgtgcaccttctcttcattcagcgcgcgcatcgcctacgaggcgcgcaagcagttacccgacgatcgaatctggctcaccaacgagatcatccacagcccgacctggaacaagcgatcggaggtcatgggcctccaaaacatgactgttgatgcaggtatcaaggatatggatgttgtctagcaaggggatgatggcgcattgcctgcatttgcagccgtcgtggaggagatgtacacgctgaatgagcagagggcgcaggtagtcgatacaacgtgcccctgggtttcaaaggtgtggagcatgatttcacatctgcgagccggcgactgca

SEQ ID NO: 80677 - DNA, 158 bp, Oryza sativa
  Clone ID: PAT_MRT4530_80279C.1
tcggcgttctccctcaccccccatccggcagctccctgtcactcctcgtgcaggggtgcctgccgccgcccccctcctctcaagatccgttggtcgcggctcccgacggcgctggcaagtcagcggctccatggcggccgcggttgatctccggcgta

SEQ ID NO: 80678 - DNA, 507 bp, Oryza sativa
  unsure (1)..(507): unsure at all n locations
  Clone ID: PAT_MRT4530_8027C.1
ttttccaggcctagcactccgcccggtggcggccgctctacaatagtggatcccccgggctgcacgaattcggcacgactctacgccctgataacaacacgacaacaaccacaacaccaacacctcacaatgatttctctcttaaacctgttgccacctttccgcacatgctcttgatantcatggcagtgattggttcttattattatccatttacaccattgcacttgacgcgcgaacgctttcatccaagtaaactgcatcctctgctatggtggtggtcatcaccaacacacttggactccctgatctcatctgttccagtccgctgttcctcatctcactaactgcactgacatctaccccccacctccccaagggatgaccgtcaaatccccagttacatcgagcaacttatccccccgattccatttcaatgcaccctcccttataatttgtcctgctcctccaaaagttttaaccatcaccccccctccaaaaanntan

SEQ ID NO: 80679 - DNA, 447 bp, Oryza sativa
  Clone ID: PAT_MRT4530_80280C.1
aaaaacaatgaatgaaaacgctgtcctggcgtatattccacattttgtgaacttagcgccggagtacatcttcttactcctacctaattcaattgcgaggaatagtaagagatctgcctaaacatccatatgctagaatgaaaaaaaaaagcccacctaattttctacaacaaacagtcaattcaattcttccaagattccacaattaagatagcgaaacgagaaaattattgaggattcagttagtttaatgctctgctcctgacgaaattgattgaacaatcaatggcttttgaatggtgcccacttctgtgccaaacgcttatttgattctggcccatgacgcaaactagaatcttctcgatgggcgttggtgggtcggtcagttaacagttctgaacagatagccagagctagaatcctaaaacatgcaacaaccgatcaacc

SEQ ID NO: 80680 - DNA, 440 bp, Oryza sativa
  Clone ID: PAT_MRT4530_80281C.1
ctttgtcattgttgcgccgtgcaggatacacagcgaccatgatggcttgcgctttccttgtaaggattaggcgcttcgctcgaccaatatgcgccgagaggtaacagggacgctttctgcatgaatctgggaaggaagatagtacttaactgacttgtaatgaaaggagcacaaggagcctgcaatacttcagcctaacacaacagaagagaggatggtgctcagagaatgaggtcaatttacacagaaatcgctgatgcacacgctgaccttaatgagatgttaggtcctgtgagcgaacaacaggtatagaaggcagactcagatggaacagctaactgggctattgaagatttcacctactaggtatacttgcaagacactaaataacactcagaggatactatcgtggatgctagcttaaatgaggacatacatag

SEQ ID NO: 80681 - DNA, 231 bp, Oryza sativa
  Clone ID: PAT_MRT4530_80282C.1
gggtgacatagctccagaatttaatctgttggattctgggggtttcttaaactaccatggcgttttttcaaccccggcaatcagctgaacatgcaccacgtcctcgtctgcgtggcgtccgtcgtcggcgcggttgacaatttacacgacccgtgcaccctgacacttgtgcccaaggagtgcattcagtcgctgacgaccaactctgatagccggacaactattatgcga

SEQ ID NO: 80682 - DNA, 2717 bp, Oryza sativa
  unsure (1)..(2717): unsure at all n locations
  Clone ID: PAT_MRT4530_80283C.1
atggcgatcgaagccgcgcgcctctccccgtccctcgccgccgccgccatcctcggccgccgcggcgctcctcccgccgccctccccctccgccgcgccctcccgctcctgctccccccgcgccgccgccgcctctgcttcctcgccgccgcgggcggggacggccgcgccgtcgccctcccctcgtcggagctccgcaagcgccggggcggcgcatcatcctcctcctccgctgctcctggtggtggtgaggacgagaagctccgctcgctccgccgcctcctcgcgcggcccgacgtcgccatcgacgcctacatcgtcccctcccaggacgcccaccagagcgagttcatcgcagaatgcttcatgaggcgtgcttacctgactgggttcactggtagtgctggtacggctgtggtcacaaaagataaagctgctctctggactgatggccggtactttctccaggctgagaaagaactgagccatgattggacactcatgcgcagtggaaatcaaggtgttcctaccactagcgaatggttgaacgaggtgttaccatctggttgccgagttggcattgacccgtttcttttctcatttgatgcagctgaagaactaaaagatgctatttccgagaagaaccatgagttagttttgatcaaggatttgaatctagttgatgaaatatggggagaatcaaggccagagcccccaaaagaacaaactagagtgcatggaatcaaatatgctggcgttgacgtgccatcaaaattgtcctttgttagatcacagcttgctgaaaatgggtgtaatgctgtggtcatttcgttgcttgatgaagttgcatggttgttaaacatgagaggaagtgatgttccaaattcacctgtattttatagctaccttattgtggaggataccgctgctacattatttgtggataacaacaaagtatctgaagatgttttagagcacctcgaaaaggctggagtaaaactaaaaccatatgaagcgattttgtccgatgttgagagattggcagagaatggtgcaaagctttggctggattcttcaagtataaatgctgccatagttaatgtgtttagatcaagctgtgagagatacgtgaaaaagagaggaaaagcagggagacaaattggaaaagaatcatctcaaggtgacccagctactggaagctctggtgttcagaatggaactgtaaatgctctatacaaagtttcaccagccaccctagccaaagcagttaagaatgaagcagaagttgagggtatgaagagttcacacctaagagatgctgctgctttagcagaattctggtgctggctagaagggcaagttcgtgaaagtgtaccacttacagaagtgcaagttgctgaaaagcttcttgaatttcgtcaaaagcaagatggctttatagatacaagctttgacactatcagtggttatggtgcaaatggtgctataatacactacagaccaactccagagagctgcagctctgtcggaagcgacaatctctttctgttagatagtggtgctcaatatattgatggaactactgacataacaaggactgttcactttggtgagccaaccccaaggcaaaaggaatgcttcacaagggttttgcagggacatatagctctcgatcaggcggtatttccagagagaactcctggctttgtattagatgttcttgcacgctcttctctgtggaagattgggctggattacagacatggcacaggtcatggagttggagctgcactaaatgtccatgagggccctcagagcataagctatcgatatggaaatttgacagctttacagaagggcatgatcgtaagcaatgagcctggttattacgaagacaattcctttggcattcgtatagagaatcttcttctggtcaaagaggttaatttgccaaattcgtttggtggcgtctcgtaccttggttttgaaaaattaacttttgttccaattcagagcaagcttgttgatttgtccttactatcaccttcggagatcaattggatcaatgaataccatgacgaagtctgggaaaaggtttcccctttgttgagtggccattctctcgactggctccggaagaacacaagacctctttagatccctctattttggttgtaggactcatgggaatatatgagctcaatacgtgacatggtgataacacagcaaccattggaagtggtagtcaatagatatcgctaactgcaacatctgactactatctactcttcatcgcattatcagcaaacagtggcaaagatggtgccaaggacagatggcaatcagaactgctgtctgctgcatcaactgaagctgatttatttggcgttcgctcaacttggcacgatattcagttcagaggggttaaactctgcgtacatattctcttaccatgggttaaattcgctaggcagctaagttcaataaataaataaattcgctagacagctcgtaaggggttaaactgtgcctccctccatccactgactacaattgcttccttagcttaaaaaccatgcattatacttcaatgccattactatgggttacatgtcgtantttttccgtaacttcgttgntgccctaagcccaaagtggggttggggggtgcgcgcgcacgctctttttttttatttctattttgtcattctttttac

SEQ ID NO: 80683 - DNA, 411 bp, Oryza sativa
  Clone ID: PAT_MRT4530_80284C.1
atgggttccatatgggttggatctgcattcatgttcagtggctgcctgcattcatgtcaattgatgatgttccatccaattgagatttgggaggctggtcgttatgaaacttcagatgccaaatcattttctggcatctgggtggcaactggcaaggatggattgatgatggcaactgtccattctacgcagttcatgaaaaatgagtatacattttttgcaggaggattcttatggccagttgcagccttgcagggctttctaggaccagacaactatggaagcccaagtggaccccgtttctttgacgtaacaaaactttacacaaagccttacagacttgtgctaataggagttattgattttattgcttcaaagaagaactcaggtgaaggctactctcatgagtaa

SEQ ID NO: 80684 - DNA, 287 bp, Oryza sativa
  unsure (1)..(287): unsure at all n locations
  Clone ID: PAT_MRT4530_80285C.1
ctctcggaagacctgctgcccacactcttgcactgagagggctggtgtgggaggtgtgcgcctgaccccacactgccggatgccctttcttgtctgagcttcctcttgcagccacgctctctntgtgcataaccctctcgatccttgatcggatctgctggctgctctggtttctttcagtggccttgtgtgtggtgctgggattaatgctgagctgcgccgtgtgcttcgtggtggatngtttggcttagctgtggcggcatcccggngaacctaattgtaaaaaa

SEQ ID NO: 80685 - DNA, 189 bp, Oryza sativa
  Clone ID: PAT_MRT4530_80286C.1
atggacgtgcaccctaccgcggcgatcgcgtccctctcgacgtccttcgtcgacgccgtcacgctcttagaggtcaagctcgatgatgtccccgccggcgccaacatcagcggcgtgaagcctcaaatcaggctgatcacaagtacatgcatatatacagccggcagggttgttgagctcatctcctaa

SEQ ID NO: 80686 - DNA, 737 bp, Oryza sativa
  unsure (1)..(737): unsure at all n locations
  Clone ID: PAT_MRT4530_80287C.1
ccggccgggccagccgcccgcgtcgttcctcttcttcctcaaaacgcaatctctccgaattctccccatcatcgccatcgacggcttcccaggccgggggaggaagaactccgtttcggacccggcgtccgtgtccgttatcgtccgtcggtttccgtgtccgattctgttcttctccatatgttgatatagatagatcgatcgatcggatcccccacccacacaccacaccacatccgccgcgacacagcaagaagaggagagcagaggagaggaagcagagtgttggaaagaaacaaggaataagccggcggccggagatgaagtccggcaagccgatctgcgagaaggtgaagcccgcagtagcagtccgcatattcggcgggctacgttacgctccgccggatggcctggtcgtcaacaatcctctactggctgccttcatccgagctgtttacaccttatacatggctacgacagtgtttctctacatttttggcatggttactgctatcaaggaatacgaaatgttggtggcactgtccataattgtagtcatgcagcccttcttcatattgatgtggattgcagcaccattccttaggactgtagcaattgtgaaatatgcgatgggactccctgatagtaataacgtcaacagaattacaacaggaaggatgtcagccctagcctgaacanagtatgcctaagaagggttgttcaagtttatcataatt

SEQ ID NO: 80687 - DNA, 1703 bp, Oryza sativa
  Clone ID: PAT_MRT4530_80288C.1
atgtcgatgtgcaaaagacaggaaatcgtagagctgaggctggagcgtccggaggtcaagaacgccatcaactgggaagccatgaggctgctgcggggtgtggtcgagaaggttgaggctgacgacaccgtgtaggtcgtcctggtcacgagctccgtgcctggagttttctgcgcagccgccgatctcaaggcactatctgtaccaacaattgctgtcattgaaggagctgctttgggcgggcgggtcgaacagggactatcatgcaccctgctacaaaatgcaactcttggactgccagagacagaacctgttagcattccgggggtctcgggcaccgagcgtggtattaggaatgttggacgggacagagcggaggagaggatattcaccggccgtagaggtaatgcaactgaagctgtgatgaagggagtagctgaatactgagttccagcagggcatcctcctgatagcgcccttgaacttgcccgctttatgggccagaaatggtctctaggaatgaaggttactgagcacttgcgaagttaacgaatttgtcaatccgccaagatctacattcctgccgtcgaaggggagtgctacgagcagctgctgcacacggaggatcgccttgagggcctagccgcattcgccgagaggaggaaacctatggcagcagatggcgccgtcgagccgacatctgccacgtcaacttggagggcggcaggcatgcgcatcctccggggaatcctcgccgtctccggccacctcgccggccgccgcgcgccggcgaacaacgcccacctggcactcttctcccgcgccctccaaatcctcgcccagcaggagcccgtccgcctccagaagctctcggcgcccgactccgggatcgtggagatgaggctggagcggccggaggccaggaacgccatcgggagggagatgctccaggggttgcggagcgcgatcgagaaggtgaaggctgacgcgacggcgaaagtcgtgctgctggcgagctccgtcccgaaggttttctgcgctggcgctgatctcaaggcattgtcaattcctacaattgccattgttgagggagctgcttttggcggggaaaatgcaacatttagcttgccagaaactggccttgctattattcctggagctgggggaacgcagcgtcttcctaggattgttggaaagtccagagcaaaggaattaatattcactggtcgtagattcgatgcagtagaagctgtaaccatgggagtagtaaactactgtgttcccgctggggaggcttataaaagggctcttgaacttgcccaggagataaatcagaaaggtccgttagcgataagaatggctaagaaggccatcaatcaaggcatggaggtagatctgtccgccggattggctgtcgaagaagaatgctacgagcaagttctgcacactcaagatcgtcttgaaggtctagctgcatttgctgagaaaaggaaacctgtatacacagggaaataaggttgtaaatggtgttaaaattgcaagttgctttcaattgagcttctcacatccagaagggttgagcaggttatttttagactttctactgtgttcatatctttctccatacatgtaagaagaacaagatacatctgccaattcatgctacattttatcaagttaataaggttacacatgttctctgc

SEQ ID NO: 80688 - DNA, 321 bp, Oryza sativa
  Clone ID: PAT_MRT4530_80289C.1
ctcatcactgctagatccatcgccaccatccgctccaccgtatcaaacccgctgccgccgggctcccaccccccctcccgcgctctcgctcctgcccgccgccgagctccccaccactctcgctccctctctcgtccaccgccagagaaagtggtcgtcggccgctcccgagctcgccactcccgctcctgcctgccaccggcagaagtggttgccggtcgctcctgctctcgcctgttgtcggccgctcctgatcccgtccgccaccgaaggagagaggaggaggaggaggagcggaagtggaggaggtggaggaagtga

SEQ ID NO: 80689 - DNA, 897 bp, Oryza sativa
  Clone ID: PAT_MRT4530_8028C.1
atggtggcctctccaaccgtcgcgacgatgcctatggaagccataaccaccacggtgtccgctgccatagccgcgtcccggcatagggcggccaccacggcgacctcccccgccgagacgaaggtgctcgctggagtcaccgccaccgcggttctgctggtcctgatgatagttgatatccaccaccctatgattggacgactgggaagtcgtgggtctatccgacgaccgcggcgtgatagacctgtggttcttcgtgacgacgtgacatacgacggatcagcagcattagtcgatgatgtcgatggaaccgagtctgcagccatcactccaaacgcggccagtagatcgatctgctccacgggggacagcggcggtggcggctgcgacgacgcggcggcgctgctttttgccaacaaaaagcagatcacctccctcggtggtttggatggcagtttcgtccgatgtggcgtcattgacccagttgatgagctgactcagcgtggtggagaaccaaaggcgcgcagcggccggcggtggcagacgacgtcggagcaccggttgccgccgtaccgaagtagcgagagcacgcaggacgtggagaaggggagagagagagtcatccccgtcaccgccggtgccgccatcctagagatcccttgccgagccgccgtcctagagatccttgccgagctctgtcccgccaccaccgccgtccaccaccggtcgccgtcccgtgctccttcgctgttcccgggcggagaagaaaggaagaccggggagagagggagagagagagccatccgtcaccgcgagcggcgccgccctggagcgttgcgatgctactgctggcttcttcctgcgatgctactgaggttgaagaaagcttctgtctag

SEQ ID NO: 80690 - DNA, 1527 bp, Oryza sativa
  Clone ID: PAT_MRT4530_80290C.1
cggacgcgtggtcggatttttgggggaattcaccaacaaaaaacagagcacgggcatggcaccgacgacggcggcggcggcggcgagcagcaacggcggcggcgagagcgacggcagcagcaaggagtggaggctgacggcgccgacgaggggcggcgcgatggcggcggcgggggacaagatgagcatccgggcggtgcggtacaagatcagcgccagcgtcgacgaccgcggcccgcgccccgtcctgccgctcgcccacggcgacccctccgtgttccccgagttccgcaccgccgccgaggccgaggacgccgtcgccgacgcgctccgctccggcgacttcaactgctaccccgccggcgtcggcctccccgccgcgcgacgtgctgtggcagatcatttgtcacgcgacctcccatacaagctatcttctgatgacatcttcctaaccgctggaggaactcaggccatcgaggtcgtaatctcaatccttgcccaacctggcacaaacatattgcttcctagaccaggctacccaaactatgaagctcgagccgcgttcaacaaccttgaagttcgtcactttgatcttattcctgagaagggctgggagattgaccttaactccctagaatctattgcggacaagaacactactgcgatagtcatcataaatcccaataatccatgcgggaatgtgtacacttacgagcatttatccaaggtggcagaggtagcaaggaagcttgggatattggtaattactgatgaggtgtatggtaatttggtttttgggagttccccatttgtcccaatgggttgctttgggcacatcgtaccaatattaaccataggatcgctatcaaagaggtggatagtgccgggatggcgacttggttgggtagcaatatgtgaccccaagaagactctacaagaaaccaagattgcaacattaattactaatttccttaatgtttcaactgatccagcaactttcattcagggagctctaccgaatattcttaagaataccaaggaagaattctttaagaggataattgatttgcttacggaaacatcagatatttgctatagaggaataaaggatattaaatgcatcacttgtcctcacaagcccgaaggatccatgtttgtgatggtgaaattgaacctatatcttttggagggaatccatgatgatgttgatttttgttgccaacttgcgaaagaagagtcggtgattctttgcccagggagtgtgctgggaatgaagaattgggttcgcattacttttgctattgattcatcttctctcctggatggtcttgagaggatcaaatccttctgccaaaggcacaagaagaaaaaccctttaaattatatctagattgtactaggattggaatgatcagtactaattgtgatgtttgtgctttatacctgttgtcaccaaaatggaactattaatttgctatgaataaagcttacaaattcatatgtgtcaaaaaaaaaaaaaaaaaaaaa

SEQ ID NO: 80691 - DNA, 429 bp, Oryza sativa
  Clone ID: PAT_MRT4530_80291C.1
ggaaaatgcaacatttagcttgccagaaactggccttgctattattcctgggtatgtgttcaagatggcgctttacttttagctgggggaacgcagcgtcttcctaggattgttggaaagtccagagcaaaggaattaatattcactggtcgtagattcgatgcagtagaagctgtaaccatgggagtagtaaactactgtgttcccgctggggaggcttataaaagggctcttgaacttgcccaggagataaatcagaaaggtccgttagcgataagaatggctaagaaggccatcaatcaaggcatggaggtagatctgtccgccggattggctgtcgaagaagaatgctacgagcaagttctgcacactcaagatcgtcttgaaggtctagctgcatttgctgagaaaaggaaacctgtatacaca

SEQ ID NO: 80692 - DNA, 494 bp, Oryza sativa
  Clone ID: PAT_MRT4530_80292C.1
tcttccgctgctgctccagcatgcgcatcctccggggaatcctcgccgtctccggccacctcgccggccgccgcgcgccggcgaacaacgcccacctggcactcttctcccgcgccctccaaatcctcgcccagcaggagcccgtccgcctccagaagctctcggcgcccgactccgggatcgtggagatgaggctggagcggccggaggccaggaacgccatcgggagggagatgctccaggggttgcggagcgcgatcgagaaggtgaaggctgacgcgacggcgaaagtcgtgctgctggcgagctccgtcccgaaggttttctgcgctggcgctgatctcaaggaaaggaggttaatgagcccttgcgaagttcgcgaatttgtcaattccctaagatctacattcctgtcctttgaggcattgtcaattcctacaattgccattgttgagggagctgcttttggcggtgggttagaattggctctttct

SEQ ID NO: 80693 - DNA, 327 bp, Oryza sativa
  Clone ID: PAT_MRT4530_80293C.1
ctcctcgcacacaacaaatatggcttccacacacacgtcagtgttctcagtgttgcttctcgccgtcgtctccgtcgctcgcgcgcgcacccgccgcacccactcgcgcccgcagctcacccaccccaccccacacccaccccaccgctcgggctccctcaacaccccccccggggggcccccggctcctggtccacgcccacgcaacccggctacccgatgcacccgctcccgcgttgccgggcgctctccgcgtgaacgccgcccacgctcggccgtttccgggggccccgggttggggggcccaaacccgggggggcccccccg

SEQ ID NO: 80694 - DNA, 121 bp, Oryza sativa
  Clone ID: PAT_MRT4530_80294C.1
tctttgcttggagtatgatcagaaacttgtggggtttgcagaggtgccctgggagtttgaaaatttatggcatttggccaatgttgagaagttgaatgcaaagaatttgaatttgtatctg

SEQ ID NO: 80695 - DNA, 1560 bp, Oryza sativa
  Clone ID: PAT_MRT4530_80295C.1
ctagggtgtcgtcgcatggagtggcacacgaacgacggcatgtaggtataggtcattcttcctcctaacagtgatgcccatctcctcggtcatatctagctcacttggcttcaccccagcagggaggctccaatcgaagtggtagagaagggtggcgagcgcgagttctatgttcggctgcgcgaacattataccaggacacattctccgtccagacccaaatggcaagaactcaaagtccaaacccttaaagtcaatcttgctatcctcaaatcgctcaggcttgaactcttcggggtcatcccaatacttaggatctctaccaattgcccaagcgttaacaagcacagtggtaccttttggcacatcatatccaaagatcttgcatgactccctcgactccctaggaaggagcaaaggcgctggcagatgcaacctcagcgtctctttgataatgagctttaggtaatttaggtcggtcaagtcttcctcggtcacctttggcttcccttggagattgtcgcgtaactcagcttgcgctctcttcatcactcttgggttcctcatgagctccgacatggcccattggattgtagtcgctgatgtctcacttccggcgctaaaaaggtcaaggattactgctttgatgatccccatggtgagaggcacgtcgaggccacctcccttctgaatcctcaagaggacgtccaccagatcgtcgtcttccacgacgtcgccgctcgccgccgctgccgccgcgcgccgctcctggtgctgctcgatggcgcggtccatgagctcgaagttcttgcggtggttctcctgcgcccgccgcgccgcgccggtgacgaagctggcgagccacgacgacgggaacaggtcggcgaggctgaacccggagacgagcttgagcccctcggcgagggcctccaagaactcgtcccgcttcttgaacctgtccccgatcatggcgcgcaccgccgagtcggcgatgagcacggcgatccgctcgctgacgttgacggccgcctcgccgtggggcgccgccgccgcgacggcggcggcgaggcgcgcggcctcctcctccctgacgcggcggaacgactggacgcggcgcgcggagaggagctccaggatggcgatgcggcggagctgtcgccacagcgcgccgtagggcgcgaacacgaggccctccccgtcggccgtcatgatcctcacggtggggctcaccggccgcgtcgcgaacgcgacgtcgtgcgtccgcatcacctcgcgcgcggcgcccggcgacgtggccaccaccacggggacctcgccgagccggaggtacatgagcggcgcgtccatccgccgcgcgaggtccgccagcgcgcggtgcaccagcggcttcccggcgaggtggtgcaggctgccgatcaccggcagccgccacggccccggcggcagcctgacgccatcgctgccgccgccgcgcgtcctcgtgacccggacgagcaccagcacggccacggcgagggcgaggtagtggtagtaaccgtagcagctggttggttcttccat

SEQ ID NO: 80696 - DNA, 329 bp, Oryza sativa
  unsure (1)..(329): unsure at all n locations
  Clone ID: PAT_MRT4530_80296C.1
cagtcatcaaccgcctactcggagatgatagacgaggcgggtttaatatacctaggcggtccttaaacacccacgngcaccttattcaccttataaccctcagcatctcaacccagcgcggagatgtccaaaacgcacacctctcactgtcctaccgcagaccagtgctctcacctgctcataccactcaacaagtgccgggacgccgagtactacctcccctggaagggcgagccctagcgccacgcctacaagaagagccaacacgagctcatgatcgatcggatgctccagatccactacatcccctatgcccatgaggccaaatc

SEQ ID NO: 80697 - DNA, 871 bp, Oryza sativa
  Clone ID: PAT_MRT4530_80297C.1
gagggaagctgccggtgacatggtacccgcaagattacctgcagaaggtgccgatgacgaacatggcgatgcgcgccaatccggccaagggctaccccggccggacctaccgcttctacaccggcccgaccatccaccccttcggccatggcctcagctacacctccttcacccactccatcgcccacgcgccgtcgcagctcaccgtccgcctctccgcccaccacgccgccgcctccgcctccgcctcgctcaacgccacggctcgcctcagccgcgccgccgccgtgcgcgtcgcgcacgcgcggtgcgaggagctgaggatgccggtgcacgtcgacgtcaggaacgtgggagaacgcgacggcgcgcacacggtgctcgtgtacgccgcggcgccggcgtcgtccgcggcggaggcggcggcgggccacggcgcgccggtgcggcagctggtggcgttcgagaaggtgcacgtgggcgccggcgggacggcgagggtggagatgggcatcgacgtgtgcgacgggctcagcgtcgccgaccggaacggggtccgaaggatccccgtcggcgagcaccgcctcatcatcggcgagctcacgcacaccgtcaccatcgccctcgagcagctaggggtatagaaagaaagccactctcatcaattaaaagcatgggattattcaccaagatttggaattgtatcttttgggtgttgatgatgatttgtggattgttattgttggtgccactgccactgtctctacaaaggtagagagagcaattggaaaggcatcacattgctattggaaatttggaattgatcaagtattcaggttcaaacacctgaactgaagaaatacataacctc

SEQ ID NO: 80698 - DNA, 477 bp, Oryza sativa
  Clone ID: PAT_MRT4530_80298C.1
atgccatcctcaactgccgacctcgcgccactatatggactgcataccgtgggagagaggagctgcataccggatttggaggtggagatcgccggagtagaggtggagaggcagcggatctggcaagactgggtggtggtggtggcggcgggccatcggcgggaggaggagggagatggacccaccgggaggaggagggagatggacccgccggccgtcccttgcgccgctcctccgccccttcgccccttgcgccacccgcatcgctcctccgaccgcgccgcccctttgcccagccgctcctccgactgcgccgcccctccgttgcatacatacaaggggaatgcacgggtctccaaccaccagtgctgcaggatcggagagagaacaggggagagggaaatatggctagcggagcatagattattaaaggggaacaatcgaggaaagagtactgaagaacctgcatgctgtacg

SEQ ID NO: 80699 - DNA, 3652 bp, Oryza sativa
  Clone ID: PAT_MRT4530_80299C.1
cttgctgccgccatcgaaaccgctcttcttccctgctgcggggtgagggatggagcgcgtgaggagggccccacgcgtcggcccacgcgtccgcaacaatgctcgcgtctcgtcgcccctctgacaggcgctcgagatcccgcggctgcctccggcgagcgatctccctgcgtctcctcggtctcctcgcgagctcgccgccggccgcctgagccgctctccaccccgcgagcagcagcgccggcgtccccgctgcttctcccgccgcatccttcgctcgctccctgccgcataattcctgaagccattgtacgtgcagtaattctgagtaccaaaaaacccctcagaatgggggttcttgctgcttccaccattccagaggccgggaaagcccgtgtttcaagacagtgtgttggcatgcctcgcttaaggactgtaggatggcctgcagctttccccaaactggttgggactgggaagcagcacacttatgttgagactgaaaatgttcgcaatttgtgtctgccaatgtaggcctggatttgtaaggtaactcaacgctacaggaaaatttgattttagggaccttagtgtggatgaagctgaacatagcagggaaatgcatttaccctatctttctaaagtttttcagggacgtaacctaaaagtgatccctctccgccttcgtgcccttcatctctcaacggaagccggatgtgcgccgtcccgacttaaagctcttgattccaagatgtaggacgtttatatgacaacggacgtcagccactactctatccggtttggttacacatactacgataagtgccatggtgctatacataaatcgatagaggccttggaccgcatgggcatggagataatagagactggtaatccagatgcattcaagcagtacctgcaagagtatgagaataccatctgtggacgccaccccatcaatgtttgccaggaaactggatgaggaacttgatggttggctgagggctgctggtctaaccaagtcccctgatgtgagggcagtaattgcgccccatgctggctattcatactcagggcggtgtgcggcatatgcttttggcaacattgatacaactaacatttctcgggtcttcctgttaggcccctcacatcactactatactccaaaatgcgcattaactagagctactatttatagcactgcaattgtcgatttgccaatagaacatgaagatcaaaatgaagtcatgtatggacagttgctccctagtaacaacaacgattcgaagaacttctttactatttgctcagataaaagacacaaagaaaccaggtttagttacacatactgcgacaagagccatggtgctatacataaatcgatagaggccttggaccacatgggcatggacagaacaaactgctggcctatcggtatctggaagtggaacttatgtcaacatttgaatatgaggctgcgtcacgatgtttgacctgttttcctttgtcatatctataccattgcctgcacttcgggaggctccgagtgttagacagattgatggagagtggaggtatgattcgagaaaccccgtgttggaatggtccattcttcttatcgatcagtcaaaccccagtggctccatggaatttgttgtcccccgcaccagcaagatcaagatggcccccatatcaattggattttccgcatctagtacattcagcgatttgaaggttactggaattcgtccgcgcataattcctgaatccattttaagtgcagtaattctgagtaccaaaaaagccctcaaaatggtggttcttgctgcttccatcatttcaaagtccgggaaagcacttgtttcaagacagtttgttgacatgtctcgcataaggattgaaggattacttgcagctttccccaaactggttggaactgggaagcagcacacttatgttgagactgaaaatgttcgctatgtttatcagccaatagaaggcctgtacttgctacttatcacaaacaagcagagcaatattcttgaagatctggacaccttgaggctgctctctaagcttgtgcctgaatactccccctctcttgatgaggagggtgtttgtaaaacagcatttgagcttatatttgccttcgatgaagccatctctcttggaaataaggaaaatgtaacagttcaacaagtcaaacaatattgcgagatggagagccatgaagagaaggctcacaagctgatgatgcaaagcaaaatcaatgaaacaagggacgtgatgaagaagaaagctagtgagcttgataagatgaggatggaaagaggaaaacttgacaaaggaggatactcatcaatatctggtccccgggtaatcgagaaaacattcaatgacatgagcattaccggtagtggatttgggagtggttctggattaggtggactgggcatggatatggactcatttgctagcaagcccaaaggaggccgtccatctgcagctgctactgctcctggtaaaggtcttggtatgaaattaggcaaaacacagaagacgaatcagttcctagagtctttgaaagctgaaggagaagtcattctggaggatgtacaacccagctcagttcagtcaagggcatcgcctcttccaccaagtgatcctgtcacagtgacaattgaagaaaaactcaatgttacagttaaaagagatggaggtgttaataactttgatgtgcaaggaacccttgctcttcaggtccttaatgatgcagatgggtttatccagttgcagattgaaaaccaagatgtacctggacttagcttcaaaacacaccccaatatcaacaaggatctgtttaacagtcagcaagttgtgggagcaaaagatccaaacaggccattcccaagtggtcaaaatgaaactcctctggttaaatggagaattcaggggatggatgagtcatcgttacctctatcagtcaactgctggccatcggtatctggaagtgaaacttatgtcaacattgaatatgaagctgctgagatgtttgacctgcacaatgttgtcatatctataccattgcctgcactccgggaggctccgagtgttagacagattgatggagagtggaggtatgattcgagaaactccgtgttggaatggtccattcttcttatcgatcagtcaaaccgcagtggctccatggaatttgttgtccccccagctgatccatcaacatttttccccatatcaattggattttccgcatcgagtacattcagcgatttgaaggttactggaattcgtcctctaaaggatggtaacccaccaaagtattcgcagagggctcgtttggtaacagccaattatcaagtggtttaacgcccaaataagggagattacctcacttcagcacacatgtttgcgggcatttcctttcggcaatgagctgtttagaagtcatggagaagaaggattgttttgcatttataaagaatgtaattttgtctgtttcatatgtagtaacatgtttcaccaaattgctgttaatttgtactgccacctgatgagaaataaaagcatgtcttttcctttgacgccggttggctgttctttaaaaaaaaaaaaaaagaaaaaatgattttat

SEQ ID NO: 80700 - DNA, 328 bp, Oryza sativa
  unsure (1)..(328): unsure at all n locations
  Clone ID: PAT_MRT4530_8029C.1
agcaccagtagccgccttttccccatctccactggccgccgccgggacaatcgccgngcncgccgagctccaccgctccgatcccactccgaacagccgagctgcggtttccaaggaaccgcgggngagccgagcccgatccgttatcagccccgtttttttaacggggcagtgtccaagtacaactccgcctcttccacgcttcggcttccatccaatcatctgcatcgtcgtcgncggcnagcgccatgaggccgaactcccgcatactggccgcgggcnaacttcctccgcngctcaagcttcangctaagaaccntcgccgggt

SEQ ID NO: 80701 - DNA, 750 bp, Oryza sativa
  Clone ID: PAT_MRT4530_802C.1
atggcgatgacggaagcgatggcgacggcggcggggctagagttttttcttgtggaattttattttttttcgcgctttttcttttttgcatgcaatcggcttaagcggattttcgcatgcggttgtgctggccgcacggaaaaactccgattttcacagaccttgtcacgcttccggctggagcaaccgcatgcgacaatcagtttcgtccgagctcattggctaggagaggggtcacccgtccatgagaggcggcagcagcgatggggggttgtcaatgagggggctccggtcttccgtgacggtggaggggaagaggagggaggtgagggaggctgtgagcttgagcttgccgaccagccacgggaaggcggcggtagcagtggccagtgggcggtcgaagaggatggggtcgcggctatttgcggtggtagaggaggagaggatctggtgccccagcagcttcgtctcgcgggtgctcctacggtcttgcgcgacgctgggagtgggctcctgtgccggccatcctgtcctcacaaaaatgggaagggtcgagcagagggcgggcgcatgcagatttcgcagttgcctctctgcctttctcgtctgccgctgccgccaccacggcatctcttgtttgctgaagccatcgtcataggaaagactttaatgagaatggttgcttcatgctggctttacgcatggttaacatctagctattggaaactagatgcagaattgccaatttaa

SEQ ID NO: 80702 - DNA, 793 bp, Oryza sativa
  unsure (1)..(793): unsure at all n locations
  Clone ID: PAT_MRT4530_80300C.1
ctccggcgagcgatctccctgcgtctcctcggtctcctcgcgagctcgccgccggccgcctgagccgatctccatcccgcgagcagcagcgccggcgtccccgctgcttcttccgccgcatccttcgctcgctcgctggcgcataattcctgaatccattttaagtgcagtaattctgagtaccaaaaaagccctcaaaatggtggttcttgctgcttccatcatttcaaagtccgggaaagcacttgtttcaagacagtttgttgacatgtctcgcataaggattgaaggattacttgcagctttccccaaactggttggaactgggaagcagcacacttatgttgagactgaaaatgttcgctatgtttatcagccaatagaaggcctgtacttgctacttatcacaaacaagcagagcaatattcttgaagatctggacaccttgaggctgctctctaagcttgtgcctgaatactccccctctcttgatgaggagggtgtttgtaaaacagcatttgagcttatatttgccttcgatgaagccatctctcttggaaataaggaaaatgtaacagttcaacaagtcaaacaatattgcgagatggagagccatgaagagaaggctcacaagctgatgatgcaaagcaaaatcaatgaaacaggggacgtgatgaagaagaagctagtgagcttgataagatgaggatggaaagaggaaaacttgacanaggaggatactcatcaatatctggtccccgggtaatcgagaaacattcatgacatgagcata

SEQ ID NO: 80703 - DNA, 1229 bp, Oryza sativa
  Clone ID: PAT_MRT4530_80301C.1
ccggccgggacggcctactttattacttttttcttttctggccgggagcccgaacggaaagaaaacaaggtgagagggtgaggaagggattcctcttccttgctgccgccatcgaaaccgctcttcttccctgctgcggggtgagggatggagcgcgtgaggagggcttcgcacgccggctcttggtacaccaacaatgccaggaaactggatgaggaacttgatggttggctgagggctgctggtctcaccaagtcccctgatgtgagggcagtaattgcgccccatgctggctattcatactcagggcggtgtgcggcttatgcttttggcaacattgatccaactaacatttctcgggtcttcctgttaggcccttcacatcactactatactccaaaatgtgcattaacaagagctactatttatagcaccccaattggggatttgccagtagaccatgaagtaattgaggaactcaacgctacaggaaaatttgattttatggaccttagtgtggatgaagctgaacatagcatggaaatgcatttaccctatctttctaaagtttttcagggacataacgtaaaagttgtccctatccttgttggtgcccttaactcccaaaatgaagccatgtatgggcagttgctctctaaatatcttgacgatccgaagaacttcttttctatctcctcagatttctgccactggggaacccggtttagttacacatactacgataagagccatggtgctatacataaatcgatagaggccttggaccgcatgggcatggagataatagagactggtaatccagatgcattcaagcagtacctgcaagagtatgagaataccatatgtggacgccaccccatcagcgttttcctcagcatgctgaaacattgtttgacaaagatcaagatcggatttgttcggtatgagcagtcaagccagtgcaagagcatgagggacagcagcgtgagctacgcttctgcggcagccaaggtggatactccagccgaagaagagaaggattagattgtggattttgcacggatcacttgtacaacccccgcctgcagctagcatgatcggtttgcaatccattgtatctgcctgccaaactctataaagtaataacaggttcttgttgaagaccgatcgttgcagcaaggtgaacaccaggtaacaacaatgaataaggaatactcatatttctggat

SEQ ID NO: 80704 - DNA, 2049 bp, Oryza sativa
  Clone ID: PAT_MRT4530_80302C.1
atggcgacggcaactgagcagaggctagcgacggcggcggcggctctcgacgaccgaggcgcagaggcggaggtcgtgcggtcggctgaattcggcgggggcggaaaggctcggcgaagctggtgcataattcttgaatccattttaagtgcagcaattctgagtaccaaaaaatccattcaaaatggtatgcctaatggtttattattctttgtaatattaagaagggacattctgacatttgctcttttgctggtggttcttgctgcttccatcatttcaaagtccgggaaagcacttgtttcaagacagtttgttgacatgtctcgcataaggattgaaggattacttgcagctttccccaaactggttggaactgggaagcagcacacttatgttgagactgaaaatgttcgctatgtttatcagccaatagaaaggcctgcgttgcgggcagtgtcaacagaagctacgctttggtgcctggctggagctcttgtgctccaagttttcctttttccacaggtgcctgaatattctccctctcttgatgaggagggtgtttgtaaaacagcatttgagcttatatttgccttcgatgaggccatctgtcttggaaataaggaaaacgtaacagtccaacaagtcaaacaatattgtgagatggagagccatgaagagaaggcgcacaagctgatgatgcaaagcaaaatcaatgaaacaagggatgtgatgaagaagaaagccagtgagcttgataagatgaagatggaaagaggaaaacttgacaaaggaggatactcggcaatatcaggtcccagggtagttgaaaaagcatttggtgacatgagcattactggtagtggatttggaagtggttctggattaggtggactgagcatggatatggactcatttgctagcaagcctaaaggtggccgtccatctgcagctgctactgctcctggtaaaggtcttggaatgaaattagggaaaacacagaagacgaatcagttcctggaatctttgaaagctgaaggagaagtcattctggaggatgtacaacccagttcagttcagtcaagggtgtcgcctcttccaccaagtgatcctgtcacagtgacaattgaagaaaaactcaatgttacagttaaaagagatggaggtgttaataattttgatgtgcaaggaacccttgctcttcaggtccttaatgatactgatgggtttatccagttgcagattgaaaaccaggatgtacctggacttagcttcaaaacacaccccaatatcaacaaagatttgtttaacagtcaacaagttgtgggggcaaaagatccaaacaggccattcccaagtggtcaaaatgaaactcctctggttaagtggagaattcatgggatggatgagtcatcgttacctctatcagtcaactgctggccatcggtatctggaaatgaaacttatgtcaacattgaatatgaggctgctgagatgtttgacctgcacaatgttgtcatatctataccattgcctgcacttcgggaggctccgagtgttagacagattgatggagagtggaggtatgattcgagaaactccgtgttggaatggtccattcttcttatcgatcagtcgaaccgcagtggctccatggaattcgttgtccccccagctgatccatcaacatttttccccatatcaattggattttccgcatctagtacattcagtgatttgaaggttactggaatccgtcctctgaaggatggtaacccgccaaagtattcgcagagggctcgtttggtggccgctaattaccaagtagtttaacctaacaagggatgtttgttgcctcacttcagtgacacatgtttgcggtatatgttatctttcggcgatgagctgttgagaagtcatgacaaacaaggattgttttgtatttacagtgaatgtatttttcgcctgtttcatatgtagtaacattttgccccaaattgctgatgatctgtactgccacccgagaaataaacacatgtattttccttg

SEQ ID NO: 80705 - DNA, 599 bp, Oryza sativa
  Clone ID: PAT_MRT4530_80303C.1
cgcaggggatgataaagatcccgatcaactctctgaatcattggttgaagaggaaagctgtgaggactgtgcagtgacagttccttaaccttttgcagagtcatcctaagataaggtagtgtatacagatgtacaggttggctggtgctactcagtgacatcaacccaacacggtttcacaagaaggaatttgtggacggccatccagatacggtaaaacatcagaattaaagttattaggttattgctggaaacttgcaatccccgcaattccatggaaactgaaaaacatgctgaccgagtacagtgaaatactccactgtctgtggattttgagcaccattgcctaatatagatttgtaacaagtttgttcgctcaagatttgaaacctgattgcaaaacaaatgtccaagatgcccatggctgtattgttgtgcctcttaaaaacatgccatgatgtgctcagttacacatgtgaacagctccaattctacattgatccaaacatggagttggcacataaatgctggaatacattgttttgaatacatgctcaggatacatgagtaatatcacagtcacatttgaatttcctgtc

SEQ ID NO: 80706 - DNA, 225 bp, Oryza sativa
  Clone ID: PAT_MRT4530_80304C.1
atgacgcgggccgacggtgggcggtggacacgggcagatgatgaggtggtggcggcggcactggagccatggggatggaggagggagagggaggaaagggagggaggtaagggggagaagccagccggtggggctcgccgcgccgttgacgccttcccgcaagccattgaggctaggtggcggcagcggcatcaagtactcaagctcgtgtcgtggggccgctaa

SEQ ID NO: 80707 - DNA, 308 bp, Oryza sativa
  Clone ID: PAT_MRT4530_80305C.1
tctcctaacgtgccaagttgggctgagctgaggagagtggcagcttgggcaagttgcacctgtagaaatagtctgagtggagtagtgtgaccgtgggagatacttctgggctgtttgtgcaaaactgcactgtatgttattgcactgtttgtgtgttgtgatgttggtgaaactttaaacattgaacactatcctggacttgacggtagaagcttcaatgttctcctgtaatgcatacaagtttcataatgtttagaacactatagttctgtttaaaaaaaaaaaaaaaaaaaaaaaaaaaaaaaaaa

SEQ ID NO: 80708 - DNA, 544 bp, Oryza sativa
  Clone ID: PAT_MRT4530_80306C.1
ttttgttataattattctgggacgaaattagaaatagatatgtacatttctctaaggtttactcgttcctctaagataaatggcttgtgatgctttggatctgaagagttagatttttctaacacttgatatgagtataacacatgccgtctcatgattcacgtagttggcttctctgtgcctgactacgagggcccaccatagaaacagtagcagtatcagaagaccatgcctcgctttcttgttctgaagccaaagaagaccataccgtatgcctctcaaaaccctctctctatataaacagggccagagagtccagcactccaaataaaccacctcttcaaacgtgcgtcgcctgaccgcttccatccatccaccagtctcgcttcttcgtgtctacggtctacctcggcgagtcggcggcctggcgataggcgtgggcgacggacggctgggggtgctgccgctgtggacggacaaggcggcgagccacagcaccaccacagccggagacggcacttcacgtcgggggaggtggtccgcg

SEQ ID NO: 80709 - DNA, 383 bp, Oryza sativa
  unsure (1)..(383): unsure at all n locations
  Clone ID: PAT_MRT4530_80307C.1
gtgcttcaagcgctccttcctcatcatcaccngcgtcaccttcgccgcgcgctcgtctcgctgctgctcntgtggaggacgaggagcttctacaagggggatatctacgccaggttcaaggtggcgccggcgacncgcgnacgtcggctgtgncggcggnangngcnagctcgcggangtngatggagaagaagggcactgagaagaacaagaaagacggattcatgaacacgtgtctaactgaagatgatggatgactaattaacctatatatntannagttgttttgaacgataattagtgggaagatgaaacagtttgtgtattattactggtgaatctgtgtacttccgtgttaaaatgtgatgaggtaaattcgcatg

SEQ ID NO: 80710 - DNA, 225 bp, Oryza sativa
  Clone ID: PAT_MRT4530_80308C.1
atgcgggacgtggggtgggatcgaaagttggggagttgtttctattatcgaacggtagttagtcatggaagaggcctaaaccatgtaactgttgatcgaaaatggaggacgtggatgaaagcaatggcaaactttgtctttggcccctcaaaggcagatgatgtgaaccctggttggactaccttcactgaaaattttgatgtgatggaaaagttgaaagtttaa

SEQ ID NO: 80711 - DNA, 416 bp, Oryza sativa
  Clone ID: PAT_MRT4530_80309C.1
cccacgcgttcgcccacgcgtacgtggcagtggtcgatggcgtggtggacgcggacgagggcggtgtcgacgacgacggcggcggacgcggacacagacgaaggcagcagcgtcggtcacggcgaacgcagacgagggcggcaagccggcaacagcgatcgtggcatatgttgtgataatatgttctgagatttatttgttttgcagctttgatgtgcggatgagtactctccgcttttccgttgcatatcgagaatgcctattgactgtgatgccttctatgtttcggatctgagcagcagtaagcctatttttattctgttttactgctatgtgtggtgctaattttttttttccatttcatttggtaatttgtttattcattgtgggttctaattaaaaaatatgtttaattc

SEQ ID NO: 80712 - DNA, 839 bp, Oryza sativa
  Clone ID: PAT_MRT4530_8030C.1
ccggccgggatctcgccacattcgccgcgcgcgtcacacgagcaagggagcaagcgaggagagaggagaggcttagcgagagaggtgaggagaggagaggatttggaacttttgatctttgggatcgcgagacgacggagatggccggtggcggcagggccgatgacgagcgaaggatcggggtggcgatggactactcggcgagcagcaagagggcgctggactgggccatcgccaacctgctccgccggggcgaccacctcgtcgtcctccacgtcctgcatcacggcggggaggaggccaagcacgccctgtggggcaagtccggatccccgctgatccctctctccgagttccgggatccgacggcgatgcagcagtacggcgtgcactgcgacgccgaggtgctcgacatgctcgacacggcggcgcgccagttggagcttaccgtagtggcgaagctgtactggggcgacgccagggagaagctctgcgacgccgtcgaggagcagaagatcgacacgctcgtcatgggcagccgcggcctcggctcgatccagaggattcttctggggagtgtgacaaactacgtgctgtcaaacgcatcatgccctgtaacagtcgtcaaggggaagtgatcgatgattcgacttgagtggatatactgttactgttgctactgtatctgaataaagcgtgtatggaacttcttttgtgtttgtaatgttgcagccttcccaggttcttctagacagttcactttgcaaacagtccatgcttgtgtgctcaaccatgtgaatcactccatatatatagaccgaatttgaggttttactttc

SEQ ID NO: 80713 - DNA, 1152 bp, Oryza sativa
  Clone ID: PAT_MRT4530_80310C.1
atgggcggtcggcgtgggcggtcggcgacggcggaggcagcgagcgtggcggaggaggcagcggcggcggaggcagcgagcgtggggaggcgagcggcggggcagggcggcgaggcaggcagtggaggaggcgagcgacggcggaagctcatgctgctggcaggatgcggtggaggaggcagcggcagcagcgagacggcggccgacgccatgcgcgacaaccagccccagcctgcggccgtgccttcctccgcttcgtcgcgggcgctgcctccgttgcaaagaggggataggccggcggcggtagagaggtggccggcgagcccaatcgagcttcgccgcctcgagggccttgggggtaattcagacgaccgcgatagttcgggggtttccatttccattttccatttgaaccaagaccacgacgacgacatcactccactccacgcgatcgagcagcagcagcaagccgcgacgacgacgatgcccatggcgccggagcagaagcaacgacaagaagccgacgacgacgacttcaccttcccgactccgccgcagccgcacctcttcgccaccacccgccacctcccctgctcaccgtcaccatcctcctccccgcccgtctggctactctcctcccccatccgccgcagcttctccgccgccgactgctccggctcgccgtggcgaaacgcgcgtgtcgtgctccgtcgtcgccacgccaccggcggcggcggcggcggcgcatgctctcccgccctcagcgactacgcggccggcttctgcgacggcgcggaggaggaggaggaggaagaggaggaggaggaggagaggatggacagtctctgggaggacctcaacgacgacgacgcagccgggaagaagggcggcgacatgttcctcgcctccctcgacgtgtcgcgccgccgctccgtgggtggcgcgggcctcgccgagaagcgcgagggcggcggaggcgcggcggtgttggggttgggggcgtcgaggagctcgcggcggcgggcgccggggctggtggcgatgatgcggtcgctgaagaggatgctggtggcgcacaaggggaagagcaaggtgcacaagtccgacgaccacaccaccgcctcctcttgcagtaattccggcaagaaatga

SEQ ID NO: 80714 - DNA, 204 bp, Oryza sativa
  Clone ID: PAT_MRT4530_80311C.1
caacaaattggacattgttataattttcaattatattatataacagaacaacgcaaaagactattaccaaattattattaacatagacacacacagtagttgtggccatttattataccaactaatatatatcatcagctgggtacacacatattagatgccgatagccagtacgacattcgatgagtctcagtactagtacgt

SEQ ID NO: 80715 - DNA, 282 bp, Oryza sativa
  Clone ID: PAT_MRT4530_80312C.1
ctcctcctcccaaaccatcagcttatcccaaggtatgcttggattaattctgtttcttttagtgtttgtttagcttgatttgttgtggcatatgcacacaactgcttgactgcttcctgtcaactgaattcttgggtgggaattatctctggttcggatcaatttctcttctttttactttctttcaatatttttttggggctgttatcatgacttggatgtccaattcaagtttgctcatgtaatatttgtcgagacagatcgatggttaatcgcgaaata

SEQ ID NO: 80716 - DNA, 2099 bp, Oryza sativa
  Clone ID: PAT_MRT4530_80313C.1
ccttcgcttctcctctctcctccccacactgtcggaagtcggaagcaaagcggcggcaccgcgcgagagaggcatggcgacgaccgcgaccctccccttctcctgctcctccaccctccaaaccctaacccgcaccatccccctccgcctccgcctccaccgccgccgcttcctccaccacctcccctccctcgctgccctcccgaggctcccgctcccgcgacctcccctcctcccccacgcgcgccgccacgtctcggcgtccgcggcgcccaacggcgcgtcctccgagggggagtacgactacgacctcttcaccatcggcgccgggagcggcggggtccgggcctcgcgcttcgcctccacgctctacggcgcccgcgccgccgtctgcgagatgcccttcgccaccgtcgcctcggacgacctcggtggagtcggcggcacatgtgtgcttcgtgggtgtgttccaaagaaattattagtgtatggatccaagtactctcatgagtttgaagagtctcatggctttgggtgggtgtatgaaactgatccaaagcatgactggaacactctgattgccaacaaaaatacagagctgcagcgccttgttggcatttacaagaatattttaaacaactcaggagttactctaattgaaggccgtggaaagatagttgatccacatactgtaagtgtagatggaaagctctacactgctaggaacatacttatagctgttggtgggcgaccatcgatgccaaatatcccaggaatagagcatgttatagattctgatgctgcactggatctaccttcaaaacctgagaaaattgcaatagtgggaggtggatatattgctctggagtttgctggaattttcaatggcttaaaaagtgaggtacatgtgtttattcggcagaagaaagttttaagagggtttgatgaagaggtcagagatttcatcgctgaacagatgtctctaaggggcatcacatttcatactgaacagagtcctcaagctataaccaaatcaaatgatggtttgctatctctgaagacaaacaaagaaactattggtgggttctcacatgttatgttcgcaacaggtcgtaaaccaaacacaaagaaccttggactagaggaggttggggtgaaattggacaagaacggagcaataatggttgatgagtattctcgaacctcagttgattcaatttgggcagtgggagatgttactgatagggtcaacctgacaccagttgcacttatggaaggtggtgcatttgcaaaaacagtgtttggtgatgaacctaccaaaccagattacagagctgtaccatctgccgttttctcccaaccacccatcggacaagttggtcttactgaagagcaggctattgaggagtatggagatgttgatatctatacagcaaacttcaggccacttagggcaactctctctggattacctgatcgcattttcatgaaactcattgtgtgtgctacaacaaacaaagttgtaggagtacacatgtgtggtgaagacgcacctgagataattcagggagttgcaattgctgttaaagctgggctgacaaagcaagattttgatgccactattggcattcacccaacatctgcagaggaatttgtcacaatgagaaatgcaactagaaaagttcggagaagcacaacagatgaggtagaatctaaagataaggttgttactcagaactagtacagataggaggcattctcagagggacttctctacttccgagcagctgatttacactgggcggacaattttttttttgtagcggtatccacggaaaggaaacccatgacaggaagccagcaaacttgtatcatagcgctgactggcattctctgatcccctttttgcatctattgtagcttgaacacggtgatacactattagctgctgttttccttctcttggttgaaataagtgctgcaccatgtgagtaccacagcctggaaattttgtaagaaaaaaaagaaatattattttggtagtacaactcagcctaatctgaattttacatcaaaaaaaaaaaaaaaaaaaaaaaaaa

SEQ ID NO: 80717 - DNA, 672 bp, Oryza sativa
  Clone ID: PAT_MRT4530_80314C.1
atggggttggcatcgagcccggacgtggaccagggcgagacaacggctacgcgggtcgaccagcttggggaaaagagcggcgcgcgaggcggcacggcatcaccgggatgggggagaagagccgcagcgaggcaggagcaggctagggagaagagaggcggcgaggcggcacggcatcaccggcatgggggagaagagccgcagcgaggcgggagcaggctggggagaagagcagcggcaaagcggcacggcatcaccggcatggggagaagagcaacggtgaggcgggagcaggttggggagaagagcggcggtggccaggagagagtgggaggcgcacgatgcgactggcggctgataggggagaagagccatggcggcgcttgctcgctggcgaagacgggcggcagccgggggagaccagaggagtgcggcgcggccggcgcccgacaggggggagtggtgatggagcatgtcctatcccctctcttgtcttcctcctaccgacgtttgcctccatcaacgccgccatcgaagatgctggccacccccgcggcaggctatgatggctcccgccggccaccactacccatctccactctggccacccgtggccctccatcgctccggccctccccatgcttctccttcgctctcccctcgtgttcctga

SEQ ID NO: 80718 - DNA, 269 bp, Oryza sativa
  unsure (1)..(269): unsure at all n locations
  Clone ID: PAT_MRT4530_80315C.1
cccacgcgtccgttctcattgaacagatatatcagcagccatggcagcgacctcagactcgacgccggctgctgctgctgctgctgctgcttcttcttcttcttctccacttcanattgtggtgttcccatggctggccttcggcacatgatccccttcctcgagctctccaagcggctngccanccggggccaaggcgtcaacttcgtcaacangncgaggaacgccgcgaggttgnggcgcgancccgncggcggcgctntcgtcgt

SEQ ID NO: 80719 - DNA, 565 bp, Oryza sativa
  Clone ID: PAT_MRT4530_80316C.1
atgagcggtggccgagtcgcggcggctagcggagctgaacgactacgcgacgacgcgggcgcacggagctatgcgactaccgacgacgacgcgctcgagccggtcaaccccgccgcccgcaacctcgcctcctactcgggccacaccatcgccacctccttctcggggcctcgccccgcgcggcggatgaggaggatgacgggctccacgccaggaggtcccgccgcatcgttggctgcgatggcgagtaccccccgccggcacccgggcccgcggcatctcaaccccgccgcccgcgcgccatcgccgtctcccctcgagccccgcccgcgccgcgcgccgtcgtctgttgccccccgccaaccgccgctgccgcgctcacctcctctgcctccacgctcgcatcctccgccgcaccccgctgccgccgcctcgcctcgcctcaagcagcacgagctcccgccaccgctcgcctcctccgctaccaccgcagcctcacctcgcctcctccactgcattccgccgccgctcgccgcttcctctgccgccgtgcgcgtgggagtaa

SEQ ID NO: 80720 - DNA, 725 bp, Oryza sativa
  unsure (1)..(725): unsure at all n locations
  Clone ID: PAT_MRT4530_80317C.1
tgatgagtatctctnactccacantcaatcgaaatggagtctgcatttttggacccacaatgatncacggttgcccngtttgcttcctttgcgtcattaattcgattggccttgacatcgtacacccacttgttttgctgctcatgaggaaccaccttgtttgtcttggagcgtattttcacccgaagtacctnttatgttgttgtgcatgcgacacgtattgcaccttgcgtctggagtgttcnattatagccgttgacaacgcagctttacacttgcgactgttgtgtcttcacttccaggatgagacaccgtaccaaggataagagtccgctattatacttagagtcttgtaaaagcttagataggttcgtgtattagtagccaatctntagtcagaaaggggaaagaagtagaccactgtgncctgtcagtccgagaaccctgttgtgctgtaacgcgatgctggtgttttctgtttctgtgtttgtgcgggggggggggctccatttctggttgntctagttgtagaaaaacgttgtagagtctactacaagttcccgttcccgtcttcaagggatgtaaacacacagtactcgtagagagttgttcgtgatggtatggtagtttctgttattacgtagcatggtgcaacttgaatatttgttctctattattagtctcggtnaatgttgcggtttgcatggttcaaaaaaaaaaaaaaa

SEQ ID NO: 80721 - DNA, 1203 bp, Oryza sativa
  Clone ID: PAT_MRT4530_80318C.1
ccacgcgtccgcactgcttcgcctcgacgagatccatacctcccgggctcccggacgcgcgcgtgctagctcgctcgccgatcgatccatcgtctccacgtacggccgcgcgaaggcacgtagtgaggtacgtgaggcagcagcagcagcaagcatggcgggtgcggcgtcgccggaccacctgttcggccttcgcaacagcttctacgtcggcgcgtaccaggccgtcatcaccggcgtccaggccatccccgcgcgcgctgccctctcccccgacgccctcgccgagcgcgactccctcctctaccgctcctacatcgccatcggctcccaccagctggtgatcgacgagatcgggccgggcgcggccacgccgctccaggccgtcaggttgctcacggtgtatctctccggcggcgccggcggcaaggaatccgcgatcaggaagctgaacgagctcctggcagatgatgcggtggggagcaacccgattctccggctggttgcagggacggttctcatgcacgagcgggactatgccggagcactgaagcacacaaattctggtgggactatggaattgcttgcgatgaatgttcagatatgcctccagatgcacaggtctgatcacgcagagaaacagctgaggataatgcagcaattggacgaagaccacacactgacgcagctcgcaaacgcatgggtagaccttgtcatgggcgggtccaagatccaagaagcgcacctcatcttccaggacttgtcagagaagtacccagcaacttgcttaattcttaatggtaaagcactgtgcctgatgcacatgggtaactttgaagatgcagagggattgctgctggaatcactgaacaaggatgccaaggatgcagaaactctagccaacctcgttgtgtgcagtctgaacctaggaaagtctgcatcccgctacctgaaccaactgaagctggcacacccagaccatatgctggttaagcgaatgtcctctgctgaagacagtttcgacagagcctgccaagcgatatcatgatttctgcagtgctgttacttactttgctgttagataaaccaaaagcaatgcaacactctgatcttgtcatgacctagacaagctaatttttgttcattagcagttcatgaacaatcaacagaagtactacactttgtcaataaattggtacgagt

SEQ ID NO: 80722 - DNA, 2601 bp, Oryza sativa
  Clone ID: PAT_MRT4530_80319C.1
tttttttgttaatggcgttatggccggggttgatgtcaatttcgaaattatagatttaagctacattcagtatcaggtgaagaaacaaatgtgttaacatgaatacaggacatgacatttcctacaaaaattcgtcgtacaatttccagcaggctgttcttacagaggttctggtgactgtatttacatctaatcaagctgtttggtccaatcaaagggttcccagtccttcatgaaattagcaacagcttgtttctgattatccatcgattcatgccttcggcgcctgtgcatgtcctcttcccgcaactggagcatccctctgatgacattcaacccaaaacctgcactgaatttgctctcatcgtctatgacatgggcaaatccacggtcgagcccgaactctacatgaaagtaggcaaagttctctgggatgacttggtgcaggtttccctttgttggaataagtttcttcatgtcatgctgggtccattcttcttccgcttcatcaattgccttcttgaagtacatgggagcattgtttgaaacttcggaggggatagggatgcattcaatcatgcagtgcctgcgttgtttggccaagcttataacagtctccatgaaaacaatatccttgtcctgctgcgcgaacattttcaggaggcacttcttaaagttgcggatctcctcccagacacttctatcaactgttcttgttgcagactcatgctgcaatggcagaataatgcagtgcccagggacaacaggctcaagctgtggcagcatcaagtaagtgaagtttcctatagcaacaaccagatgctttggccgtgatgggttctcgaagcaatacatacagcgctctttctgagttgtgagccaatgagtgcttctcctctcctcatgtgcatctttgttcctccttttgcctttcttactgggggcatcaccaaaatcatattcatcctctatacttttagacatgttgtactgtttattgtgcataattttatttgcaagatgccggtcagcatcctcttctcttttcctgcgatcagctgcactaggctttattgtgttcctggttgaactcctcacttcatgcctaggttcttcaacagcagtatcctcattctccagcaccgcctccatttctcgcgaaagttgttcagcttcttcatgcttgcctttcattcggagctgcagaatctttgctgctaactggttcgcatttagcttttgagtgctaactgaaggtgctttctttgagctacccttatcagacttgagctcatcaacctctgcagtcaaaacatttacagtcttgctttcaagattattaatcttttccaaaaagcttccatcattagagaacttattgattcctgctatcgctgaagagataagtgcctgatcctcagaagaaatattctgcctattccttttccatggtacagaatcaggtttaggttttctcattgcatgatgccgagaggaaacatcttttaagtattcacgtctaccactgtctccaccttgctgaccctcctttggattttctttggaatgttcttctgagctgcctgcttgcccagcttttctgcctctaatggcatgtaaatgagcatgcgaaggggcagctctagatgctgacactgatgcagctaagtggcctaacgagccccatctctcaccaacaacctcctcaagttgttttccttcacgagctgcttgctcttttgcacgcttcaaagctttgagcctccagctagcacctccatcaccaaccacagaggaagcaagcaactggttgcctgcatttgaagggctagattcatcagggtacccactgccattatccctcaggtatggattcaattcctttggattggctttcttcacctcctcgggtgcaacctcctcctcatctttgtcagccccgccagcttggctgctctccgcccgaccactgcttgccgacttgagcatccattcgaggcccatctccttcctgacaatatcactagctctcaactcctcacctccaattccctcatcctcctcctcctcatcatcatcatcacctgcggcacctccaagcttgctcttgcgactgccactggactcctcgtcatcatcatcgtcgtcatcggagaactcatggcgccgcctctgatgcttcctccggtgcttgctccggctcaaccctttctcctcctcctcttcgatcgagtctccgctatcggacccctcctcggagtccgagccgtacttgctccgcctccgccggcgcctccggtcccgcctctcctccttgtccctccccttcctgccccgcttcttccgccgccgcctatcctcggagctgtcggaccccgccgagccggcgccgcctagggcatcctcgccgatctgctcccgggggataaacttgacgccggagagcatcaccggtgggcggcgagccgaacgcgctagggcttcgttggttggaggagagaagcggcgaacgcgagggcttcagcgctggcggaggtggcgcgccggcgacgagccgacgagagagaggaagagtagcgagaccgcaaggggatccagccc

SEQ ID NO: 80723 - DNA, 413 bp, Oryza sativa
  Clone ID: PAT_MRT4530_8031C.1
aagagataagaggagacagggacgctttatatagacccacgggggtcgatcgtggccgggatggccgcgatttcgccggcggagtggggagaagtggggaggagagagagactggattcgaaattcgaatcccggctgtctcgagcgcggcacgggcgggagagagaggaagtgggcgcgggggacgcgggcgcgggtggcgacgtgggcgacttggcctagaagacgagggagcgagggtgtggcggcgccggctggaggttgggggaggacccgacagagaggaggggggcggccggctcagctgggcctcgtccttcggccggcctagcggggagggggaggaaggagagaatgggccggcggcccattccgaaaagaaaaagagggaaaaagaaagaaaaagaaggaaa

SEQ ID NO: 80724 - DNA, 195 bp, Oryza sativa
  Clone ID: PAT_MRT4530_80320C.1
atggccacattcttgatacgcttcaagagttgggaggacatgtcggtgcgtcgtcttcgtcaggtttcaaggaaactcgcgggctcgtggcgcccagccgacatggacaacaggatggagcactgtagtcgcggcaaattcgctttggagtttggccacggtgcctcggagcgtggctcgaagatgctggcgtag

SEQ ID NO: 80725 - DNA, 392 bp, Oryza sativa
  Clone ID: PAT_MRT4530_80321C.1
aaaatgctctgccctagtatcagctgcaaacacccatttttacattctcataagctcaagcgggttttgtgaaattgggagaagaaaccgttcccccccaggttagacgagacacccgttcaggggaagaacaccacgggttattacctggagcgggggttggaaaaccggtaaaaccattattgaccacgcatcatattctgcttcatcttctgagtgtacacaacaccaactagatcgttgggtcttcggactaaacccctcttccaaaaccaaaagacaacccactttctggaaacaaacccatggaaccacatttgacaactggtaagcaaccgccccccactatagttgcgggggaccaaaacgcaggtgtacgcccaagatttttc

SEQ ID NO: 80726 - DNA, 632 bp, Oryza sativa
  unsure (1)..(632): unsure at all n locations
  Clone ID: PAT_MRT4530_80322C.1
atccaataaagctagggttttattactccgctctgcccgcctcctccgcttcgcacaccccgccgcgccggagaatcgtcgttgctggagagcgctcttcaacaaccggtcgccgacgaaggcttgggaatcaagaaggtgggaagccggcatggactccttctcgtcgtcgtccgggtcgccccccaatacggaggcgctcatggaccagatcaaggcgcagctcgctcaggcctacgcccaggagttccttgagactgttggaaacaagtgctttgccaagtgcgtgacaaagccaggatcaagcttgagcgggagcgagagcagttgcatatcacgctgtgttgatcgttacattgaggcaactggtattgtcagccgagctctgttcagttccacacgctgagcgacgatgtgtagccttcagttgctgcttaaatcagaattggggaaaaatgtttttcctagactcgttatttttgcctttctaatctgtgagaaagagagcaacctttatattaattaagtggcaactattagctaagctggttttcagctgttaaaagccgcaaattctgccttgcagtttctcttcaaaaaaaaaaaaaaaaaatttgaacgtcttgantggg

SEQ ID NO: 80727 - DNA, 288 bp, Oryza sativa
  Clone ID: PAT_MRT4530_80323C.1
gagcgagcaaccaacagtctttgtgcggacggcacacattattcatgattgacgccaacacgtgggaaaaacagattgtggtttataaaaaaacttgttgggggggggtgccaattattgagggggagcccatgcctcccgcgcgattttttggttggaccccccttttaagggaaagggggctttttaatccacggcctgttttttggggcatccctgggggaaaaaaaaacccgtcgggctcggaaaaaacacccgggccggtacgttttttattggggggggggg

SEQ ID NO: 80728 - DNA, 222 bp, Oryza sativa
  Clone ID: PAT_MRT4530_80324C.1
atggcgttggcgggtgcggatccggtggcgccgccctcaggtgactcgatgcctcgggagagtatttgcggtgatggaccgggagtcggcttggtggtaagacgatggaggttgatgcatgtggttgatggagattccatatggcatatgatggaggacagtatctgcacatccatattgctacctgaaaattgccgcaaagacaatgcgagaagtacttga

SEQ ID NO: 80729 - DNA, 376 bp, Oryza sativa
  Clone ID: PAT_MRT4530_80325C.1
agcagagaaagcaacacattgccctgaactatatacagagtctttgtagtttgtacacaatagatcaggccatcacgagccattgagcaatttggcacagtatcttgcagaggcagtcaggcagaggaagagatgcccctctctccgttttacatggcgaagttgcaatcggcagtaggattcggttcacgctgctgcatgcctcggccgcgcggcgaccagacgggggcgggccagaccggcagccggagccgtcacaacgcacgctttcgcgggggcggtggctccgccttctttttcgagctgtgcatggttcacattacctgcacgtcctttgtaccccctggtctgcacgtcctggtggaggtcaaggatt

SEQ ID NO: 80730 - DNA, 229 bp, Oryza sativa
  Clone ID: PAT_MRT4530_80326C.1
atggcaggaatattcttggcatgggcagataactccaacgaaaagccggctgaggagttgggcagcgtcgccggtgtctcgttcaattcctcactgaaatatctcctcgcttcatggaggcaggcaagaactgaccctgccgccctagcggagggcggcaagctgacgtggcagacgacggctcgacggcgccgtgtgcacattttgcgctttggtggcggcaaggggc

SEQ ID NO: 80731 - DNA, 224 bp, Oryza sativa
  Clone ID: PAT_MRT4530_80327C.1
acgcgttcgatttcagtagtatcatgctggcataaaggccagtgagtcagagggaattaaagtcttcattaaacttctgtatggaaaaggtaaaaaaagcctaagaatcacttgtcctgtaagtgccatcatatcaaataattgggtgcattaactgacaatttagctttcttcttttcaataaattacattttaaggcaaacaactaaaaaccaaccgggttt

SEQ ID NO: 80732 - DNA, 436 bp, Oryza sativa
  Clone ID: PAT_MRT4530_80328C.1
gtattaaacccagttcatttacgggttttttactttttgtaaaaatgggggtaaaatttctccaaaacaaccgcgcctatgatacaacaaatccaccccatctgagagacacattaatcctacttcccagcggggaaaaaaaaaaaacaccccaatttcccacacaaaactggccccatattgcccagccatgcttggccattttgaacaaaaaacccctaaacacgacccacccttaaaaactaaagaatccaacttttttttaaaaaaacacttccaatttgttagtcacaaaaaacagctaacgtgttctccccaaataacaccacccctgaccggacaaaaagacaaaatatttttggaagcttctcggatgaaaccgaagatagccaatgcataaaaagccctatatggacccagatacatgggccctaca

SEQ ID NO: 80733 - DNA, 417 bp, Oryza sativa
  Clone ID: PAT_MRT4530_80329C.1
atgccggccgttgagccacgttccgcagaattcgctcagccattccgtgagccactgctcgacctggtcatggtagcttcctccgcaagaatcgatgccacgcacaccacgcactccgacgactcgatcgaacagcaacggccatgcaacaaccttgcgcacaccctgcacatgaacctagactcgatgcgacgtgcacagcgcgacacacacacacacactgactcaaccacgccaggaacacaccatgacgtgtttatttccaacaatctccccctaaacgcgacatggcgcacttcgttatcacagcagcgtcgtctcctcgtcaacgttacagagcagcgcctgttccttcttcttccgcggacagttcctcgccatgtggccacgttctccgcagtcgaagcactttcctca

SEQ ID NO: 80734 - DNA, 324 bp, Oryza sativa
  Clone ID: PAT_MRT4530_8032C.1
atgacgaagacgagggttcttccggtttctggccgagatcgcatcacctcggcgtcaatgacaatcatgaaaacgccctggccgtgcaggtctgagagtatgaccggcgacggcgacgagtcatcaatcatcatcgatgacgcgccggcgacggtgaggtgttggccgcgtcgcgaggcagaggctgccgtcagcacagtaaggacgcctggcatctcgatgacgtcgcagcgccaggatgtgtcaccggcggccggagtttccgacgggatggagcagcacaacctcgggcgggatggtttgacagcttccacagcagcttga

SEQ ID NO: 80735 - DNA, 1142 bp, Oryza sativa
  Clone ID: PAT_MRT4530_80330C.1
gaaacttaaacatatatattagagcaacagatcaagggggcaagccccgtacatcgccaacagaaagaaccaacaagatgcacatcagagaaaactagactaagagtacaaacaacctcctgaaactaggcagcgtagaaggcgcgaatcgacaggagctgcggcgaagccacgacgattagaaccttgggtctcctttgacatgcagaccgcttgacgaaccggtaatcctcttcggacgccttcacagagtctgcacaaattggagatttgctgttgagccgtagattttggtgtaagcttcaccggacttaaccaaacttcaccacggagttcgcctttgaatctgaggagcatgagctcaacccgaatggcccacccagcgtggatacaactgcccagaaacgaagagggagaaggaccccagatccagccaccctgaagcagtgaagagcacaaccattgacgaatgaactgttctctagagggaacgacgcacaacgttgggaaagagcggactagcagaaggtgaagcagaagcaccaactgggaacccgaggagggaggaggtcggagaagggcttcggccagctcggtggcagggacaacgacatcaccgactccggcgacgacgccatcatcccggacactagcaagaggcacaaagcaccaccaccatcccagaccacagccggcacagagggaaagagaccacaagcaataaaccttctcgtagagcaccaacagcacctccatgcgcagcagcaatgaccacggcggcggcaagaccagacaccgccccatcacctcaagcttcaaatccagcatatcctccacttccactagctgcaagacaccaacaacgacgacgacgagaccacgccgctgccaggaaacatccacagctcgccatcgaccaacgccaacgccatcaataactccggcaaccatagaacctcaccggcaaaagagacacaggacagaccctaactacaggacaaacctgacacaatactactagggggaggtggccggacccctcctccaaccctcgccggcggcaagccgccggaatcgaaggggaagaggggccggagggggagagattggaaagctacagtagcaagaggaggggaaaggag

SEQ ID NO: 80736 - DNA, 287 bp, Oryza sativa
  unsure (1)..(287): unsure at all n locations
  Clone ID: PAT_MRT4530_80331C.1
tcgcgtactcgcgtcgccctcccccgggcgaggggggatgcagattccgtcgccggtctcctcctcctcacgtnaactacccccggctaacgggcgcctgagcgggcaccttgaaagccttgcgcccacaggctaggacaggggcggtggggcctcatatcgcctccacgcgctcggaggttggggggatgccttgagtggcgggggtggtgacgagatccgtgccaggcacaggcggatctagaagaggggctggtggctccacaggctcaaggacacggctgcga

SEQ ID NO: 80737 - DNA, 181 bp, Oryza sativa
  Clone ID: PAT_MRT4530_80332C.1
aaggttggtcacttcagagaactaactacaggttcgctattcaaagattaacaggattcaatccccccccccccccccaatgctagtgtggtttggtggcaaccaaaattccttttcttttagttctttgtatgctgttaattaattgttcagctctggtctaaaaaaaaaaaaaaaaaaa

SEQ ID NO: 80738 - DNA, 1242 bp, Oryza sativa
  Clone ID: PAT_MRT4530_80333C.1
atcgccgccaccctctccaaaaaccctagctttcctccccctcgaaaccccaccacaccactgcaacgcgtgcgagcggcggcgagaggaaggaggagaccgatggggcggccgtacgcggtgaaggggcggaagaagaagcggaagctcgacgacggcggggcctcccgcgagcccccggtcgacgaagaggcggcggaggagctgccgccgccggagggggtggaggaggaggaggggaaggaggaggacgtggcggcggcggcggcggccggggaggttgctgatgggctacccgtcgtgccacggccggtggacgggaagcggcggcccggcgcgatcttcgtgctcgagagggcctgcctcgaggtcggcaaagtcggcaagactatgcaaatcctgaactcggatgaccatgctaattatttgaggaagcaaaacaggaatccagctgattacaggcctgatatcattcaccaggctcttcttgcaatatttgatagcccactaactaaagctgggaggttacaagctgtttatgttaggactgaaaagggagtattgtttgaaatcaagccttacgtccgcatgccaccacaattattgcagaagttgagcattacagcagttggaaagcgggagaagcttcttaatgtcattaaaaatccagtcacccgctatctaccagttggagcaaagaagattggtctttcatatagtgctgagaagtcagtcaatttgtttgactatgttgccaaatccagtgacgatgtaccccttgtgtttgtggtaggtgctatggctcatggaaagattgacaacgaatactcagatgattacatacaaatttgcaattaccctctcagtgctgcctgctgtttgaatcgaatatgcagtgctctcgagcagaagtggaacatccagtgaaaggaaattttgaaaacgaacactgaaaaacattatgtgaaattgttgtgtactcgctagctaatgcaattttgcggtctcctcccatgctgagtgtgtactgtattctgattgtggagacttgaaaactccggtggtaatagtgttaaagttcaatgtttgtcgcaacaatatgttacatcttgaggcatactgttgcttatgattaccaccagccttgagctaggttggttgaaaaccgaactgcaacgtttgtcctttgccccaaaattttacgctgagctgagatttacccgcattaacaggacaaaaaaa

SEQ ID NO: 80739 - DNA, 1780 bp, Oryza sativa
  Clone ID: PAT_MRT4530_80334C.1
caatagaaatgtttggagacttggtattaatttggtacatgatacaatagtttccctagatattatctaatcagagtgcacagctgcggacagcatgtcaaaaatgcaatattgcctgacaaaatgcagcatgtccaaagaagtcttggaaaaggtacgtaatatttggcactagaaaattatgagggccccttattcaagaattgaatgcttttgggccaaatgagtacggtgataatgtagtgcaaaggaggcgaccgcatgtcagctataagaagacgggaaaaatatcaaacagtctactgtgcctgaaggaaaatttcatgacacggtgtcaggttgatttcactgctgatgcaagtgacttcagaagggctggtgacggtcttcttaaagtgtgggtgagaaggatcatcagtgacagtagtgtcaatgccccagcttgatgagctgagcccaaggaagtaggaacatacatcaaaagtgtagatattcccaatgtaacctgaagggcagccattccaagcgtgcttccgataagagacttgattgctggatgcatgtccactttccttgcagccaaccataagccacccacagacaatagggtagttgttgcaagaattcggtgattaagctgcacagtggacgtgttctcaaagaagttacgtatgaaaggctccatagcgaacacatcttctggtatccaggtgtcacccatcttgggaaatgtattgtatgcatgccctgcatcattgcccgcaacaaatgctccagatatggcagtaatgcctaccacggcactgacaggaattgctaactttttaatctttgctgcagaatttacccaattcattgatccagccggaggttctggcataaccactgacagagctgtccacaatatgccacaatatataacaaatgcagacgttaaatgggtcgccagtctgtatgggctgactcttggttgaacatactcagatgctggttcctcaagaccacttttcaccatccaccagccaattagtccttgacccgcaccaagtgcgaaaagacctgacagcctgagtccaagttggcgggtaacatacccttttgcaatgaaataggcaaaaggaacagaaaatagaaatcccagagcccttccccacattctgtgtccatactccatccagtatataaatttgaaatctccaaggctcatgcctttgttcaccctcttgtactcaggtgacagtttgtatttctcaaattccagcagccactcttcatctgacattggaggcaagctccccgtaaatttccagtcagtcatcgacaatcctgagcgtgtaagccgtgtaactcctccaagtatgaccaagccgaatacccacgtggcacatccgaagagccatatcccgatggccttctgtgcttggggccctttggtaacaagcaacttcaatcctgaatatgccgctgcattggccacgcctgaattcattgctgccacagtagtagtcattttccttgtgcattggcccatcaaggtcttggagccgattgaacggaaggcgtggaacgaggcgaggcgcgatgcggagaagacggatcccgtcgacctcgatccagttagtaaaccgccgccgccgccgcagccgcagacggagccggatccaaccctaggagcagccggagacggagcgggggctcccctcgggaggcgagcggccatgagcgaggacgcctggtccctcccccggcggagcagcgccgccgccaccctgctccccat

SEQ ID NO: 80740 - DNA, 550 bp, Oryza sativa
  unsure (1)..(550): unsure at all n locations
  Clone ID: PAT_MRT4530_80335C.1
gatccgcctagcggcacgagactctcacagctcactgcatcaatggccgcgggccaccatggcgctctcctccccggtgatggcccgcgcggcgccgtcgacctcctccgcgctcttcggcgaagcgcggatcaccatgcgcaagacgccgcgaacccaagccggcgcgtcgtcggggancccgtggtacggcgccgaccgcgtcctctacctcggcccgctctccggcganccgccganctacctcaccggcganttcccgggcgactacgggtgggacaccgcggggctctccgccgacccgganacattcgccaagaacgggactggaagtgatccactcccggtgggcgatgctgggcgcgctcggttgcgtcttccgganctcctcncccggaacggcgtctanttcggcgaagccgtgtngttcaangcgggctcncanatcttcancgaaggcgggctcnactacctcgcaaccnancctgattcacgcncaaaacatcctcnccatctgggcngtgcaagtngtgctcattggcccntccaa

SEQ ID NO: 80741 - DNA, 265 bp, Oryza sativa
  Clone ID: PAT_MRT4530_80336C.1
actaaacattctctccatcagtatattccgttttcggcgtcggcggctgcgagctcacccccccataatcttgctcttcggtcatatgccacgccagagactagattgggcttacgttcacctaccttttcattcgggtcttcatcaggatatgagatatggatcctctatgggggcgctttgaacgcgacggaaagaccacaatactctacaatcatgaagctctccgtagatcgtaaccaccatcacacaccttggatttaaa

SEQ ID NO: 80742 - DNA, 498 bp, Oryza sativa
  Clone ID: PAT_MRT4530_80337C.1
cagtcccctcagcacatgatctgcctctggagaaaactgcagtccggaagctcacggtgctgcaacgtgagatgacaatggcagcaaaaattagccgtattttggagcaaatagagacgatgttaactcgtaagctcagctcgctgttggaacaccagaaaatcatcagcattcagcgatgctgacggttcggaggagcgctcatcttctggactggacctgatatatgattcgttcattcttttggtcggtggctccgtttcaagctgctgatttctgacacctgatcaatgatgttcttgccttcttggggattctttcgcctgttgatatttatactcgcgtcaaatttatttgacctaggaatttttgaggctggtggtggtggtggtgacgtcggtggtatgccggcggcatgttttgtgtataaaaaggattttatgagttttactgtttgtgagtatatattcggtggactcctattggctgacactctaa

SEQ ID NO: 80743 - DNA, 474 bp, Oryza sativa
  Clone ID: PAT_MRT4530_80338C.1
atgaaaaacacaagagatcaagttagtcgccatcagaaattccgaacttgggccgccgtcgaacgtcgatacgcacttggacgtggatcccaccaattactacgtagtaaatcctccacgtacggctgtttaggcataaaccaatccccgtcacgctttctgctctttcttcactacctcatgcagtcgtgctgcagcgagcggcaaatttatcgtcggctcaccttgtctccctcctctcgcgcggcgcgtccgccgcccctctccacacgtgacacgtgtccagtcacacggcgagggatgcgcgcgactgatcgcccaatagctttctcgcatgagtacttgttgaaaagagtagacatggtgctgcgattgcggggctcagtagcgtgttcgttcagaagccggatcgagttgtgtcgcgacttcgcccaaaatcgattgtttatcaatacctaccggaaaatcgggaac

SEQ ID NO: 80744 - DNA, 781 bp, Oryza sativa
  Clone ID: PAT_MRT4530_80339C.1
ggtccggattccgcgtcgacccacgcgtccggccgtttctagctgtatatcgagctgagtcgccggcggcggtcatgggacgggtgaagctgcactatcatgaggatcgtgaacatgctgaacaggctggtgacgttttccatgcggcgaaacgggctggtcaagaaggcctacgagctgtccgtcctctgcgacatcgtcatgggcctcctgatgttctgcccctccgaccgactcagccacttctccggccgccgcaggatcgaggacgtgctgacaaggctcatcaactctcccaggaaagtgacatgaggaatgaactatgtcaaatacatgagagtctttagatcacacatgctcacccagctgaaatgctagagcgacacttaccgaggatctcactaacaccagcagtaaggcgccggttaactccaacattgaggagcttgaacaagagatcaggagatgccagcaccagatgcagcttacagaggagcaattgatgatgtttgagcctgacccggccaggtgtgcatccatggaggacgtgcaggccagtgataagttcatcgccggtatcctcagccgcgtccaggagatgaagaggtatttgctgtgcaacatgggctcgttcgacgtgactgcgtcaacatctgccatgcagcatctgtatctaccgcagcagcatcagcacggtgacatcactgatgatgggtttggaagcgatgaggtggcctcttgggtctctgaggggagccgcctacaacctcgtcggtggcgt

SEQ ID NO: 80745 - DNA, 463 bp, Oryza sativa
  Clone ID: PAT_MRT4530_8033C.1
atgcccactcgattgacgggctttggacgcgtgatcgatcggctgtcgcgtaacgatcggcgaagggcgaaggcacactataacactcggcgtctgggcctagctagattgttgcatcggacacgactgccaggcttgttaacttgggcgctcgatcgatcatatggcgcagattcacgcctgcacgctagtcgctcgacggaatctggatcagccgccgtcgtctacgacaatgctgcggtcgacatctccaacaagaccgcgccccacttccctccagttccgctcatcctccatgcctactgttcccagtacgtacaaacgcttaattctcagtctgttggacaaggccctggtccatgcacgaatgccagcgtattgcccttgtttgtttgttccaaccaatccatccatccatccttgtacagcgactgtcctatcaatttacagcatctacgagttg

SEQ ID NO: 80746 - DNA, 466 bp, Oryza sativa
  Clone ID: PAT_MRT4530_80340C.1
tttgttggtgacccgttcgacgcagtgggagcggaggtgagcaaagctccggccgcgacctccagcaagacgacgatggagccaagccgcccgcgcctccctctcctcctcctcctcctcctccacttctcgctgctcgcctcgccgtgttccgcgcggtggcgagacggctgcggcgttggcgatctgcgcgagagcttcctccggtgcgtcgcgcggcggtcgccggcgaccgccggcgacccgtcgcggctcgtgcacgcgccgggcgacgcctcctacccgtcgctgctcgacttcaccatccagaacctccggttcgccttgccgtggacgccccgcccggcgctggtgctcacgcccgtgaccgccgacgaggtgcgcgcctgcgtcgtctgctgccgcgcccaccgcctcaccgtccgcgcgcgcaacggtgggcacgactaccagggcctcttgtacc

SEQ ID NO: 80747 - DNA, 111 bp, Oryza sativa
  Clone ID: PAT_MRT4530_80341C.1
gcacgaggtttcgtttttagatctttgcatatctgtttttctcgagaatgtgtgaaaactgttagatggtttatttgacaccttgaaaagcttgccttcctgggtttgagg

SEQ ID NO: 80748 - DNA, 164 bp, Oryza sativa
  Clone ID: PAT_MRT4530_80342C.1
gtaataaaggaacgagcgctcaacacgcggggggttttttaaaagaaagtgcgtttggaccgacagcaacaagggaagagctgacgtgtgcagactcgtatattggtgcgcgtaaaccaagaggcatttcaccaaggagggacatcacttgaaacaacagtgtc

SEQ ID NO: 80749 - DNA, 391 bp, Oryza sativa
  unsure (1)..(391): unsure at all n locations
  Clone ID: PAT_MRT4530_80343C.1
ccgcgctcggcgtgcccgcccggccggtttgcnccgcgtaccgcncggcggcggcggcggcggcgctgactcagcagcaaccaccggccgcgctggctggctccacgtcagccggcgacgggtccagggtggcaatgtgaggcagcaagcaaggcaagggcagtttgggtatcacgcatccacgcgcgtcgcttcccatgtaattaatccnctattagcgacgataattaagtatggggtgggtcattacctcgcctctaatcgtggttgaaggcgaattaccggtcgctgtccaagctattttgtatgtcattactgtgggttaatcagattaaattaaccctgtcctttgtgcatccgaattaaaaaaaaaaaaaaaaaaaaaaaaaaa

SEQ ID NO: 80750 - DNA, 487 bp, Oryza sativa
  Clone ID: PAT_MRT4530_80344C.1
atggggcgggtcggggccgggttggtctggaacggccccgcccccggcccaggagtggagggcgggtcgaaatcgatccccggccccggcccctccggggccccgctgcacccgcaggtgaggacgcttggaggaggcggcgcggcgacgggcagaggcggagcggagacggcggcgacgagcggaggcggagcggagacggtgcggcgacgggtcgaggcggagcgaagatggcggcggcgcggcgacgagcggaggcggcgatgggccttgggctttgatccgtgggctgtgggtaggaagcatcacttcgccgcaagacggcggcgaccaccgctcctcggctggagggagccctcgtcgccggcgaagcccgcgcggccacctcccctgccggagttggccatgttctccatcgcggccatcaacgagagcgacaccggcgggcagtgggagccgctcgcgcctaccaaggaagctcaggcaa

SEQ ID NO: 80751 - DNA, 575 bp, Oryza sativa
  Clone ID: PAT_MRT4530_80345C.1
atggggcgggtcggggccgggttggtctggaacggccccgcccccggcccaggagtggagggcgggtcgaaatcgatccccggccccggcccctccggggccccgctgcacccgcaggtgaggacgcttggaggaggcggcgcggcgacgggcagaggcggagcggagacggcggcgacgagcggaggcggagcggagacggaagcatcacttcgccgcaagacggcggcgaccaccgctcctcggctggagggagccctcgtcgccggcgaagcccgcgcggccacctcccctgccggagttggccatggtgagctccacctctctctctgcgtgtggctgcgcgcctcgctccatgttccggtcggcttattccttactcgcttcctctctctcgcgcgcgcgtctccgcggcgctcgcagttctccatcgcggccatcaacgagagcgacaccggcgggcagtgggagccgctcgcgcctaccaaggaagctcaggcaagtctcctccccccttgtcgccccgagcattctctcttcctgcgtatctatctaatgcttcgcctccgtagctt

SEQ ID NO: 80752 - DNA, 415 bp, Oryza sativa
  Clone ID: PAT_MRT4530_80346C.1
gcagaaattcgatgataagctgtcaaacatgagaattggtcgacggcccgggcggccgcaaggggttcgcgttggccgattcattaatgcagctggcacgacaggtttcccgactggaaagcgggcagaaacagctatgaccatgattacgccaagctatttaggtgacactatagaatactcaagcttcggcgaaaataacatcggccgagcttcctccgtcaaccagaatttgccggacttcgaagcccgctacttcggccaagatcaccaaggggtcttgatgcgggaacaacactccttcggcatcttccggcccgaaagagatttgctgattcaagtaccgtggagccccttcgtcggccgaagcaatgttgtgcaccattcgcagctacatcttcttctgcagttttga

SEQ ID NO: 80753 - DNA, 498 bp, Oryza sativa
  Clone ID: PAT_MRT4530_80347C.1
tttctctgctgtcatgtgaactacaatattgtctgttattttttttattatcatggtaagctggggtctttatgtgcattgtaatttgttgttttgagaaagtaatagaaaaaatgcctcttggttaactatagtgcaatgtgatcagtgatcatgacatgcattatctagagattatgaaaaaacttcgagagcaggtggtctttattatgaaaaaacttaaaacatattgtttttgttaattatatatttgaagctattggttctgaggcaattctgttgttttacctttgcaggccattagtttcacttgcttatccattatatgcctttctgagagcaatagaaacaaaatctcctgttgatgatcagcaatggctcacttactgggtgctgtactcgtttatcactttgtttgagcttacttttgctccagtaattgaatggcttcctttttggtcctatgcaaagttgttcttcaactgctggttggtctta

SEQ ID NO: 80754 - DNA, 394 bp, Oryza sativa
  Clone ID: PAT_MRT4530_80348C.1
tcaagccaaacggttaaacccataaggacatgtctttgccaaaacaaaaagtgcatgtttcgaagtcaagatggaggcccaaaccaagtcgatttcgagtacgtttcggagtcgaggaccagtatgcactaaaatgggcgcccaggtcgcattcatgcttggattggggcgttctttatgcagatggaaagctaagaaaataacctttccaatggttctagtcccatattcaaattgtttcgacacggttgataaccagaggagacgtggtgctgcgattacggggctcaagagcgtgttcattcagaagccggatcaatttgtgtcgcgactccaccaaatcgactgtttatcacaacatttcggaagatcgggtaccctacatccacatcaa

SEQ ID NO: 80755 - DNA, 201 bp, Oryza sativa
  Clone ID: PAT_MRT4530_80349C.1
atgttggcaacttttgtgacaagtcgacaagcccttctctacgtccaactcgggatagaaacaaaggaaacacgaaacatagccttctcgagcaaggaaatccgagacccgacggaaatagactcggactcggaccctgacgatccgaccacccacatacctgcgggcgataatccaattaccggccacgggatctcctaa

SEQ ID NO: 80756 - DNA, 300 bp, Oryza sativa
  Clone ID: PAT_MRT4530_8034C.1
atggggattaaggtcacaaatatcaaaaactttgacatttatagcttccttctgaccgaagttagcctctatcatcttgaccacctgtgggttactgtgaaggcttcaaatgtgaaagaagttagtgctctggtttgggcgcgcgccgctgacgggcgggcccgcccgccaccctcgctgacgggtggggcccacccgtcatccccgtcctcccgccgctcccaccgccccgcccgcgccaagcgccgccgctgccgccgaatccgtcacatcccgccgcccccgcgtgcaattaagtag

SEQ ID NO: 80757 - DNA, 3027 bp, Oryza sativa
  Clone ID: PAT_MRT4530_80350C.1
atggccgaaggggcgcagctagctgcggccggaggggcggcgcgagcggcggggcacggcctggtggcggcagcgccggtgcgacgggggcgcagccgagcggaggaagagttcgaccctggcgttggcactgggcacggcagaccgaggatggcacgacgatgccagcggctgggcggagcctgcttctggggcgcgcggtggctgccgtcggaggaggaggaggaggccagctggcgcgacgagccgctgatggtcgcgccggacaggctggacgcgctcgggccgtacatgacgggcggcaccgctggcaacgacgccccgcggatcgaccctcccgccaaggacgtgtcgttgcttccacgctgcagtgcgctggttgccgtcgccgagaaggaaatcggaggaagcagcggtgcaaacatggcggttgctgtgaccaaaccgtccccaacagcgatggagtattggcagaaaaaattccctgagacacccatgcccccagccatactagacctgctgacaccactgcctacagttaacatgccaatcaatttcctatatcaagcagaatacaagaacaataatgctattgagttatattacattgattttatcgtctgcccattagcagtttggaacattgtttgcaaggaacgaatgaattgggccacattagctgcagaaggactcaaggaagtttctgtgtcatatggaagtgaaggtaaagaggagcctaagaaagcattccccatgggacgatatatgttagacaaggaacgagaaatgacttcatgtatagataaagaggacctcagagaagtctcagtgtcatatgactcaaacgtgaaactaagcaatttgttcccaacagcgggactaaaggaagtctccatgacatatggaagtgatggtgaagaggagccaaggaaaacattctctcaagtagggtatatgttagataaggaacgcaagaagtcttcagatgtagatgaagatggactaaaggaagtctcggtgtcatatggaagtaatggcgaagaggagacaagcaaaacctttgctatgggaggattcatggcagataaggaatgcgaaatgtccctacaaggagagaaagctgcggaggggttgaaggaagtctctgtgtcatacggaagtgaaggtaaagaggagccgaggaaagcattccccatgggacaatatatgttagacaaggaacgagaaatgacttcacacacagataaagatggtctaagggaagtttcggtgtcatatggaagtaaaggtgaagtggtgactcggaaagcatttcccatggaacgatacgtgctagacaaagaacctaaaaggaatctgcacagaaacaaagatgaacttagagaagtctcggtgttgtatggctcaaaagggaagctaaaaaatttgttccccactgggtatggacataagaaacataagcatgcaaatgaagcagatctaaaggaggtctcagtgtcgtatggaagtaacgatgaagagaagccaaggaaagcattccttagaggagggctttttttaggcaatgaatatgaaaagtctgtacacatagacaaagaggacctcaaagaagtctcagtgtcatatggctcaaatgtgaaactaagcaatttgttcccaacagggtatgcacatcagaaatatatattaacaagcggagctggactaaaggaagtctccgtgacatatggaagtgatggtgaagaggagccaaggaaaacattctctaaagtagggtatatgttagataaggaatgcaagaagtcttcagatgtagacgaagggggactaaaggaagtctcggtgtcatggggatcctctggtgtcgacctgcccgcctgcacccctcctatgggaggatacatggtagatatgaaaaacgaaaagtctctgcaagcagagaaagatggactaaaggaagtctcggtgtcatatggaagtaatggtgaagaggatacaagcaaaacctttgctatgggaggatacatggttgataacgaacgtgaaatgtctctacaaggacagaaagttgcattgggactaaaagaagtctcggtgtcatatggaagtaatgatgaagaggagacaagaaaaatcattcctatgaaaggatacatggaagacagggaacacgaaaagtccctacaagcggagaaaggaatggatcatggacgccatgttcacgcacacggcaacaagatgcagcaactggccgacgtcttcttcttccgcgacgccctccggccgggctccgtcatcacgccgaccatcccgccgacgacctcgctgccggccttcctccctcgccacgtcgccgacgccatcccgttctccgccgaccgctttgccgacgtcctcgccatgttcgcgccggcgtccctcgccatggcgcgcgagatacggtgggcgctcgacacctgcggccagcgggcggcggcgctgctcccgggcgagaaggccggctgcgccacctccctcgagtcgctcgccgacctcgccgcgtcgctcctcgggacgcgcgacgtccgcgcgttctccgccgccgaccttcccaccgacgccgcgaccacgccggcgcggcgcgggaggtacaacgtgacgtccgtgcgggagctctcggcgatggctggttccggttcgtcgtcgtcgtcggagccggcgccggctgccgtcgtggcgtgccacgacctgacgtacccgtacgccgtgttctactgccacagtaccaagccgaccgccgcgtacgcggtgacgctggtggcggcgaccaccggggacggcgacggcgaaggcgaggcggcctcgccggcgaagatggaggcgctcgccgtgtgccacctggacacgtcgcggtggagggcggacaacccgttcttcgtggcgcacggcgtcaagccgggggaggtgtccgtgtgccacttcctcaccaagctcagcatcgtctgggtcccacgccacgagcaggggggcccacgcgcagcagcttaa

SEQ ID NO: 80758 - DNA, 758 bp, Oryza sativa
  Clone ID: PAT_MRT4530_80351C.1
gcacgaggcacaggtagaatcatcgaccgtaagtaggtacgtacattaagtgtgagcttgattaactatggaggtatccaagctggccattgctttggccatggtagccgccatggcactcccctcccaagctcaaaactccccgcaggactacgtgaggctccacaacgccgcccgcgccgccgtcggcgtgggtccggtgacctgggacacgagcgtgcaggcgttcgcggagaactacgccagccagagaagcggcgactgcagcctgatccactccagcaaccggaacaaccttggcgagaacctcttctggggttcggccggcggggactggacggcggcgagcgcggtgcagtcgtgggtgggcgagaagagcgactacgactacgcctccaacagctgcgcgcaggggaaggtgtgcgggcactacacgcaggtggtgtggcgcgcgtcgaccagcatcggctgcgcccgcgtcgtctgcagcaacggccgcggcgtcttcatcacatgcaactataagccggccggcaacttcgtcggacagaggccttactaagttatttatacacacgggcgtacgtactggctagtactacgtatagtagtgaataaataaagacgtgaaaatgtaaacaggtcagtgtctgatccacgccttcacggtccataccgaggattctataaagcgtcatgtcgtacaagtaaaaataaatagtactccctctgtttctttcaaaaaaaaaaaaaaaaaa

SEQ ID NO: 80759 - DNA, 762 bp, Oryza sativa
  Clone ID: PAT_MRT4530_80352C.1
atgtcgacgccggccgcgacgccgccgcgggcgtccgccgccgtgtcgcctaacgaggcggcggaggcggcgctgcgcctcgcggagaacatgttcctccgcggcgacctcaccggcgcgaggcgcgaggcggcgcgcgcccgcgcgctgtgcccggcgccctccccgctgcacccggccgccgcgcgcgccatggccgcgtaccgcgtccacgtcgtcgcggcggcgggcaacgcgcgcgggcgcggcgtcgactggcacacgctcctcggcgtccggcggggcgacggcctcgacgccgccaagaagcagttaaagctgatgcgcctcctcacgcaccccgacaagaaccgctccgccgccgccgacggcgccttcaagctcgtcaccgaggcgtgggaggccatcagctccggccacgcgcccttcttctccggcgacgacgtggaacgcgacgcgccaaagccgccgccaccgccaagacgccagagtccggcgccgccgccgccgcggcagcacagccaacgccgcgccacccgcgactacggagaagaacatgtccggcacgacggctgctgcacggagaactacaggtcgacgtaccggagggggaggagaaggccgtctccggcggcggcggcggcgagcaagatgtacttcgccttctgcccattctgtgtcgccaaggcggcgcagcccaagaacgcccagtggcttgacatggacccccttgcgttctgctccaagttccatcgcttctag

SEQ ID NO: 80760 - DNA, 1122 bp, Oryza sativa
  Clone ID: PAT_MRT4530_80353C.1
atgtctactgaaaacaaaaggaaatgggtcatattagctacagagggattgaaggaagtctctgtgtcatacggaagtgaaggtaaagaggagccgaggaaagcattccccatgggacaatatatgttagacaaggaacgagaaatgacttcacacacagataaagatggtctaagggaagtttcggtgtcatatggaagtaaaggtgaagtggtgactcggaaagcatttcccatggaacgatacgtgctagacaaagaacctaaaaggaatctgcacagaaacaaagatgaacttagagaagtctcggtgttgtatggctcaaaagggaagctaaaaaatttgttccccactgggtatggacataagaaacataagcatgcaaatgaagcagatctaaaggaggtctcagtgtcgtatggaagtaacgatgaagagaagccaaggaaagcattccttagaggagggctttttttaggcaatgaatatgaaaagtctgtacacatagacaaagaggacctcaaagaagtctcagtgtcatatggctcaaatgtgaaactaagcaatttgttcccaacagggtatgcacatcagaaatatatattaacaagcggagctggactaaaggaagtctccgtgacatatggaagtgatggtgaagaggagccaaggaaaacattctctaaagtagggtatatgttagataaggaatgcaagaagtcttcagatgtagacgaagggggactaaaggaagtctcggtgtcatatggaagtaatggtgaagaggagaccagcaaaaccactcctatgggaggatacatggtagatatgaaaaacgaaaagtctctgcaagcagagaaagatggactaaaggaagtctcggtgtcatatggaagtaatggtgaagaggatacaagcaaaacctttgctatgggaggatacatggttgataacgaacgtgaaatgtctctacaaggacagaaagttgcattgggactaaaagaagtctcggtgtcatatggaagtaatgatgaagaggagacaagaaaaatcattcctatgaaaggatacatggaagacagggaacacgaaaagtccctacaagcggagaaagaaaactaa

SEQ ID NO: 80761 - DNA, 1731 bp, Oryza sativa
  Clone ID: PAT_MRT4530_80354C.1
atgggacaatatatgttagacaaggaacgagaaatgacttcacacacagataaagatggtctaagggaagtttcggtgtcatatggaagtaaaggtgaagtggtgactcggaaagcatttcccatggaacgatacgtgctagacaaagaacctaaaaggaatctgcacagaaacaaagcagatctaaaggaggtctcagtgtcgtatggaagtaacgatgaagagaagccaaggaaagcattccttagaggagggctttttttaggcaatgaatatgaaaagtctgtacacatagacaaagaggacctcaaagaagtctcagtgtcatatggctcaaatgtgaaactaagcaatttgttcccaacagggtatgcacatcagaaatatatattaacaagcggagctggactaaaggaagtctccgtgacatatggaagtgatggtgaagaggagccaaggaaaacattctctaaagtagggtatatgttagataaggaatgcaagaagtcttcagatgtagacgaagggggactaaaggaagtctcggtgtcatatggaagtaatggtgaagaggagaccagcaaaaccactcctatgggaggatacatggtagatatgaaaaacgaaaagtctctgcaagcagagaaagatggactaaaggaagtctcggtgtcatatggaagtaatggtgaagaggatacaagcaaaacctttgctatgggaggatacatggttgataacgaacgtgaaatgtctctacaaggacagaaagttgcattgggactaaaagaagtctcggtgtcatatggaagtaatgatgaagaggagacaagaaaaatcattcctatgaaaggatacatggaagacagggaacacgaaaagtccctacaagcggagaaaggaatggatcatggacgccatgttcacgcacacggcaacaagatgcagcaactggccgacgtcttcttcttccgcgacgccctccggccgggctccgtcatcacgccgaccatcccgccgacgacctcgctgccggccttcctccctcgccacgtcgccgacgccatcccgttctccgccgaccgctttgccgacgtcctcgccatgttcgcgccggcgtccctcgccatggcgcgcgagatacggtgggcgctcgacacctgcggccagcgggcggcggcgctgctcccgggcgagaaggccggctgcgccacctccctcgagtcgctcgccgacctcgccgcgtcgctcctcgggacgcgcgacgtccgcgcgttctccgccgccgaccttcccaccgacgccgcgaccacgccggcgcggcgcgggaggtacaacgtgacgtccgtgcgggagctctcggcgatggctggttccggttcgtcgtcgtcgtcggagccggcgccggctgccgtcgtggcgtgccacgacctgacgtacccgtacgccgtgttctactgccacagtaccaagccgaccgccgcgtacgcggtgacgctggtggcggcgaccaccggggacggcgacggcgaaggcgaggcggcctcgccggcgaagatggaggcgctcgccgtgtgccacctggacacgtcgcggtggagggcggacaacccgttcttcgtggcgcacggcgtcaagccgggggaggtgtccgtgtgccacttcctcaccaagctcagcatcgtctgggtcccacgccacgagcaggggggcccacgcgcagcagcttaa

SEQ ID NO: 80762 - DNA, 370 bp, Oryza sativa
  Clone ID: PAT_MRT4530_80355C.1
aattcggcacgaggggctaaaatggctaatcaaaaccagctctagctggaagattttgtttgttaccatgagagtatgagacatgcatagtatgcaaccatgcaggatcgcagtgcaagcaagtcgcgacggaatttttgtctcttgctgaagccccgttgcgtgctgcctgttcttgcgttcttggcacgggcgtttgtttgctacccccaagttcctcctgcaactcccctgtcgatcggtgtcatctgcttttgcgacgcgccatagcacatggatgcgaggaggaaaagggggtgcgtccatgtgttttgtgggttaatgttgatcagctcagctgcttgtctgtttgacacaaccaaaaaacaaa

SEQ ID NO: 80763 - DNA, 524 bp, Oryza sativa
  Clone ID: PAT_MRT4530_80356C.1
ttttttttttttttggtgcagcatatcctcttcgttattttccaagcataggtaaacatgcagaactttagtcctagtaggcatcaggttgtgcagtatctacatctctacatcaacacaaagctgatacaaattacagccgtgtacatgccagcacgtctctcgaaatatatgcccgcgtaatcgacaattgactgctaatcgagatgaggcagggatcaatacctaagaactaaaagaggagctatgtacattttcactctatgccatctaggctctgaatcttttaagataaaaaccttcgatcacagggggtggttacaatgcagctcgtccttggcccttaggcagcttcttagtcccagtgtcgtcaacgtcttttagttgataatagtgtggcgctatttctaccagccagtcgggcttcagttccgttacctgacgcatatattcttttgttgtaaggactaattcatggtatattacccatcgaggaagtacctgtgctaatccagaactaggat

SEQ ID NO: 80764 - DNA, 2010 bp, Oryza sativa
  Clone ID: PAT_MRT4530_80357C.1
gcacgaggtcccgttgacccaaattttcgttctcctcaccgagtatagtactgacgctgatcgatcttggagatttagaagaggaagacgacgacgaccaagaacaactagaagtcaaagaacgcaatggagaggcgtcctctgcatctgcatctcctcctcttcttctcggcatggctactgctgctgctgctgcaaggtgtaagctcgctacagttcaggcgagaggacttccccgatggcttcgcgttcggagccgggactgcggcttaccagtatgagggcgcagctgctgaggatgggaggacaccgagcatctgggacacctacacacattcagggaggcatccagaagatggaacaggtgacgtagcttctgatggctatcataagtacaaggaagatgtcaaactaatgactgagattggcctagaggcttatcggttcacaatttcttggtcaagacttatccctagtgggagaggagcggttaatccaaaagggttgcagttttacaacaatatgataaatgaactagtgaaagcaggtattcagatacaagttgccctatatcatagtgacctccctcagagccttcaagacgagtatggtgggtggattaaccccaaaattgttgatgacttcacagcatatgctgatgtgtgcttccgagagttcggcgacagagttgcgcattggacaactgtacttgagccaaatgtcatggctcaaggttgctatgacactggaattcttcctcctaaccattgctcatatccatttggcaacaattgtacaggtggaaattccacggttgagccatacttgtttatacaccataacctgctagctcatgcttcagctgttagactttacagggagaagtaccaagttgcacagaagggcattatcggcataaacatgtactccttgtggttctacccactcacagattcagctgaagatattggtgccactgaaagagcaaaacagttcatgtatggctggatcttgcatcctttggtgtttggagattacccagagaccattaagaaggttgtcggttcccgccttccgttcttctctaaccatgaatctgagctggttactaacgctttcgacttcattggattaaatcactatagctcagtttacacgagcaataataataacgtagtaaaggcacctttacaagacttgactgccgacattgctactttgttcagagccaccaagaatgacacacctactccagagtttctaccaggaaacactgtagatcctcaagggctggagaatgcacttgaatatattcgagaaaactatggaaatttgacgatttatattcaggaaaatggcagtggagcaccagacggaaccctggatgatgtggagaggatcaactatttgcaaaaatacatagcagccacactgaaagccatcaggaatggtgcgaatgtgaagggatactccatgtggtcattcatagatatttacgagatatttggtgggtataacagttggcattatggacttgttgctgtcgatttcggcagcacagaacggagaaggcagccgagacgctctgctagctggtactcagacttcttgaagaacaatgctcccatcaggagaattagaaggaggaagggggtgtgtaggggaacataccctgagaaaaatccccaaatcaaacagtatggtatcagagccaagaaacccaagctcaccagtgatcttcctccgattcgatttgttgatgtgaagggcccgatgatagaaactattcagaatgcaacaatagtatggacgacattgagcaacatgtattcaggagagggaaatgtaatgatgatggttgaggctcagaacaaagtagagaatttgaagcaagaggggagaacagtccaagagtacgctagtgagttgcagcacttatgggcagatcttgatcactatgatcccctacagttgaagcgtgaggatgacatatattgtgatcggaaataa

SEQ ID NO: 80765 - DNA, 1626 bp, Oryza sativa
  unsure (1)..(1626): unsure at all n locations
  Clone ID: PAT_MRT4530_80358C.1
ngctagaagacgggccgggaaaaaactgtgaccctacgaaactaccgaagcgaagcgaagcgaagaatcggcggcggcggcggcggcggcggtggggagaagccatggagcggctgcagcggatcttcggcgcctccggcatggggcagccgccgtcggactcgccgctgctcgactcctccgagcaggtctacatctcctccctcgccctcctcaagatgctcaagcacgggagggccggcgtgccgatggaggtgatggggctgatgctgggggagttcgtcgacgactacacggtcagggtggtcgacgtcttcgccatgccgcagagcgggaccggggtcagcgtcgaggccgtcgaccatgtcttccagaccaacatgctcgacatgctcaagcagaccgggaggggcagttgccgtcgtgatagatcccatccaaagtgtcaaggggaaagttgtcattgatgcatttcgccttattaaccctcagaccatgatgcttggtcaggagccacgacagacaacatcaaatgttgggcacctaaataagccatctattcaggctcttattcatgggctgaacaggcactactattcaattgcaatcaattaccggaaaaatgagcttgaggaaaagatgttactgaacttgcacaaaaagaaatggaccgatggattgattctgaagaggtttgacactcattcaaagaccaatgagcagactgttcaggaaatgctgaaccttgctatcaagtacaacaaggcggtgcaagaggaggatgagctgccgcctgagaaattagcgatagcaaatgtgggacggcaagatgctaagaagcacttggaagagcatgtctccaatttgatgtcatcaaacatagttcagacgctaggaaccatgctcgatacagttattcaatctatagagtaccacttccatcaccctgaccaagcagagggggtccccgccttcaccaacaccctccgttgggtgcagtggcctgccaacttaaagcagatgggattgacaaatatgacagaaaatctgaccccacttcttggtggtcagtttactccaccgccatccaagctgccggagggtgataatgaacgtttctccgactacatcagacgtttcacggagaagcgcaacaccataacacatgtcaaggactctcacgccaacaaggacgccaactcggagttggtcgtgacacacccacttggacgccaacttgggtggctactgcctccacccaaatgcgacaaccccgaatcctccaagaacaaaggcatgaagcgcaaagggggggactcctgcacccacgttgaatccatccctgggaaagaggatgcggcggaagcagcaggacgagcgacggcgaccctgctcgcgcgatggatggggatcggcataggcggcggtggcggaggatgtgctcaccaggatggatgcggtaggacgaatgatgctcgctcgctggatggatggggatcagcggcggaggcggtgcgcaaggggaaagtgacgaggacgaggggttacggcactgaaaggaaaatggatgtcagctggaggaaagtagcatcaaatgtcaaggacctcttatgccaaaaggtttga

SEQ ID NO: 80766 - DNA, 1586 bp, Oryza sativa
  Clone ID: PAT_MRT4530_80359C.1
gaaaagaagaaaaaagatcctgtgaaccctacgaaactaccgaagcgaagcgaagcgaagaatcggcggcggcggcggcggcggcggggggacgagacgactcgcagtcgcagcctctttcctcctccgtctctctctcccctcttcctctcctccgcgcggcgaacgaagcgagcgagcggcggccatggagcggctgcagcggatcttcggggcgtcggggatggggcagccgccgacggactcgccgctgctcgactcctccgagcaggtctacatctcctccctcgccctcctcaagatgctcaagcacgggcgggccggcgtgccgatggaggtgatggggctgatgctcggggagttcgtcgacgactacaccgtcagggtggtcgacgtcttcgccatgccgcagagcgggacgggcgtcagcgtcgaggccgtcgaccacgtcttccagaccaacatgctcgacatgctcaagcagaccgggagaccagaaatggtggtgggctggtatcactcccatcctggatttggatgttggctttcaggtgttgatatcaacactcagcagagttttgaagctttaaatcccagggctgttgcagttgtgatagacccaatccagagtgtcaaggggaaggtggtcattgatgcatttcgtctcattaatcctcagaccatgatgcttggccaggaaccgcgacagacaacatcaaatgttgggcatctaaacaaaccatctatccaggctcttattcacgggctgaacagacactactactccattgcaatcaattaccgcaaaaatgaactggaggagaaaatgttgcttaacttacacaaaaagaaatggaccgatggattgattttgaagagttttgacactcattcgaaaaccaatgagcagactgttcaggaaatgctgaacctagccatcaaatataacaaggcagtgcaggaggaggatgagctgccacctgagaaactagcgattgccaatgtgggacggcaggatgccaagaagcacttggaagagcatgtctcaaatttgatgtcgtcaaacatagttcagaccctaggaaccatgctcgacacggttgtgttctagtctccttctactgttgtgtcaaccctatacagacccccacccaaattattatttatgtttatcgaagcctctgccgtaattctgtaacttttggtgccagctacatttgggttctaacagttcgacttgaagaatttgttttcttttaaaaaaaaaaaaaaaaaaaaaaaaaaaaaaaaaaaagaaggctatcacagaacacaggcaaacacaggatcattgatagggcggccatttttaaagatccaatctttctttcccctgcattccacgtctttactttttttttggggcacccaaattcaattcaatggccaccgttttaccaccgttctgcttggaaaacccttggggtgcccaacttaatgccccttcaacaaattcccctttcgcccatttgggttataataaaaatgcccccacctattcccctttccaaaattttgcccaccctaattggcaattgggccccccc

SEQ ID NO: 80767 - DNA, 1815 bp, Oryza sativa
  Clone ID: PAT_MRT4530_8035C.1
atgccgaggagggcgaggaggaccggcgcggcgtacgtcgacgacgagagggagcgcgacatcaccttcttcaagcggcggaacgggctgttcaagtgcgccagcgacctctccatcctcaccggcgctagcgtcgccgtggtcatcgaggaccagaaccgcagcaagttccacgcggtcgggacgccgacggtgcaggccgtcgtcgacgccgccctctcaagcgacgtggaggaggcggcggctgaggcgcggccggtcgccgacgagcagctgatggagaggatcgcgccgctggagagggagctggcttggctgaagggtgaagctgccgagaaggatgagacgacgaaagcatccaaagctcggttcaagatggcccagaagaaggaggagaacgaagaggagggtgacacgaagaagaagaagctcttcttctccaaggccgacaagctcagctcagacgagatgaatgaactgttagctgagatgcttgagatcaagaaggaactcaacgtgcggctacccccgctacgtcgtcgcggtggcaagcggccaatccagggctctagcgtgccacctccaccgccgccgccgccaccaccgccgcagccggagcaacagctgcagctgccgcaatggccgaatctgtccggtcctcataaccagttgcttcctgtggcgccgccgccatttgtcgctgatcagccacctccacctccaccgccagcagcaggagggtctctctggatccctgagctgcctccacctccggtggaggggtcgccatgggctggtctgcttccgctgcgaccaccacggtttgccgggatggagccatcctttcttgaatcacagcaagctccgcctccggcacaggtcagcacacagctagcaccactacctctgatacgggaggaagctccattgctgcaggagccatttctgtttgctgatcaagcaccagtacttgctcctctgccggcgccattgcagatgcctgtggcagaaactcacttgccactgcaggctccattgctgcaggagccatttctattctctgatcatgcaccgacgcttgctcctctgccatcgccattgcagatgcctgtggctgaaactcacctgccactgcaagtgcaggctccgttcatgcaagaaccatttctgttttctgatcaggcaccagtgcttgctcctccgccgacgccattgcagatgccagtggaagctcacatgccactggaggctccatggatccaagaaccatttctcatgcctgatcaagcaccggtccatgctcctccaccaacgccattgctgatgccagtgggagctgatcacttcccactcgaggctccattgttccaagaatcacttataatggctgatcagaaatctgtgcatgctcttcctccacctccattgcagatgcctttggaagctcacctgccacctgcagcacaagagtataaccaagatctggccgtgcagcagcaaccccaagagtatgaaaactatgactacatgtttgagaacgtggggctctcacaggcacagccggtggccgctggcgccggcgacgcaggctttgcagctataggcaacgacgacaacccgttcggctaccaacagttggttgcctctcctctctatgatggacagatctacttcggctccggggttgataacatgggcgttcctcctgctggtgattttggtggtgttcctgaagctgctttgccggaagtcgagcatgcgtcttcgtccggttggggaaacaacattactggtgatgctggtgcatggttctga

SEQ ID NO: 80768 - DNA, 244 bp, Oryza sativa
  unsure (1)..(244): unsure at all n locations
  Clone ID: PAT_MRT4530_80360C.1
gcggcggcggcggcggcggcggagcgggttggtgcggctgtccaggagcgggaactgcagccagcttggcggcacggcgagatgttgccggcgatccaagngtacgccacgcaggcgggcggcggcgcagccgtggcaagagcgagaagatccggaggccggagcaccctgttcgtcccgttcgtcctcatgggaggcaagcagggatgaacgtgcaaacagaaggtgactgggcatattctag

SEQ ID NO: 80769 - DNA, 1225 bp, Oryza sativa
  Clone ID: PAT_MRT4530_80361C.1
aaccggccggtgtgaaccctacgaaactaccgaagcgaagcgaagcgaagaatcggcggcggcggcggcggcggcggtggggagaagccatggagcggctgcagcggatcttcggcgcctccggcatggggcagccgccgtcggactcgccgctgctcgactcctccgagcaggtctacatctcctccctcgccctcctcaagatgctcaagcacgggagggccggcgtgccgatggaggtgatggggctgatgctgggggagttcgtcgacgactacacggtcagggtggtcgacgtcttcgccatgccgcagagcgggaccggggtcagcgtcgaggccgtcgaccatgtcttccagaccaacatgctcgacatgctcaagcagaccgggaggccagaaatggtggtaggttggtaccattcccatcctggatttggttgctggctttcaggagttgacatcaatactcaacagagttttgaagctttaaaccccagggcagttgccgtcgtgatagatcccatccaaagtgtcaaggggaaagttgtcattgatgcatttcgccttattaaccctcagaccatgatgcttggtcaggagccacgacagacaacatcaaatgttgggcacctaaataagccatctattcaggctcttattcatgggctgaacaggcactactattcaattgcaatcaattaccggaaaaatgagcttgaggaaaagatgttactgaacttgcacaaaaagaaatggaccgatggattgattctgaagaggtttgacactcattcaaagaccaatgagcagactgttcaggaaatgctgaaccttgctatcaagtacaacaaggcggtgcaagaggaggatgagctgccgcctgagaaattagcgatagcaaatgtgggacggcaagatgctaagaagcacttggaagagcatgtctccaatttgatgtcatcaaacatagttcagacgctaggaaccatgctcgatacagttgtattttagatcactactgctgttatcccaacactgtacccagagctcgtttattttttatttttttatgtttatcgaagcctaccataattcagtgaacttaacgccagttacatttgggttatgaaagcttaccacttgacaacttcataattcattttgttggagcgctatctcctgtacggtgcatatatgaatgaaggttaatagtgtgtctattc

SEQ ID NO: 80770 - DNA, 373 bp, Oryza sativa
  Clone ID: PAT_MRT4530_80362C.1
taataaaagaacagggaaacttaccgaggtataccctccacccttcgatatacgtcacattttgatatagtatgtttgcgcatatacggacgttctcagcaaaagttaagaaagtccagcatggagtctacagatggaaagagtcctactcggatagaactgggtcatcattgtatcgtgtcgggtccgatgtctccgagtccaacctggagaccagttgacctgcggtataaaagggaccccccgggaggacctaaggcattgaatctcagagccaacacatccactacagcctacgaagccagagcttacaggagcagaattgccgggtgatctagttgaatcaactcgattacgatctcgtcggtatcat

SEQ ID NO: 80771 - DNA, 615 bp, Oryza sativa
  Clone ID: PAT_MRT4530_80363C.1
atggcgggaccacggggcggcggcggatgggctcctcgagatcccccgccgccgaagagagggccgtcggagttcgcgggacgccgggcatggagggaggactgcctgttgtcaccaagcacccgcatcgccgccgagaggaaggccgcctgctgtcgaggagagggccgccggagcttgcgggacgcagggcatggagggagctcgccagcgccaggcttggagggagtctttgtagaggtgactttgaagacacgagccatttggaaccaagtttgtcagtggcagggccatgatatggtttctcagcatccttcagcgcccaccttgatggattggtgggagatgctttgcaacatttctccaatagccaagaggaagatattgggagacctccagaatagattaaatcattatatgcctataatctcaacagttgatgccatgatggaaaccggcggtagaactgcggatgaaatttccagttcattggacgacgacaggtgcaccatcgtcgaggacgtctatgccatggttgcggtcaaggttctgttggcagttgcattcattgagaaggcacatgggacatctttgctcaccacactagagatctag

SEQ ID NO: 80772 - DNA, 899 bp, Oryza sativa
  Clone ID: PAT_MRT4530_80364C.1
ggcagggtggccgacgggtggggactggggaggaggcccccgcgggggcggggaggcagaggtccggcggccggcgtccttcttcttcgcttctttccgctaggcggagtcgccagcggcggctttctccaccgcgcgcagccgggagggaggtgagaggaggaggtccggcggccggcgtcgcgccctccgcccgcatcctcgttgccgccgctgtggcggccttcttcttctcctctttccgctgagcagagtcgccggcgacggcttcctccatcgcgcgccgctcgacggggggatgccgatggcggcggggccgcgtctcgccatgtagcagccgtcgatgatcctcgcgccgttgaggagcatggcgaccaggagccggcggcgaacggagtcgaccaggctgcggcggcgaacggaggcaaccaggctgtggcggcaaacggccagccgccgaggtcgcccgctgcagcgctggtgaagttaggatgatgccttccagttttgctctgatatgagggaacaatgatgcctggaaaataccagctactgacaagcacaagggaaagaagaatatgaagcatgtaaaatgaacatatctgcagccaaaccatttcaagttttcaaccaggctattttgttaatgctttgcaccattgctctgcccgtcaggatatccaattatccattattcacaggcccaaaggagtagggtcagtttctaaacctcgcctaaatagagcagagaaaaactacttattgttacaaggcataccttcaaaacaacagctcccccagtggagtgaccaagaagaaaacagaggacccctggattctcaagcccaattttaccaagaagtacatcttgtttgaagataataatatatttcataagt

SEQ ID NO: 80773 - DNA, 858 bp, Oryza sativa
  Clone ID: PAT_MRT4530_80365C.1
atggaggggctcaaggtgtctgaagagctcaacatgacaccagcagaggttagatcatggtcagatatgctgaagccattcagttgctcagatactatgttgcatgccttctccagtagcgtgtcgatcgaggaagcaggcgcgtcttgcgtctttgaagcaatgaagaaggcgtggggcggcggtggcagctggggttctcaccgccggctcagcacgatcccttcgccggagaactcatcgtcagtgttcgccaagattgttcagtctaagcagaccaagcatgtgcgcgtgttcagcagcggcacggaccatcggctgctgcgatcgctggtgaaccgcggagaggaggtcatcctcaccgtcccgaacgagcaattggagcatgtcgcgcggttcctcccggcgactaggatcacgcacatcatgaccagcgacgacgtcctggttaggtctctcgggaacacatatttcctagtccccacgatggtgaacctccaccccgcgctcgcggcggcgcgcctgaacggccgcgtgaaggcgtcgagcgtgcgtggtgccgccaaagcttgttccgcggccgactcagccgcaaataccacctgcttgctgtggcttcctccccacgcggagctgcttccctgctcagccatctccgctggcgcgcaaacctcctccgccgatgaccgcagcagcttgtcggacatgctccttccccgcgccgctgccgctgcagcttgtgaaaaagttggtcaaaacatcctgtgcgctgatgtgccatccaaagtgtcgtccatgtgtgcaaaaaccaccggcaaaacagctccagggggtaaagtgtccggtattgacagttga

SEQ ID NO: 80774 - DNA, 447 bp, Oryza sativa
  unsure (1)..(447): unsure at all n locations
  Clone ID: PAT_MRT4530_80366C.1
cttgaacctttatactctacacccttcttcctttnttttttgctatttaaataagggaattttttaaaatggatggccttaatttaaccggccgccncannatcattacttttttttaacaatcaacccttcctctattaccccacccttcaataaaccaacattaaaccggatgcttttcacccccttttaattttaaaattttctccccaattaattgaatagttttattaaacccgaaactctttcttgaatttggtttcaaatccaaaatttacttcacttggctactccaaacccagcaaataatcaataaattccacgctacttataaccaaataaaaatattgatgcattcccatccttcgctccaaaaaaataccaaccaacaccttcagaagaaaactctttccctaaagggtttttaattacaattttcacaaattt

SEQ ID NO: 80775 - DNA, 1187 bp, Oryza sativa
  Clone ID: PAT_MRT4530_80367C.1
ctccctctttccttcccttatcgtcctctctctccttcttcctttcctgattcatctcgccgagctctcctcgtcgcctcctccgtctctctataaataaggcgccccacggcgcctatcgattcgcgtcgccgcttcctgcagaggccgagaattattctcctgcgcccgccgcaaaaaccctagccacgccgatctcatggcggctaccatcagccaggcgagcctcctcctgcagaagcagctgaaagatctcgcgaagcaccccgtggatgggttctcggctgggttagtcgacgacagcaacgtcttcgagtggcaggtcacaatcatcggcccgcctgacaccctatatgatggaggttactttaatgcaataatgagctttccacagaattatcctaacagtcctccaactgtcagatttacctcagaaatgtggcatccaaatgtttatccggatggacgtgtatgcatttctattcttcatccgcctggtgatgatcccaatggttatgagcttgcgagtgagcgttggacaccagtgcatacggttgagagcatagttctgagcatcatttcgatgctttctggtccaaatgatgaatcaccagcaaatattgaagcagctaaggaatggagagagaagagggatgacttcaagaaaaaggttaggcgccttgtaaggaaatcacaagaaatgctctgaagaaaccggcagtactggggaaagttaaccataccacgtcacatgtgcatgatttggctgtcgatttccaaatgtcagttgacactagcaattcacttctccccctctgtacttcccatagtgtgcctggtggtggtcgcggtttcgtctcccaggaaggctgaatagcactgggacatgtttgtcacctattctaaagctctggttgtatttgtgtggcttgggctgtaaacgttgagaaactttgaaatactgccactcatcacaattttcgtaacaaacgtcatataagcaggcacctgcctgatctgctagctgttgaacgttgaaacacaatgtctgcaaactggtttcagtccgttctttgtaatatgttcttataaatggagcaatactcggtgctgtacaaaaatacttgctggagtttactcattcatcagttataaatctaaaaaaaaataaaaagtttcgtttcaaa

SEQ ID NO: 80776 - DNA, 314 bp, Oryza sativa
  Clone ID: PAT_MRT4530_80368C.1
agaaccaaaatttaacataattatacccttggggccatggttagaacaataagcttatacagacaggtttgaccaattaaacgaaccaagtttgacaagggaactcaaacaaacaatttgggatgacccaaacatagggcacttttacactggtcgaacacatagggaagtcggtttcaaaaagaaaaccaaccttgcccgcaaaattccaatacattggttgaaaaacgaatcaaacataacttggtactacagaagacaagagccgagcccttgggaaaattagaacccttttctggggacaattgttgggc

SEQ ID NO: 80777 - DNA, 3632 bp, Oryza sativa
  Clone ID: PAT_MRT4530_80369C.1
atgggctgctcaccttctaaggtgtgttcatgtccacattataagggcagtttgtgcttctgtgactgtggatgctttggacaaacacctgactccccaagagagtcaaggggaaaatcaaaccgggttaggggaaagacagattctagtgcttcagatgcttcttctgatgacctagaggaagatgatgatggattgcaccaaatgaacattacaagggactctaatgttggtatcaatcgactctcaagggtctcatcacaatttcttccaccagaaggttcacgtaaagttcgaatcccattggggaattatgacctgagatattcctacttgtctcaaagaggctactacccagaatcattggacaagccaaaccaagacagtttttgtatacatactccatttggaacaagccctgatgaccatttctttggtgtatttgatggccatggagaatatggagctcagtgctcacaatttgtaaagcgaagactatgcgaaaacctgctcagagatgaccggttccgtactgatgttgttcaggctcttcattctgctttcttggcaacaaattcacagcttcatgcagacagcttagatgattctatgagtggtactactgcagtcactgtgctggtgaggggtaaaactatttacattgcgaatacgggtgattcacgtgctgttattgccgaaaaaagaggggaagatgttgttgctgttgacctgtccatagatcaaacaccctacaggactgatgagcttgaaagggtcaaggagtgtggtgctagggttatgacgttggatcagatagaggggctaaagaacccagatgtacagtgttggggcaccgaggaaagtgatgacggtgatcctccaaggttgtgggtgcaaaatggcatgtatccaggaactgcttttactcgcagcattggagattctgtcgctgaatctatcggtgttgtcgctaatcctgagatttttatcctggagctcaatgccaaccatccattctttgttcttgctagtgatggagtttttgagtttctttctagtcaaactgttgtcgacatgattgctaaatacaaggatcctcgtgatgcgtgcgctgcaattgttgctgaatcctatcgcctctggctacagtatgaaactcgtacagatgacattacaataatagttgttcatattaacgggttaactgatatggaatgtactcaaactgtaatgaaagtatctttacaaccttcccaacaagtcgtagaattggtaggctcagaatcaccatcgacaataagtttgaatcccaagaaccagcgttccaggcaagatctatcacgtgctcggctgagagcacttgaaagttccctggaaaatggtcgactatgggtccctccatccccatcgcatcggaagacatgggaagagcaagcacatattgagcgaatactacacgaccatttcctcttcaggaagctcactgactcacagtgccatgttttacttgattgcatgcaaagagttgaggtgaaagctggggatatagtggtgcagcagggcggtgaaggcgagtgcttctatgtagttgggagtggtgagtttgaagtgctagccattcaggaagaagatggaaaggaagttacaaaggttctacatcggtatactgctgacaaactatcttcttttggggagctagcactaatgtataataaaccacttcaagcttcagtccgtgctgtgactactggaactttatgggctctaaagcgagaggattttcggggaattctgatgtcagagttttcaaatataccatcattaaagttgctccgatcagtggagctgtttacgagattgacaatgcttcaactaagtcaacttgctgattctcttgttgaagtaacttttggggatggtcaaatgatagtagacaagaatgatgatgcatcttccttgtatattattcaaagaggtcgtgtgaaacttaaattggctgcagatcaggtggcccaatcaagtcgagaagatggtaattacgtgtttgagatagatgaagggggacactttggagagtgggctctctttggggagacaattgcttttactgctatgtcagttggtgatgtgacttgttctactattgcaaaggagaagtttgactcaattattgggcccttgccaaaagtttcccagtctgattccaagctcaaagattccttggttcctaaagggcatggtgcagatgatagttccttcaggaaggcgcagctatctgatttggaatggaaaatgtgcatatatgccgctgattgcagtgagattggtcttgtccaactaagaggttctgacaagatcaaaagcttaaagaggttttacatcaagagagtaaaagaccttcataaggaaaaacacgtatttgatgagaaggatctcatgaaatctttgagccaatcaacttgtgtgccagaagttctatgtacttgcgctgatcaatcctacctaggaatactgctgaattgttgcctttgttgctcactggcttcaatacttcatgcaccactaaatgagtcgtctgcacgattctatgcagcctctgtcgtcgtagcgctagaaaatctccatcagaggtccattctttacagaggtgtttctgcagacattcttatggtcgaccgatcagggcatcttcaactagttgacttcaggtttgcaaagaagttgcaaggtgaaaggacttacacaatatgtgggattgccgactctctagctccagagatagttcttggtaggggccatggattttctgctgactggtgggcgctgggagtgttgatttatttcatgctgcaatcagacatgccatttggctcttggagggagagtgaactggaaccttttgcaaagattgccaagggtcaccttgtcatgccatcaacattcagcatcgaagttgttgaccttattacaaagctactcgaggtaaacgaaaatgcgcgccttggggccaagggagcggaatctgtgaaaagacacccctggtttgatggcattgactggaaacaaatagcagatggtacttatacagtaccccaagaaatcaccgatcgtgtcgacagctatgtagaaactcttacagaggacttgacagcatccccttccatgccaagtgaagaaacagctgatcaggctgctccagaatggatccaggattggtgatctcagttgctgcatgaacaaaaagatgtttgggaaaacttgtttagcatttcaaatgaaaaaaaaaacgggtacatacatgattacagcatgtgaatttttgtcgaaatggtggattatacgtagcaacaattctgtatagaggaatcatcagctcaacctgcaaccatctgatggatatgctagcaaaaatgtgaaaaatggtgttgcagtagttcaagcaggagccagaactggtctgcagggagaactaatgattcctgtggtacatatgtatagacccttctttcatttgtaaatttatttgtattattcatctgtaggtgaaaattataactgcctacctatgtaattttgtataacattttgataagaaaacaggggccatgtgtctgacggtgacttctgaacta

SEQ ID NO: 80778 - DNA, 1296 bp, Oryza sativa
  Clone ID: PAT_MRT4530_8036C.1
atgtctaaacaagttcaaccattcgtcacgctgcgctttggctcactgtgggtggacgttcccataggtccattccaggtcgccaacagtggcagctcccttcagaccactgctgcatcgccagctccggcggactatgaacaggaagtgagctcggcgccacagggcgggtacattcctgttctatccaaagctgccaagaggaggagggcagcagttaaggcaagacaggctgcctcacaagagcacttcatcaaggtgcgtgaggccgcttccaacgactcgatgcctcctgggtttaccagggctgcaccagccatgaccagggtggcacccgtcaagaccaggagctacgaagcatatccaaggttccgtcgcacaacactcgggcgagtggactcagcggcaccatcatctgcatcaacaggtgtcgcgctgaaccgccctcaccgcctgcacccacttgataaagggacggctgtgatggaggatgaaacgcaccatgagctgccctcaagcaagaagaagggtgtagtagttctgcaaagtgtccctacacaacagcaaagctcgtcgccgtcatcaagcaagctccgagctgatgccccagagttcatcccatcatcaatcaaaaaatcaagggcatcccggcgcagggcgaagaagaagcgtacgctccaatgggaaggagtgtacgtttcacttggtgacgtcaggatgggtcatgtcgacccaaccgtggtgccttctgacacggtatcgactgttactcccactcaacgcccttccatgcaaggatctttttcaccatccaagaaccgacgtcggcgacgcaatgcttgtcgcacttgggttgacttcccagttgcaactgaagccaaggagacaaggcatcagcgtgagaaagtgtacaatgacatgatgaacaaaaggatcagagaaagccgcagaggtcaagctgaaaggtttgaagattgggctacatttatggaagcaaccatctgccataccatgaaagaaatgttgccgggcgtttcaacgtccgacaatggcatgggcggcgccattatgaggcgcgccgaggcactggccagatggccagagtatcaaaggcttgttgatcaagagctgtggcgacaaacctatgtcaaccatgctaagcgcgtgtgtgctaagcgagcagcgcataagcagggagaattggcagcatgtcacgcccggaaattcactagtaatttccgaacttatttatgcataaaaccctcatccaggaatcagccgaggtacacaaactga

SEQ ID NO: 80779 - DNA, 937 bp, Oryza sativa
  Clone ID: PAT_MRT4530_80370C.1
gcacgaggttctctcctcagatccgtgtgctcggctccttcctcccctcttttctccccgctttgcctttcccgtccaatcccggcggcggcggtggctcggtgacgagaggagtagcagtggtagtggtggctcaatgacgaggaggggcggcgagagctcggcgacagggaagggcggcgagagctcggttcctccctcccctcttctcctctccaatcccggcggcggctcggcgacaagtaaggacggcgggagctcggctccttccggcaactgatgggagaagacgccccttgtggagagctgctgccggtgctgccgtcgtcgtcagcgccgccgtcgcaaccaaggggacacggcttccttgctggagagctgctgccggtgttgccgtcgtcgtcctcccccgccgattacgagtgctacgtccactacaccgagtaaacgcccccctgagcctgtcgaatgggaggcaccatcataattatatgatccagcattatgaagtaaccatcaactgatctaagctgggagatgaatcggaagcagcaaggaagcatatgtcctttgtcgtttgattggcctcaacactcaggtcaacctcaataaggtttttgtctattctcttaatgttaccttgctaattcaagatcttttgattcgtgtgacttggatatgactttgcttaggtcaatgtgtgaacgactatttggcatttggctggatttggtggtcagtgacttgtactagtgatgtattgacctggtcagtgaacctgtgatgtaattgaacatgttttggatggtgatttgtggatgtaattaactgacttgtcatgtaacttacttgaggataacatgtgatctttttttttcaaaaaaaaaaaaaaaaaaaaaaaaaaaaaaaaaaaataaaaaatataaagggcggcccg

SEQ ID NO: 80780 - DNA, 221 bp, Oryza sativa
  unsure (1)..(221): unsure at all n locations
  Clone ID: PAT_MRT4530_80371C.1
tcgcactctcgcacgctcgcactctcgcaccgtcgaccggcggttcgcgcacataacccgcgtgcctggcctctcttggcggaagctgcgtcgtcgcaccgtgctgtacgtngtggcgcagtgcctcggcgccatggccggcgccggcatggtcaaggggatcatgaagcgcccctacgacacgctcgggggcggcgccaacaccgtgagcgacggctact

SEQ ID NO: 80781 - DNA, 1869 bp, Oryza sativa
  Clone ID: PAT_MRT4530_80372C.1
atgcagctgcggcggcgggggcgccagatcgcggcgctgctcaagtcggcgtcgcgcgccggcgacctcctccagctccacgccgccatgatcaagtcctccctcttcccgcaccacgccttcccctctgccaagctgctcgcctcgccgcacgcgccgctcccctacgcgctctccctcttcgccgccatccccaccccgacgctcttccaccacaccgcgctcctccgcgcgctctccgcctccgccggcggctcgctggccgccgcgctgtccgtcctcgcctccgcgcgggcgcgcctccccgctctggacgagttcgcgttccagccgctgctcgcgctctgcgccaagcggggccccgacggcgacgccgccgcggcctcgctcgggaggcaggtgcacgcgctcgtcgtgcggtacgggttctcgggcgtcgttagccttgggaacgccctgtgccacttctactgctgctgtggcggtggtggcggcgagggaatggcggacgcgcggagggtgttcgatgaaatgccggaacgggacgccgtgtcgtggaacacggttattggagggtatgtcagggcgggggaggtaaccaaagcggtggatatgttcagtgagatgatgtgctgcagtgtgggcgtcagtgtgacggcgttggtcaccatgatccggtgtgggtggcaagctgagcctgtgcatggattctgcatcaaggtggggttctgcagggatgcaaaggtggcatctgcaatggttgggatgtatgtgagagagaagagcgtcgagtgtggcaggaaggtgttcgatgaggcgaccaagagggacctggtgctgtacaattgtatggtggatggctatgctgaggcagggcaagttgaggaggcaatgggcttggtggataggatgaggctggagggagtgaggccaagctcagggactcttgtgggtgtgctgtctgcttgtggagcatctggggcaatggcagccggccgtcgccttcacgagattgcgctagaagcaggacttgagcttgacactgcacttggcacagctctcatggatatgtatttcaagtgcgggtaccccagtgaggcggtggcggttttcgacgcgatgcaagaaagggatgtgaaggcatggacagtgatgatcatgggtttcggtgttaatggacaggcaggtgaagtgatctccctgtttcgctccatggaagaagatggagtggtgcctaacgaggtcacctttcttgcggtactgaatgcctgtagccatggtgggttggtgtcggaagggaagaagttcatggagagcatggtgttgcaatatggcatcttccctaacactgaacactatggctgcatcatcgatctcctgggaagggcggggcggttggatgaagcttatgagctcatagcgagcctatcttcccagagtgatgccacagcatggagagccttgcttgcggcctgcagagtccatggcaatgccaacctggggaggatggtgcaggcacggttggataacatggacgactaccatccatcagatgccattcttttgtcaaatacatatgcattggaaagccgatgggatgagattgcacatgtcagagattcagaagatcagaaaattgtcaaggacaagaaggaaccaggttgcagctccatagaagtgtcttgttcatttctttccaatgcaacctgtttcgtagcatggaaggtcagtggtatatgtcaggttatggcagatgataatgaattaaatttgcaatgctcaaagaatgcaaaaggaactattcacacttccaccgggcgtgactatcatgcaagcaagactgagaaaagcactggaatggaagactaa

SEQ ID NO: 80782 - DNA, 373 bp, Oryza sativa
  Clone ID: PAT_MRT4530_80373C.1
atcgaaagggggcgggctatacgggtcacgcttacattgccgcgcgtgctgctgcatagaggatagatggatacaactaagtacgagcacgtgttcgtaacggtaccatttctggactggaaagaccatgtgattagcgagctttatctgctgggagagaataaccatttaatgaggtgccttctgatgatgaaagtcaggagaacacagtgttcagaccattcacagatgctgaattgaaagacactcacgcggatgcgtagggatactgactatgatcgttgctagcgagaaggatgcataggggcccgatgaacgacttgaaggcgagcgccgcgggctttaattttgttgcgtcacattctatgcacga

SEQ ID NO: 80783 - DNA, 927 bp, Oryza sativa
  Clone ID: PAT_MRT4530_80374C.1
ccggccgggaaaaagaagcgtcgaattcttgcttcgccagaggaagaagagaagagagaaggggaggaggaagaaatggctgccgtccaagcagcaatctccacctgctgctcttcgtcttgcctgtcccggccgccaccgccgttcgcgaggaggcggcgcttcaaggtcacggccatggctccccagaagaaggtgaacaggtacgacgagaagtggtcgaagcagtggttcggggcggggatattcgcggaggggagcgaggaggtggaggtggacgtgttcaagaagctggagaggcggaaggtgctgagcacggtggagaaggccgggctgctgtccagggcggaggagctcggcgtcacgctctcctcgctcgaggagctcggcctcctctccaaggccgaggacctcggcctcctcagcctcgtcgaggccgccgccgccgcctcccccgacgccctcgcctccgtctcgctcccgctcctcgtcgccgccatcgccgccgtcgtcctcgtccccgacgactccgccgccctcgtcgcgctccaggccgtcctcgccgccgtcctcctcgccgccgccgccggcctcttcgtcggctccgtcgtcctcgccggcctgcaggagtccgactgatcgtcgccgcagggtttgatgatcactaggacatgtacgtattaatcaccgtatttatacagtgcttagtgtgttactagtatcgactggttctcgagatgaaaatttgttgtaaatttcaaggagtttcaggctgcaatggatgattgtgtaattaggaacggggcagagccaacaaaggaaagaagggaggtgggagctacctttcccatggccggccgggttggggaaggagggagaccaaagcccccccgtccgtcacacatgtcacatgatatgagccagaaa

SEQ ID NO: 80784 - DNA, 406 bp, Oryza sativa
  Clone ID: PAT_MRT4530_80375C.1
atggagatggaggtcccgacgagtgcttccatgggtgccatggggtcgcttctcaggaagctccatgtactactcactcccgaataccagcagctgatagagccagtgaaggacgggatcgagctcctcctacaagatctggaagccgtaaaggccgccatggtggatctgtcagagatggagactccaaccatgatggcgaggcactggatgaacgaggttcgtgacctatcttatgacattgaggactacatcgacaatacgatggactcctgctctaattcagcgccaaactggaaggggataaaccttgtcggcatggggaaatccaaggtcgagcttaccaacaagctcaccgacggttccttgcctcagctgaaagtagtatccattcttggatgtgcag

SEQ ID NO: 80785 - DNA, 899 bp, Oryza sativa
  Clone ID: PAT_MRT4530_80376C.1
gccactagagaacattgaaactagcacttcttccttgaagcaggatcgtgctgctagtgagaggatggaatcatggagccgtgaggaaaacatgtacatcaattaatggaggagcacgcagcaaaatgattcctacgtacccccgatccacaaggataggcaatcatatcttcattgactcaatcggacttataggttgattcttaaagcatcatggattaaagcggatatagcacaagaaagatcatcggggaaggaggacaacacctacgataggaggtctaggattggaagccaaattgagcttgtgcctgttagagatcgagtttctagagagcttattagaatagtcaacgacgtagggcatgcgcttggacttaagagaggaggagagcaaacagagagcactccgtaatatgctagaggtaaattgtcaaagatgttgcaaaatggcggctcgccttggatgtcatttaggtggagtatatgtttttatcccttgccacctctatgaaaatcccttaattgatatgtccaagtgtagctagaacatccctatcgagctcaagacaccaagaaggcgatgcttcttcatctcatacccggaaaggccacggctccaagtgatgacgatgatgaagaggagaaggacaacggcaaggattacatcgtatattgtgctgacgagattgggccatctcaacttgacaatgcacctcagccatctcaacctactcaacaatacaacacttccatcactgctggtccctccatcctcgacatcggttgtgacgagcagacagggtcgcccggagggaaggtcggagcggcggatcaaaggaggaggaatggaaatcaaggaggcggaggaggaggcgagccactgggcgactgctgct

SEQ ID NO: 80786 - DNA, 405 bp, Oryza sativa
  Clone ID: PAT_MRT4530_80377C.1
atggtggcccatctctcctcaacgtcattacgatggcagcgatcacggctccgtcaggtcctcgtcctcccgccaccattggccatggcgtcaggctccacagttagattcgtcagcaacggtgatggcggtggcactaatgccacattcggcagtggtggtgagcagcaactgtatcctttgcctcttatgaacagcgtcagtggcgacggacaatggccttggcctttgataggcggtgatggccctggtctctggctttgttctatggaatgtgttgaggaggttgcgagagtttgtgttgtttttaaagattacgtcagtgctgctttcaacgtgacaagtcttgtcaataaccatattgatatttggtacaacgatcctaacatcaaagtttctaattga

SEQ ID NO: 80787 - DNA, 668 bp, Oryza sativa
  Clone ID: PAT_MRT4530_80378C.1
aatttagcggccgcgaattcgcccttactatagggcacgcgtggacgacggaccgggctgttattcagatttgggataccaaacagtatcatcactgacttgggatccaacttcaccagttctgaattctttgacttctgcgagcaaaaaagcattcagatcaagtatgcatctgtagcccatccgagagccaacgggcaggttgagcgagccaacgggcaggttgagcgagccaacggaatgatattggaggcacttagaaaaagggtctttgataaaaacgaaaaattcgcaggaaaatggataagagaattgccttatgttgtttggagcttgagaacccaacctagccgggccctgcatggaaacactcctttcttcatggtctatgggtcggaggcagtgctacctgctgatctcaagtttggggcgccaagatgtgatcttcgaaagcatagcagaagccgaagccactaggctggaggatattgacgtacttgaggaagaacgactgaatgcagtgattcaatcagcacgataccagcagactctaaggcgctaccacgacaaagctgtcggggggacagtttctttaggatgggagaacctcggtctacggcgaattttaacggggggagggacgggcacaggttatacacccttatggg

SEQ ID NO: 80788 - DNA, 192 bp, Oryza sativa
  Clone ID: PAT_MRT4530_80379C.1
ggacgataaacggagcaacctgaacactatagtatgcacttatgcccacgcacaaacactaagtagagggtgacaggggacagaccataagctgggaagagcgacacatggaaactgaaaccgtgtgccaacaggaacgaaacgcacaggaccatgttagtggactgctaacatataagctcactgacttgg

SEQ ID NO: 80789 - DNA, 3729 bp, Oryza sativa
  Clone ID: PAT_MRT4530_8037C.1
atggatctcgacaagtccacttccaccagcgcgtccctgatgaagttgcaggaggacggtgctctccctggccgtgggaccatggagagagaactaggagtctttgttttccctaaggagcaaccagacaagatttccgaatggaccgccaaacccgccctaaccccttcccttcagtctttcatcgatgtcatcgatgacctccgagtacaagggttatcggggtatgaagtcgttgccgacttcatcggcccttcccttcagtctttcatcgatgtcatcgatgacctccgagtacaagggttatcggggtatgaagtcgttgccgacttcatcggtttaaacagcgaaaccgtggagcgccgcgtcggtcatgggatgatcagcggccctacgacggcgagcaacgtccccgtccctctttgcgagaaggggaaggctgatcgcgaggctgtgatcaacgtgagtgtatttgagaactcctttacttctgcttttctggatcatactgtgacttcatgcatgcaggctctccctctgactgatgtcattgggccgctcgtggaccaccaggcagcggcctcgttgaaagagggcgtcgccaaggaggcatccgacattgctgctattgctgctgctgctacaacgagtggccgcaacattccgaagagggggaggaagttctcctccgtgctcgggaatcgtcggaaggcgcctaccccatcggtgagcttttctggtcgcgagattgaggaggcgaaggtggcggcggcggcgtccgcgaacgaacgcgccgacaaactggcgcgtgacctggcggaggtccgggaggacctccagaagatgagagagctggtggccggcaacgagaggcagcagcaggggctcgagcaccgcatgtcagagctcgagaacaacttgtcggagatccgcggctcgctgcaggtcacctacaccggtctgcaccagttcaccggggagtgcggcgtcacgaccaccatcccggcgaaccctgatgacttctcgttgacgtcctcactcgtggaattggccacggcgatggaggagattccttccaagcatgcggccaagattagggaggagacgtccaacgggatatataccggggcgtgccacgtcctcgcagatgttgacgtcgaggatgtccagcagcgcgggcagcctgagtctctggtcgccaacagtggcagctcccttcaaaccactgcatcgccggctccggcggactatgaacaggaagtgagctcggcgccacagggcgggttcattcccgttctgtccaaagctgccaagaggaggaggagggcagcagctaaggcaagacaggctgcctcacaagagcacgtcatcaaagtgcgtgaggccacttccaacgactcgatgcctcctaggtttaccagggctgcaccagccatgaccagggcggcacccttcaagaccaggagctacgaagcatatccaaggttccgtcgcacaacactcggcgagtggcctgttcgtgagatacggacgggtccatccaaggcagcgccgcgtcgccgagtgtcccctgagccaaaagggattgcttattctacgccaaagaagagtgcactgggggctaatgcatccccggcctgcgtggcggggtcttcatcgactcctgtggcagtgccactcaacattgcccctgagatgctaggggtagtgtctcccaagaattccctaagcatattaggggctgcaccttcaatgtccacagcagcggcaccatcatctgcatcaacaggtggcgcgctgaaccgccctcaccgcctgcacccacttgataaagggaaggttgtgatggaggatgaaacgcaccatgagctgccctcaagcaagaagaagggtgtagtggttctgcaaagtgtccctacacaacagcaaagctcgtcgccgtcatcaagcaagctccgagctgatgccccagagttcatcccatcatcaatcaaaaaatcaagggcatcccggtgcaaggcaaagaagaagcgtacgctccaatgggaaggagtgtacgtttcacttggtgacgtcaggatgggtcatgtcgacccaaccgtggtgccttctgacacgcaagatacaaggggcacctatgtcctcatcaagccatggtcaacgagtgtacgaggtgggaccgacatcacgcacaccgaagaaagcaacaacaacaacatcactgcccccctggccgagcatgttagtttgagttattcaaggcctgataaaaccttgcgtagcacttctacatcctccgaaaatgaaatttctaaatcaaatcctcgtgagccgcctgaaacccaggtggagcaggttcttgccacaaacgagacctgctcagccgaggaaaggctagctcaactcacagctgcattacaacaaaaggaagacgagttagctgccctccgcacccagatggcaaatggcactagccagagggatggaggtcaaacttccgctagtcagaacagccatcaaaacatggcgactggcatcagccttgaagcaattcaacggatgatcaatgacggaattaaggctcagtatatgcaaacacactactccatgcgtccaggatacgtcaaaccgtatccgccggacgttgaccttgtcccttttccgaacaactaccgccagccgcaattcagcaagttcaacgggataggatcacctcatgagcatgtagcccatttcctcgcagcatgccaagatacggccaacaatggagcgttgttgctccggcaatttgtgcaaacattgtcagggccggcgttcacttggtacagtaaattagcaccaggctcaattcggacttgggaacaaatgcaagattcttttcttgagcacttctacagcacacaaaggactgtgggcattacagagttaactcaaactgaacaaagggcgaatgagaaggcagctgacttcataaatagatggagaaatctcagtttacactgccctcagcccattacggaacatgaggccgtgcgtatgtgcatgaataatctgaaccctgagatggctgtttatttgcagggtgtacggcctgtaacttttgaggaattggcatctaaagctacagatatagagaactacacacagttcgtggctcgtcgctcaaaaccatactcgaggccggtcgagaagagcaacccacgagacaaggcaacattcaagcccaaacaggctcaagccatggaggcaacggcagtaatcccatcattgcaagcaggcggggctgcttcaagaaacaacgaacagaaaagtgcaccagtcggcctacgggagttaaatcttatagcgcttcctaaatcaaaaaggccagaagaagctaccaagtttaacgaaccaaacttctgccattatcatcgcatcttgggccatacgctaaaagattgctttgtggtgaagaatgttattcaaaagttgatagatgatggggtaatttatgcggatctcctcaaaagtttgaagatgggcaagaaaatggcagctaatattgccactgtccaggaggatccgggtatgcaccattccacggtgaacaacaagaacgtcgaaatcagcctaaaagagaagcttatgatcgatggatacactccaccagacccaccctgcctactcgccaaagatcccaagagcgaggacagcagcggaaaagaagaagcgcactccagcgattga

SEQ ID NO: 80790 - DNA, 587 bp, Oryza sativa
  Clone ID: PAT_MRT4530_80380C.1
ctcgccatccctgttgattttgtctgtttgctgctccccatgcctctggaacattggggaaaaagatgatgcggtgaatgaactgatgaatgaaggggataagataaggctttcctgtctagagagtacttgagagtagtgactagatagaaaatagtattctattgcttaattagattataatctatgaggttacttgattgtaaaattcttgtgttgtatgtattcctgtattctgaatgcttcatgtcatcaaattccttagttttcaatcctctgttttccgtatgtaatcctatactattcctgtgtttttcctgttcttgcatttttcctatcctgtgttctgaataagccgtcaaccttacaagtccacgaaaaacggaataaggaagtaatgcatgatgacaagcaactcactatactcatagctgtgttgttgcaaaatgtttcttagattgtactttttgtactattaatttgcatgtcgattgtatgttcagtgatgatccattctcaaggaaacctatactcgtgtttacgatgatccagaggaagaagagggaacgacacttgatgaagctggg

SEQ ID NO: 80791 - DNA, 952 bp, Oryza sativa
  Clone ID: PAT_MRT4530_80381C.1
ccggccgggttcatggacaaattggttttcatgaaaatgttgcatctcactatcttggcatgaaccctgagttgccaaggatatcatcttttctacaccagaaatgctctgaattcttacaacttaatagtgatgcaatgagatgtttaaccagggtagaaaaacaagttgagcaatctacaataataggtcctcctttcccttctgtgacagtacccagtcctttgtcaggaaatcatctttcttccatgtccaggggttattgtttaggctataaggatcctaataaccagggtattggtttttctccaatgtagaaccaagtggattcaatactaattacaccttgcctctgagaatggaagcacatgcaatggaatcctatgacatagatgctctatctaaagccactagacaaagttgccaagtatactttgattctgaagaatggagttctcaatgtgtttaagaaatggactagatgaagctacaaattcgaacatgttgactacttaacaacaacctcagaggaaacaatatagacaccttgagagacatcataagaaaatcgttgcatctgaagcacaggcgctacatagcaatgttgagactcctatcacgattaacaaagctaaggaattcaatgaaatagaaagggatcatgaagcatgcttcctttcattttatcatcctactactattccatcccatgtcttgaatatgatgcattggagcttcgacatcgatatggaaaggaaaatccattgccaagagtatccaacactatgctatggaacaccaaggattgctcatcacaatgctcccttacgtcttccaagatcttatgttgacttccctcccaaatattatctcaaaaaggttggacataacgcagaaaaatggtcctgtatattccaaaggaaattcactggtctaaaaaaaaggcaattat

SEQ ID NO: 80792 - DNA, 417 bp, Oryza sativa
  Clone ID: PAT_MRT4530_80382C.1
atggagatgacggcgccggggcgcggtgatgatttggaggagctcatcgcccggctcgtcaacgtcaccgttgctgcgctgatgatttggcggcgctgttccactactgcggctcggcggtcgccgcgtgtggcatggcggggtggcggcgtggggctcccaggcagtggcgcgtcggccgcaggcgtccgcccgacggtcccaggcgtcggcgtgacgggctgcgaggagcgcatcaccgagcaccgtctcacctccttctccacacgtgcctacaatcttcgcttccgcctccactttgcttccaagtcttctttgagagaggaggtaaaagagaccgaggaagggatgaagcgcaattcttttgcttttgcacttgcagttttggtcatgatcaggttccactccaccaggtaa

SEQ ID NO: 80793 - DNA, 339 bp, Oryza sativa
  Clone ID: PAT_MRT4530_80383C.1
atggccaacgattggagatctggagaactggggctcaaccggcagtgggtggaggagaggaggaggacctgctgttgcacggcacccttaaggccaccatcctcggtggaccacctcttcaacccaacccgcgccactagtgcccacttcgctaccaacatcgtattctccgtcaatgctgcacagcccatcggtgccacgctcatcgcctgcacctacctccccattgagctcctgtccagccaggacattgagcgccatcccgacatcctcgatgctagcaggaagaggatctcatatgggtcgacaatacatgtccagctacagttccacgtctga

SEQ ID NO: 80794 - DNA, 1416 bp, Oryza sativa
  Clone ID: PAT_MRT4530_80384C.1
atggccgagctggcgcggcgcctcgtcgcgttccacggctgcgccgccacgctcgtcacgttctccggcctcgccgcgtccctggacgcgcactccgccgcggtgctcgcgtccctcccggcgtcctccgtcgccgccgtcaccctcccggaggtcacgctcgacgacgtccccgccgacgccaacttcggtaccctgatcttcgagctcgtccgccgctcgctgccgaacctccggcagtttctgcgctccatcggcggcggcgtcgcggcgctagtgtcggacttcttctgcggcgtggtgctcgacctcgccgtggagctcggcgtccccggctacgtcttcgtcccctctaatactgcgtcgttggcattcatgcgccgcttcgtcgaggtccacgacggcgcggcccccggcgagtaccgtgacctcccggaccccctccgtctcgctggggacgtgacgatccgcgtcgccgacatgccggacggatacctcgacaggtccaaccccgtgttttggcagctcctcgaagaggtgcggcgataccggcgagcagatggattcttggtgaacagcttcgccgagatggagtcaaccatcgtggaagaattcaagacggcggcggagcaaggcgcgttcccgccggtgtacccggtggggccgttcgtccggccatgctccgacgaggccggcgagttggcgtgcttggagtggctggatcgccagccggcagggtcggtagtgttcgtctccttcgggagcgccggcatgctgtccgttgagcagacgcgcgagctcgccgccgggctggagatgagcggccacggattcctctgggtcgtgcgcatgccgagccacgacggcgagtcctacgacttcgcaacggaccaccgcaacgacgacgaggaagaccgcgacggcggcggccatgacgatgacccgctggcgtggcttcccgacgggttcttggagaggacgagcggccggggcctcgccgtcgcgtcgtgggcgccgcaggtgcgcgtgctgtcgcacccggcgacggcggcgttcgtgtcgcactgcgggtggaactcggcgctggagagcgtgtccgccggcgtgccgatggtgccgtggccgctgtacgcggagcagaaggtgaacgcggtcatcctgacggaggtggccggggttgcgctacgcccggcggcggcgcgcggcggcgtcgacggggtggtgacacgagaggaggtcgcggcggcggtggaggagctcatggatccaggcgagaaggggagcgctgcgcgtcgccgggcgagggagatgcaggcggcggcggcgagggcgcggtcaccaggcggggcgtcgcaccgcgagctcgacgaggtggccggcaagtggaagcagacaaaccgtgctccatacgaataa

SEQ ID NO: 80795 - DNA, 1266 bp, Oryza sativa
  Clone ID: PAT_MRT4530_80385C.1
atggcgccgacggagttgacagccggagggggaggaggcggcatcatggggaaagaagggggcggcggcgccgacagagttgacctccactcctcttgcatggatggacgacaccaaagtaatggtaggcggtggctggaagaaggaaagcaccgtgtggaggagcgcggtgatgagatcgacaagagacaggccaagaaggcaaggaaaacgtcagccgacttgctgctactcgaccacatcggctaccaagatgaatctcaagatgacggtggctcgacatggactgcccctatggtcacgtcccgcggcgtgcgtttccaactgtccttacgcccaaaagagccaccggatgtctctcgcatgctgttcaaggcggtcgttccagctgacatcctgacgtcctacgaccctaacaacaccgccaaccccttcttacgaccatcggcacgattcgttcttattgtgatatcgtccaacgacaaagctatactcctgcaggccttatgcgctgtcgcggggctagagcgtagaaggtccgaggaggggtggcatgtcttcttcttatcgacgtcaactaatatatggcgccgtaagctggtgtgcctcgcccctgatcatgagctccgtgactaccattgggaggtgtcgtcgatactaacctaccgaggtaggttctggtgggtggacctgcgccgcggtttgctatcctgttcctgcgattctctcttgctagaagacgacatcgaagctaccacccaacagccgctggacctcgatttcacactgctcccaaacgtcaccatggaggaggccaaggaggcccgtctatccgagtatccgctgcaacgagaccggtgcgttggtatcagcagcaatggccttaggtacgtcgaggtgcgcgcgcataggcatcggtgcccgagcaaatcaccggtagcacccccgcctctctgcgacgattgtcgggccgactctatcacgtcctgggtcctgtacgaccacagcggtgcatgggcagaggagcgcacgctcaagcttgcagatgtctggagggacgagagctaccgatccacgggtctaccgaagaaggtggtggagttctcttatcgacccgttcgatggcaaagttggcgacggccgcgagttttgcgtccatctaaggaccaagcagatcaaggcctgcagcagcagctacaagggcttgaacgacggagctttggagcctgtgttcacggcgagtttgaaaagcacccgcaactatga

SEQ ID NO: 80796 - DNA, 481 bp, Oryza sativa
  Clone ID: PAT_MRT4530_80386C.1
cctgcagtcctgctcgacagggctcctcatagtcagacccgcaaccagaccggatctgttggccacttggcctccagagcagcgtaacgacctcgcgcgccgccgtcgttcctgcatgcactgactgtagatgctgttagggttccggacggacgggcaggcctggagcgccgagtgctagcaaggagaagaaaggcacgcgggcggacgcggaactgcgcctatttttcggcgcggatgctggtctttttcaacttccttcaagtagctaaagaaaatataactccaccgccacgaaagttgcctgaagacgtattatttttaatgatactaaagaaaccctcttgcttaggagtctgttttggaaactcttagagatgccatagattctaatgaaaccgactatactgaatctacggctatggcattgaatccgaaggggcttaacagccacacagtctatccagcataagacaagaag

SEQ ID NO: 80797 - DNA, 312 bp, Oryza sativa
  Clone ID: PAT_MRT4530_80387C.1
gggcaaaaaaaaagttaaaaacacaaaaattaacaaccccgaaaaaaaagaaggggtttattaacacatcgttggcaaaaatgggccaacaggggggccgaaaattataaacgggcaaagaggaaacaacttggtaaatgaacccggcgaaaaaaatctttaaggggttctaaaaagaggctaattataccaaaaaagtccattgcggaagggcccattgtcacaggaaagattttttgtggggggcgcactttgaccccttggccccgggggggccctttttcccacttttttgttggaccccccaagccc

SEQ ID NO: 80798 - DNA, 4185 bp, Oryza sativa
  Clone ID: PAT_MRT4530_80388C.1
atgcctaacaacccaataaccaaaaatactaattactgttcactaatctcgttgagcaatgacgtcgagactatgagcgccaccagtgcgccacctgctgcgtccgctgagccgcggccaccgctgctacatgcctttgctgccagagccgatcctcatctcttcaggaacaggaagttcttggaacaatatatgggttcaagaccagttgatgaggttcttgatgctgccgcggctggggtccactactccacgctccgtttggatgagcttaacatcaatggctccatgacaggggaggaacaaccaacgacctcaggggtggagaatgggcaccaggagccatttgtcattggtgttgccgggggtgcatcttcaggcaaaagtactgtatgcaaaatgataatcgatcagctacgtgatcagcgtgtagttgttgttactcaggagtctttttattatgggttgtctgatgaggaattggtccatgttcatgattataactttgatcatccagcaaagcaacctttcctgtcgatgaggcagaagttggggatggtagatatggctgatgagggagaagttggggacgatgctgatgtgcgattaacaaggaggattcgacgtgacaccattgagaagggtagagatatcaaaactgtgctagatcagtactcaaagtttgttaagcctgcttttgaagacttcatcctcccaaccaagaaatacgaggttgttgagcatggtcttggtcatcttccattcaaggaaaagcaggtcataactccaactggatcggtttacactggggtagagttctccaaaagattgtgtggtatctcagtgattagaagtctggaacttatgaccattgctgtacatgcttgctatgttggaacttatcacgctccccaaggagtgcatgtggtcagcaagagatttccaagagtgaagatcgtgacatcagaaatcgagtttggtctgaatgatgatttccgcgtcatccctgggatgggtgagtttggggataggtactttgggacagatgattatcagtcatcaacaccattcttttgtgatgagaaaaatcgtgtcagatctggagctcgcgtgctcgagatggctggtgcggcggtgagcgcttcctccggggcgatgaactccgtcatagccaagctggcttccttgctcaccgacgagtacacccatctcaagggcgtcaagagcggcatccgctggctcagagacgagctgggaagcatgaacgccgtgctgcagaggctgggagacatggacgacgaccagatcgatgtgcagaccaaggagtggaggaacaaggtgcgtgagctatcctacgacatcgaggattgcatcgaccgcttcttgcaaaaccacagcagtggtgatgccaatgctaatctcctgcaaaagggcgtgcgcaagatgaagaagctgtgggagaaccatcagattggagatgagatcaaacaactcaaggaacgtgttatcgaagagaaagagaggcatgaacggtataagatcgcggatcggctcatggttgcaccccaacatgtgcgcttggatcctcgagtaccagccttgtatgagcaagccaaaaaccttgtgggcattgataagcctcgggaacagataattggctggataaagagcgaagagaagcaactgaaggtggtgtccatctttggaacgggagggttgggcaagactactctagctatggaggtgtatcacaagattgatgaatcatttgattgtcgggctatggtctctgtatctcggactcctgatatcaagaagcttcttagagacatactctttcagattaacgagcgcgagtatgaaaagtcaaacgactgggagatggaacaacttataccgaagttgaggaagaacttagaagacaagaggttatccctgcaaagtggcttttctgaaggctcgaagatgcctaaagcatcaaaggacctatcccatctccgatcattgcatatgtttaagcatgaaagtttgccagtagtcccttcagaatttgcaaaatgtcaagtcctgcgtgtgctggctataaaacttcgtctgggggacaactatattaaacatgttggacatttttgtgaacttaagtacttgagaatcaaaggaggtatccacaagctcccagaagagattggtaagctgcagcatctacaaacacttgatctggcatatactcgtattgaaaaactacctgcaagcattgtccagctacagaaactggtgcaccttctcatcccttttggagtgccgctgcctgacgaaataggaaatctgcaagctctggaggtgttgtcgggtattgatctagatagagcatcagtaaaatctatctatgggctaggtgagctgagcaaactgagagatgttcgaatctggtggtcagattccaacgaagataacagcaaggagggccacaggacagcatgcatctcctctctctccaagcttgtcaagtgcagcctccaatcattgcgtcttgcgcggggattaagcaaccctgatgtcatagcttcattgatgatttcttgtggtttcattccccctctacggagacttgtcttttacgatgagttccctaccataccaagccaatttgcatcgctcgtcaacctcacccgcctacgtgtagaagttggtggagtgggaggccttgagatccttgcaagtttacccattctgcaatctcttaccttggacacaaattctgacgtctccaacttgaggtgggtcatcagcggccaaggcttccagaatttacgcaagttcaattttgaaattcgggattcggtagtggggttgatgtttgaaccaggagccatgccaaagctccaaaggctgaaactctggttgtatgcaaggtggcagctcgatgtccatggtggtccggttgttgggctgcaccatctttcagccctcaagtctatcgctcttgtattcaactgtaatggtgccgttgctgccgaggtggagtcttcggaggatgacgccagggctgcagcggtttcccaccccaactgtcccactctcgacattcaaaggtacaatgaacgccagcaagctgtggcctccggaagctcctcctccacaccccactcccccggcgatacggatgacaacgatagggaacggtggcggcggcaccactccaaatccgaccggcgtagctccggcgacgctgcccttgacccacatgaaggtcgctgccctcgccctcacggcgagctccctggcacgtaccctccttgccgtgtcgccatccatcaactaggccacaaccatctccacgccggcactggtgacctgcgccatgccaccgccactgctttgcgtcggccagagcaatgccgcatccccccgcaaaaagcaaaccaacgcctcattgagtcccttcccttttcctcgcgccatcatgctcccaagacctccctaactccattccctcaacaaatttcaggggaagtcgagcggagagccacagccgcccacctcgggtcctcgccgccgcacagctccaagctgtctcccaatagagggtccactctacccatctcggccttcggccgagccaccctctccgccacccatcaccgacgggctcatgctaagccgtcgcgcacgctcatcttcccaccgagatgtggcagcgatcatgagcttcaagtggaggctatggagaagcaaaatattgattttggcaaggtgctgggtgagattcaggagtcattggtgtcgctgcatcgagctcaaggtgatacgcaggccgccatcatcaagctggatcaaggcgtgagtgcttggagaccacaagtggaggcggctgtgcaggatctgcatgaagaagttggcgaccttcgtcagcaggtggatctcctgaacaaggtgaagcaagctccaccggcggcgtcttcccctcgggtcccgttgacgggcgaggaaaggaaggccccattgctgccaacgccgacggctacctcgcctgcagctgtggcggagggcgcggagaaatgggccaatggccaccgtcttcatcaaaatttccggggaaaggcatcgggtgtagttactaccctgatccattctctgggcaagggaagaagcggcggagtcgtcgggtggacaatcaactcgtga

SEQ ID NO: 80799 - DNA, 2560 bp, Oryza sativa
  Clone ID: PAT_MRT4530_80389C.1
attcaattcttctctgttctatctctgcttctctgagttcttccttttcccttccaatttcttccaaaatcctattgaatcctccattgttgcagcgcgaagctagggtgccgtgacaaattggtatcagagcttgttaatcctggagaagccatgctatatctctcgtttgcagcttcaagtggaggctatggagaagcaaaatattgattttggcaaggtgctgggtgagattcaggagtccttggtgtcgctgcatcgagctcaaggggatacgcaggcctccatcgtcaagctggatcaaggcgtgagtgcttggagaccacaagtggaggcggctgtgcaggatctgcgtgacgaagttggtgaccttcgtcagcaggtggatcttctgaacaaggcgaaacaagctccaccggcggcgtcttccccttgggtcctgttgacgggcaaggaaaggaaggccccgttgctgcctacgccgacggctacctcaccagcagctgtggcggagggtgcagagaaatgggccaacggccaccgtcttcatcaaaatttctggggaaaggcatcgggtgtagttactaccctgatccattctccgggcaagggtacgtctgattccaaccgaattccctttcgatccttggagaatttcgatttggatgggggggcgagtgattttgaccagggaaatcggcagtacaatcatagagttcctaaacttgatttccctaagtttgatggatcagacccgcaggattggcttatgagatgtgagcattactttgatgtgaacaacacttatccagggttatgggtgcgggtttcaactatctatttcattggtagagcagcttcctggcttaggtcttctagggctcatgttcgtttccctatttgggaggatttctgtgtggcagtagctaacaaatttgatagggatcaacatgatgaattgattagacaaatggatacaattaggcagacagggactgtgtgggagttttatgagaaatttgatgagttgatgaatcacctgttagcttatgacccagcagaagaagtggcggaatcgtcgggtggacattcaactcgtgaattgaagaaatttgatggccaagtgaataatagatcttctctgaaaggggcttggccattacctcaacctcctggacgagtagttggggttcaagtgcttttcagtattttacatgaaactgacagtactcttgatgatgagccagcagtttctcccactggtcagattcaagggctggagattctcatcttggtagattcgggcagttctgtgagttttctgaattctaccattgctgacaatctaaagaatgttcagagaaaacctcaacaaatttcggttcaagtggctaatggaaatatcttgcattgtacttctgccattactaattgtcaatggagcactcaggggtatgtgtttaatacaactctcagggttctttctcttaacagttatgacttgattttgggcatggactggttgacagagcatagtcccatgacagtgaactgggccaccaaacagcttactgtctcactgaaaggacaatttattctgttacaaggaattaattcccaggtttctcagtgtaacttactgcttggccatcaaatgaaacagctgcaagctagacaggcagtggctcatcttgttcagttatgtgtctctcatagtaatatagagcaggagtttattccagacagtgtgcagcaagtgcttcaggaattctctggtatctttgatgaaccatctggtttacctccttcccgatcatttgatcacactattcctctgctgcctggggctcaacctgttagtgtgcgaccctatcgttacacccctgcccaaaaggatgagatagaatcagaggttactgagatgttggataagggaataattcagcctagcgcaagcccattctcttctccagtgctgttagttaagaaaaaagatggcacgtggcggttttgtgtggactaccgtcatttgaatgcaattactgtcaagaataagtatcccctccctattatcgatgaattgcttgatgagttatcgggtgcacagtggtttaccaagcttgatcttcgatcgggttatcatcaaatacgaatgaattctgccgatgagcataagactgctttccgtactcaccatggtcactttgaattcaaagtgattccctttggtcttactagtgctccagccacctttcaaggggtgatgaatagcattttgtcctcgctcttgcggcgctgcgtcttggttttcatcgacaatattctgatctatagccgctcgttggaggaacatgttaagcatttgagggctgtttttcagattctcgctcggcatcagctcaaagtcaagaagagtaaatgctcatttgcacaacagcggttatcgtatctgggtcatgtcattagtccaaatggagtggccacggatgaggagaaaattcaggctgtgcaaatgtggcccacacctacctctatgtcacgcccagaaattcccgaatag

SEQ ID NO: 80800 - DNA, 502 bp, Oryza sativa
  Clone ID: PAT_MRT4530_8038C.1
ggctaaatactggtaaagataaatttcaccgtgttatttctttgttacagacaaacataggcagctaaatgtgagcgaatgaaggagatggcgtggtatcgagaccaagttttcgctcatgccacgacgacagttgctgcagtgggacgcggacgtgcaaagtaacaacacatcaacaggtaggtaggcagacatccatgaatcgaaaacaagcatacacatgtaaacatacaaattataattttaacatagattattctccacggttctgctcactgcccttcttgaagaacatcaagagcttcctcctcacagagtgccatgtttgcatcaaagaacaatctgatcgttccaatgtcttcctagtagtcagcgaagacatatgcctgcatgagcttcatgtaatccatacgataaagctgatcccctgacaagcttaaaatgtgctatatagtcctcaagtgcccagaaaaaattttcaactgcatctgctgtatcccgg

SEQ ID NO: 80801 - DNA, 948 bp, Oryza sativa
  Clone ID: PAT_MRT4530_80390C.1
atggcggcggtgacgctgggaacggagaccgacgggtcgatactttgcccggcgtcgctgaattcggtggtcggaattaagccgacggttgggctcaccagccgggctggtgtcatccccatctcccccagacaagacactgttgggccaatatgtcgtacggtgtcggacgctgcccatgtgttggatgtcattgttgggttcgatgagcttgatgctgaagcgactggagcagcatccaaatacatccctagtggtggatatggacgattcttaaggatggatggattgaaaggcaagaggattggcatccccaatggctttttcactgaaggagcctatgggaagacacaactgagggtgtaccaaaaacatctttccactatgaggaaacacggagccctggtgatagagaatatcaacatcacaacaaatttgtctgccgcgcaggatgttctttattccaacgagaatatcgcattgcaagcagagttcaagttaagcctaaacgcttatttgtcagacttgctgtattccccagttcattccctcgccgatgtggtagcattcaataatgcacatcctgtggaggagagacttcaagattttggccagcccgacctgattgcagctcaaaaaaccaatggcattggtccagtggaaaaagcggcaatccagcgtctcaacgagctgtcagctgatggattggagaatctgatgaggatgcaccagctagatgcgattgtcacccccaactctcatgcatctagcttttttgccatcggcggcatgcccgcgatcaccgtgccggctgggtacgatggtcatggagtaccatttggtatctgcttcggtgggttgaagggctatgaaccgaggctgattgaaatggcttatgcttttgagcaagctaccaaagttcgaaggatgcccagcttcaagccatag

SEQ ID NO: 80802 - DNA, 2103 bp, Oryza sativa
  Clone ID: PAT_MRT4530_80391C.1
cttctatttctcctccaccgactcgccaacccctgggtgtgtctctactatcccattgggtgcccctaccgctcccctccccgtccgacccccgtatctgccgccaccggggctgggcacggttctggttgatctcccccggccaacttcttgcggcggcggcgatctccgtgcgtggcttcgcgccccggttcttggaacaatatatgggttcaagaccagttgatgaggttcttgatgctgccgcggctggggtccactactccacgctccgtttggatgagcttaacatcaatggctccatgacaggggaggaacaaccaacgacctcaggggtggagaatgggcaccaggagccatttgtcattggtgttgccgggggtgcatcttcaggcaaaagtactgtatgcaaaatgataatcgatcagctacgtgatcagcgtgtagttgttgttactcaggagtctttttattatgggttgtctgatgaggaattggtccatgttcatgattataactttgatcatccagatgcatttgatacggagttactactctcttgtatggagaacttgaaacatggcaaggctgtggacattcctaattacaacttcaaaacatataagagtgttgcaagtgcaagaaaggtcaatccttcagatgtaattattttggaaggaattctggttttccatgattcacgtgtccgggatttgatgaacatgaagatctttgttgacacagatgctgatgtgcgattaacaaggaggattcgacgtgacaccattgagaagggtagagatatcaaaactgtgctagatcagtactcaaagtttgttaagcctgcttttgaagacttcatcctcccaaccaagaagtatgctgatattatcatcccacgaggtggcgataatgatgttgcaattgacttaatagttcagcatattcgtactaagcttggtcaacatgatctctgtaaagtacaccccaatttgtatgtcattcagactacttatcagatacgaggtatgcacacaataatacgggatgctgtcacaacaacacatgatttcatattctatgctgatcggttgattcgattggttgatgagcatggtcttggtcatcttccattcaaggaaaagcaggtcataactccaactggatcggtttacactggggtagagttctccaaaagattgtgtggtatctcagtgattagaagtggtgagagtatggagaatgcattgcgggcatgctgcaaaggtataaaaattgggaagattcttattcacagggaaggagacaatggcaaacagctaatctatcacaatttaccgaaagatattgcaaacaggcatgtgctgttgttggatcccatactgggaacaggaaattcagctgttcaagctatatctctactcttgaaaaagggtgtacaggaaacaaatattatttttctgaatcttatatcagctccccaaggagtgcatgtggtcagcaagagatttccaagagtgaagatcgtgacatcagaaatcgagtttggtctgaatgatgatttccgcgtcatccctgggatgggtgagtttggggataggtactttgggacagatgattatcagtcatcaacaccattcttttgtgatgagaaaaatcgtgtcaggcttttgtgagcatttaaatagacaaagtcctggcggcggcggcggcatcatctccatttttgagaaacttaaattttacatttggaaattcagatgcccatattgatgtattcattaccagaaactgtgtatcggttgaacattacaggccgatcttgcctaatgacataaacggagcaaattcctttatgttttttcttatgtcttctccagctttttagtcaggaagatgctgtgatctcatttcattccctatctctccctgtgaattgtgggtgtgtttagttcgcgaaaagaaaatttttgagtgtcacatcggatgttggaaggggttttcggacatgaatgaaaaaactaatttcataactcgtctggaaaccacgagacttatttatgaagcctaattaatctgtcattatatatgtggggttactgt

SEQ ID NO: 80803 - DNA, 1152 bp, Oryza sativa
  Clone ID: PAT_MRT4530_80392C.1
atggcagatgatcctagtctagactttggtgaatttcctcagccattctgcagccagcaagttgtttcatttcagccaagcgtgacaactagtgggtcaggaggcatgccagtgtacctggactgttccagtgggatggacagcaacacggtgatgttgagcaccacaccttctgtggttgtctccaccacttcgtccaatacggttgctgatcccgggcagaacctcaaatatggagggcccctggcagctgattggtcacgtcttgagctcgatgtgctgaaagatggcctccagaaatatggaaatgaacaaggcatcatgaagtatataaagatagcagcttcattaccaagcaagactgtgagagatgtcgcaatgaagtgtcagtggctagggaaaagagaaaattcaaggcggcggaagtctgaagaccatcacactggaagaaagatgaaagaaagaaaggctaaaatggccgagccttccttatggggtaccaatcatccagttcagacggacacaagagttccttcgtttgtgtcacataatgccattcaaaacaaccaaattctaactggagccactgaaatagatcgtgcaatgcagcaattactagtacaaaatgatcgacttcttgatcagattgaagcaaatatgctagcatgtcagccgcaaaacaatattgaactcttccatcggacaagaaggaacatcaatggtcttctgcaaaccatgaaccaaatgcctgggataatgagtaagatgcctccgttgcccgtctcggtgaatgaaaatcttgctagcttcgtacttcctggtcttacagtgccacaatttctcggaggcagccaattgaaggaggaaccaagaggatgtttctcagtatagaacaggttgcacatgaagcaaacgtttaaactccatcacaaacttagtgaaatatttgggaattactgctgtcagatggtgatgactgatgagtagaactaccagggatcctgctttctctatcagaaggcgaaggggaggtaactgtaaccaatctgctgctcggcctccactgacatgggttgaacgtacgccccagctggccagcgacaagcctgtagaactggtggctgaacagtaatatttcaggaaacttcagtt

SEQ ID NO: 80804 - DNA, 1583 bp, Oryza sativa
  Clone ID: PAT_MRT4530_80393C.1
gtaaaaatctaatcgatttgcttatgccaatatacaccaacaacaaatggaatgcacgttagctctctctctctctctcagtccaacccaactcgactcaaggcaagtccatacgccatatccttcttcatctctggtgatccaaaaattgaaaaaaaaacatggaggtcatcatcacctgtaatctaatagaccatgtcgtcgcggacaacgctggcgaggggagggtgggcgtaggggcccctgatccaggtgttggcgatgaagcggtagggcgcctcggtgaggtggatgccgtcccagctgacgtgagcgtcgggatcctcgcacgtcgtcgcgccggggagcccgcacgacgcgctcatgttgtagttgtacggcccaccgccgccgcagcacgccctcagcgcgcccctgtgttggtaggtgaactcacagacaccgttgctctggccgctgacaccggcgtatctactctgctctgcctctaactcgccgacgacaatgatgagttcaggaccatctcccctcccaagggttgatacccgacacggtctgtgtgggagtgtgggtgagatgatgggtacggttttgtgagatgtaaccgtcaggttagtgtcagtggctggccgcccgtagaggtgaggggtgcgggcaaactggatgtagggggtgtagtagtcggcatagacgatgcgggagtcggggtggcggcgctggagctggtcgagggcgatgcggagcatggcgttgtggtagagcgcgacgctgttgtacttcttgaggcagccggtgcgggggtcgtactcgctgcggtcctcggtggcgtacatggtgagcgtgatcgggatgcagccggcggggaggttccccggcacgacgacgtggcgcgcgccctcgtcgagcagccgctcgatgccccccgccatggaggccaccacgctgggcaccatcgtcttcaccttctccaggctccactccgccttccacgcgaagctgtagtcgttgcctccgaactcgccgaacacgaacagcgccttggagaagaactccctgcactcttgaggggaggagcagatggtttgcttgacctcgtcgaaccactggagctggacgttcatggaggtgttgaaaggagggatgctccagacattgttgtccttgaagtatttgaggtcgagggcggtggcgcccatgacggcgaagttggcgccctggctgaagttggtgcccttgttcgccgacggcggcagcagcggcagcccgaacgcctcagcgaggaagtcgatgacgaggcggccgttggagcagcgggcgtacggcggagggaacttgggcatgttggggagcttgccggagttgatgatgacgaagttgcccgtgtcggagaaggagtcgccgaagctgaatatcgcgttgtagtacgacggcagcggatccgccatggccaccgtcgccgccgccgccagccacaccaaccccagcaccgccaccctcctcatctccatggtcgctcacaaagttggcaaccacaaaccacaagtgtgaaacaaagaggaggaagaagaagaagaagcaagccg

SEQ ID NO: 80805 - DNA, 434 bp, Oryza sativa
  Clone ID: PAT_MRT4530_80394C.1
agaacagctctctcttcctccttttttttttctctctaaaaggcattcaaaggcttggacatgaatttacttgggactgtttattaaggacgatatatccttacttattttccacctttaaaggggacgtagggaaatcaacagttccagagggagggtttaaaagtagataaagaggagcccctgtaggatgggtagtatatatgggcgggtctgtacggggcgtgcttaattttcccggaggagagatcggaaaaggtttttaaggaaaaaataccgatgatctttaggtcacatgatggcccaggcgtaggaggggtcctcctcgaaaacaatcctgtaccccccgaaagggtagggctgctgcggcggataccaggggatgtactgcggcgggggaggccccggccccggccccggttccggccccttcc

SEQ ID NO: 80806 - DNA, 264 bp, Oryza sativa
  Clone ID: PAT_MRT4530_80395C.1
atggcgggactcgtcgtcggcgcctgcagcatggctgttggtgattttgcgtccatctacacacagctgaacatcgagctggccgagcaagcagcaccgtggcccgattggccggcaagcagcgacatgactggggagcatcatggtgttcaatcgaggaaaaatggcagcgaggctgccatatcaataattaaaataggccatgtccaatcaggagaaaaacaagaagagaaattaacaaataaacgtggacattatagctga

SEQ ID NO: 80807 - DNA, 117 bp, Oryza sativa
  Clone ID: PAT_MRT4530_80396C.1
atggacccagtgtttaacaggtttggtctggacaagctagggcccatgtcatgtgcgcctgtaccaggcatggacattgtttggactgggctcatctcatatgggacaactgtttga

SEQ ID NO: 80808 - DNA, 186 bp, Oryza sativa
  Clone ID: PAT_MRT4530_80397C.1
ccttccctctccttctcctgcacatgcaccggccagcgtgtgggagtcggaccttgcccgagcgatgtccaagatggcggcggagaaggtgctgtctgtgccggccactgtctacggtgggatgcagtcctccggtgacctgcaggctttgatggcggctgcggctcgtgtgcggtccgtctagac

SEQ ID NO: 80809 - DNA, 2281 bp, Oryza sativa
  Clone ID: PAT_MRT4530_80398C.1
gcacgaggcccccctcctttttttttttttttttttttttttttttttgggtgaaaaatctaatgatggttaatttcacatgactaaactcacaagggatacaagtttggtacatgagaaaacatatttttactgagcagcaatcctgtcccagtgactgaagccacattttaggactggaagcttggaaagaatatcaactccaaatctgaactagagagcgccaacaaaatcagctcgatcaaaacccctcttacaagaagatactggaagaaacatcatttgctactggtgacaatacatagttgcatcgtacaatcatttgataagccaattctgttcatttaagtacagtcctacacagatgaggaaagggttcatatgatgcttctgccgttcactttggtgctaatgagcgagcactgatggaagagtggtatgtactgctcctctgtttgcgatatgaagagtagacatcatcatactggccgatctcatttggatcggcagacgctccaaggcccaatcggccagttgaccccggtttactatcaaccgaaccatctgcacgcatccctgtctcaaggtttacaagcaagttgggtgggggaggaatacatgcaccacccttgcgagcaggaatgtccctctcatagttatcgtaatcatcgggctcgctttgcttcattggcccttctgatgggtttacctctccaatctccttaaagaacttcgatacacgctcaaggatctcggactccggaatagtggatggtggaatgattgtggggatgtcaagtggactcaggggagagtatggcactccactcccgatctgcatctttcgcaccattcctggaatcagaccaggggggaatagtggataaggaggtggatttggatcatttgtgatagctggtgtagcagcagtttgaggcagcacagtgggggtttgcactggcaaagatcctggaaaagcagtttgacctacaggagggtaaacaccagctggaagttgatttaatggaaattgtgcagaaggcacaggttggggtggaacagaaagaggatgggttgccatttcctcttgtggatctgaggaccattttgagggctgatgcactgatcctgaaaatgttgagggatccggtgagacatgccgtggtggcaaaggatatgctaccccacctttcatgtctctttcaaggttagcaatggtttcctggtcataaacttcctttgaaccccagaactgcaggattttctcgaggcgaatctggttatcatctttgctctgtggattgttatatatccttgcaagcattgatcccagcacaaatttaaaagccaaagcctcattgtcaaggtcccgagaattagttcgtctttgtaagctttcgaaaagaatatcgttaaccaggaagataatgtggagctgcctctccgaatcctctaaagcaaacactctatccttcagagcttcagccaaagccggcgcgaacggcgacctttgcatgaaccatgtcttggcacccttgatcgactccttggtgccattgagattggtaagcacgtcgtgcagctcagctgcgacatccaccggaagcggcccggagaggcccttgaaggattgctgcggcgcggcatcatactccccatggccgtgagcaccgaaatgctggtgctggtcgtagaacggtgggtaacccggctggtgcatcggcggcccacgcatcatcggacccagcggcggcggcatcatgtgcatcgacccgggagggtacggcgccaccggcggccgcggcgagacccagagcttgtacctgtagtaggcgtggccctcgccgccgaagatgaaggcgtagtccgggttgtcgtgctgcttgtcgcggatcacgacctcgaactcgggcccgttcttcgcgatgtactcgacgaccttgtcgatgcgcttctggagctccgggtcggaggggggcggggccgcggcggggggtggcgcggagtcgaacggcggcgggtgcatgtaggcggggtggggcggcggcggggagggcgacggcatggcgtgcgcggcgaagtggggaggctgctggtgcggcgggaggtgcgagtagagctgctgggcctgcgggggcggcatgccgcgcgcgtagggcgcgtactgagggagcggcgcggcgtagggcggcgggtggtgcgggtactgcggcggcggcggcggcgcctgagggtggaagccgtactgcggttgctgctgctgcgcctgcgcgtacgccat

SEQ ID NO: 80810 - DNA, 465 bp, Oryza sativa
  Clone ID: PAT_MRT4530_80399C.1
atggcctctataatattccagcttgctgcagcctacattattggttctttgatcaagttatcactagctgctgtcctggatattaataggtttggcatggactggttcctcctcgatgtaacccttattgtcctcaacgtaacccatccttcttggcgtggtgatgatgtcctcgggtgtaaacttgagcaatacaaatgtagagcatttagaacaaatctcataatagatctaaagattcaaaattacgtgaaacttacatacaagttacactatagttacatagaaaaattgtctatgtatacgtggtcccatctattttggtgccttggtccgcatctgtccctagtggaagtggagctggtccataagattgaaaaattacacaagaaatttactaaccatgaaatcatcaatgaccagatccttcatttggacattcataagcttccacaatccatttaa

SEQ ID NO: 80811 - DNA, 212 bp, Oryza sativa
  Clone ID: PAT_MRT4530_8039C.1
caaacatttctgttactttgtggcgaactggcaaaatagaactttgtaatgctttggtgaagtagttgaggtgactcaagaatcaagatcagccaaatgtgtcttcttctctaaatttctgaagtacaaagtctttccttgcattttgcatgtctacttacgcgtcttggattgcactgcattgcatgcgaatcatgtttgttactccagtt

SEQ ID NO: 80812 - DNA, 198 bp, Oryza sativa
  Clone ID: PAT_MRT4530_803C.1
atgaccagagctgagggggttgaggcgtttggtgacctcgtcgcttgtgtgggggaggagaagcggcgccgcggctggcggacccactgctggcgacgctcgttcatctggcgcgataactctcccaccaccgagcgctgtccctaccacaagcgcgcgatggaaagggcgacacagcagacgccgccgcccctctga

SEQ ID NO: 80813 - DNA, 571 bp, Oryza sativa
  unsure (1)..(571): unsure at all n locations
  Clone ID: PAT_MRT4530_80400C.1
cgtggccggcctgttcttcggcgacctcaccgcgtacgcgtcgccggcgttccacttcgagctggacttgtgacggcggcgccgccgctgccgcagccgagcagtgtcagcttgtgcctcgccagtagcccaacggccacggcgcaaatacagttacaggccgttaattaaattctttaattgggtggattttgtccataggagaatgacccaanaaaaagagaaggaacagacgtaacagacaaatggaaggcaggcaagaatgcaagatactcttatagcacaagctagtgcttacagagttaatgacagtattatagtgacaagctgaagaccgagaattacttcaagattgattttcttacctngacaatccgaatgagacgagagagagatagtgggtgtgtgacagtgtgaggagaggagattgtttcatttttgcttcatccctgacaaatgaacaactatatagtatcttttttttttttgagaacgactatatagtatctataatctacataaatacttgatagaaggatttgtgagtttctgaacaaaaaaaaaaaaaaaa

SEQ ID NO: 80814 - DNA, 546 bp, Oryza sativa
  Clone ID: PAT_MRT4530_80401C.1
atgtggaccctgtcgtccatatcttcacggccacagagagcaaggcatcgagtcacgacgccgctggccagctgcacgcaccgtcatccctcacccgcgcacgtgactacctgtcggctgctcgccaacgcccccgcccaagccacccgtgccattaaccctctcctcgagcttggcgctagctccgccatcacctacccgagctcgcatgctgctttcatcctttcggtgcgatggatgatgtggcatagagggcagatccggcgcccggctccatcactgtcttggggagtagggatggcaacgggacggggcggggccgggttaggctggaacgccaccgtccccgacccccgacttcaccccccgcccctggccctgactgttgatacggggccaaatcaacccccgtccctgatctctctggggccccgcaacctgaccggggccccacattggatagcatctccatccaatcaggaaaaaaaaacaagacattcatcaaattggcaaaaacaaaaattgcacatacttgacacaccataa

SEQ ID NO: 80815 - DNA, 1035 bp, Oryza sativa
  Clone ID: PAT_MRT4530_80402C.1
atggactctacggcaaaaacacatctcaaggtttctggttcgctgaacaacattcaatttgacttgcctgtggagattgtagaaaaagttaaccattttgcaaatgaagtaactgaaatgaggagagggtttgacaacatattaatggtccaagaactccaaatgcaacagattgcggatttaactcacggtgtttcacgatatccacgcaagaaagagatctccattgaccccgctaactccatcgcaaaacgagtacatggactggatggtaggcctatcatagcaaacaaaaagtttgattatgatagaaggacatttgtggaaaataagaaagatttcgattccgaggcaacatttccagagcaatgtactgtaatagacatacaatctttggatcgtgagaacaccatcgtgcacattgacgatgttgtgcttacaggagcaaatttggagtgtctgaccaaactatattgttacgacgatgataaaaaatccattagcccagagaccattgatgcttttgttgaacactacaggcatacaaaatctgttgtggatggaaatgcgtacatagagagggcgtcagtcgtgtctatgcttatgttatcagctttctatgatggggtggatatcaatagatataaaaatatgatgcacgaatcagctggccatagatatttacgccatgatatggtcttccttccaatatgtacttcattaaagcaactgttgcaaggagtagaaaaatgcatcaagcttgccatggattctgatgttcattatcctacgtggactgatttcaatgtcacaaattgggatataagcatacgatacttggccaggaagaaggataggacctcaagtggactattcataataaagttcatcgagtactggaatggggtgtgtctgactaaaactttttttcaggaagacatcgatgaatacagaagaaagatagcagcgattctttacaactctccatccaacaaaattcagaatcatgtacaggccatctccgaagaaatctaa

SEQ ID NO: 80816 - DNA, 749 bp, Oryza sativa
  unsure (1)..(749): unsure at all n locations
  Clone ID: PAT_MRT4530_80403C.1
tgggttaccngancccccnngcgnttttttttttnttttttttganaananccanggngaaaaatttttttcnaannncccgccnanacnaagggccnntttttncnctnncttnnancccccntttttttttaancnnggccanaagggtnncanaaatttttnccngggnaaagnncnccggntaaaacaaaggnggggggnnanccnnnntncaangaccctnntcngggncgggnggtcgtcntacgggggtnaaannttttacatcnaggggttnggaggtgtttgtgtgggggcaattnggcatcnaggtttaaatactggggcccnnaantntttnngncagngggggtaaaanggnngcnaanggnttntncatagggtcatgtntncgatcnnannactagcnnnngggccctgggggtttgtnnntgtacatcngtgcctccgatgnggcanagngnngtncggnggtgnttcancntnnncnatnnggtgtntttntgntngggncccngagntnnngnntttttntnngnnnncntgnggnttcccntnngttnnntntntgattgacnttnttnngcttgtnggnntntnngncctnntgtnnngnggnnnnnctggntgtggnttnnctttgntcccnccttgtggannntnctggtngnttgngnnntcgngtgagnngnntngttnggttcgttgnatnngntnttnnnngtngnttagctantnagtgngtt

SEQ ID NO: 80817 - DNA, 1004 bp, Oryza sativa
  Clone ID: PAT_MRT4530_80404C.1
gggcacttggtgctcaaggttctactactatgacatcgagcttcgtcgacaatagagtcaacaccggccccatccaaggaatccctgcttcaacaatgctggtgtggactcaagtcgatgaaatcgtcttcccggtttacaccacggtgccaatctcggctggtccatcaataaccggaaatgagaacgccgtggctataaacccggacggtcccatgtcgaaggatcctcctgccagggcggagaacgaaacatcaacgtcatacgagcccgagaagattcctagcacagccgagccttgtccttccgacaaggactgcgagccgacgaggacaacttccgaggtcaccaagtcctggttggatgggcaattgcaaatggtcgttattactcagcgacctgtgtcctcagctctccggccactgccgccgccgccgccctcggcttcggccaccgccttcgattcgctccacagctgcaagcctgcagctgctgcccatgctccctataactttgctctttgctgctctttgccacacaaaggagttgttgaggacactatgggtgatgctgtcgaggacaagatgtaccaagttgtaaaggaagatgaaccaaaggaattacttagagactccaaggttaatttgatggcaaatgttgttgaagacaccatgaaagagaaagagattaatgaagatgaccatatgggttggtactccttagctttagttgttgaggacaccatggatcagcaagtgggagcagacatcatggaccagcaggttgtagaagactccttggtaacatacaccatggaagagagtgatgaagatgaatacttgaaggcagaatatgaaaagggtgcattaatcttcgctagagatgaggcaaatgccttggaaagaaaagaagctgaagctcgttatgaaaaatcacttgaagagattagagatgaatttttgaaaatttatgtccctttgtattttactctaagaaaaaagtaa

SEQ ID NO: 80818 - DNA, 1271 bp, Oryza sativa
  Clone ID: PAT_MRT4530_80405C.1
ccttcatacagtggttggttgtatttgtcaagcaaagcatagaacttggccgcatcagtgtttggctcctcttcaggtccctgatcagtagattcatgtgtcgcttcgtctccaccaggggtgttgcactgaggaaataaatcttccatcaggtcttgcattccattatatccttccccattaaattcctgtgaatcatactcatcaacttctatgtcattctcttgttctgtagtagaactttctagggtttgattgaagaagcactcggacgggaaccaccggatcagtagcgcgatgaggctgcgcggcacggtgccgcgccttgaaatacacatagcagtgtaccggaaagggacataaattttcaaaaattcatctctaatctcttgaagtgatttttcataacgagcttcagcttcttttctttccaaggcatttgcctcatctctagcgaagattaatgcacccttttcatattctgccttcaagtattcatcttcatcactctcttccatggtgtctgttaccaaggagtcttctacaacctgctggtccatgatgtctgctcccacttgctgatccatggtgtcctcaacaactgaagctaaggagtaccaacccatatggtcatcttcattaatctctttctctttcatggtgtcttcaacaacgtttgccataaaattaaccttggagtctttaagtaattcctttggttcatcttcctttacaacttggtacatcttgtcctcgacagcatcacccatagtgtcctcaacaactgaaacaaaggagtagctatggtctttggacccaactgaatccaaggagaagctatggtcttcagaccctgttgtgactattttcgtcgattgatgagtcccaagtgaactggaacaaataacagagtggctgggcagatcaggtggagagatgtactcatggaggagcttggcatcaagatgttcagtgggaaaagaggggatttaggaattggaagggagcagcggattggaggggatctgatagacttttcctatgccaatgatggggattcttcctcccgctgtgccgctacctcctttgtgtggcaaagagcagcaaagagcaaagttatagggagcacgggcagcagctgcaggcttgcagctgtggagcgaatcgaaggcggtggccgaagccgagggcagcggcggcggcagtggctgaagccgagggcggcggcggcggcaatggccggagagctgaggacacaggtcgctgagtaa

SEQ ID NO: 80819 - DNA, 408 bp, Oryza sativa
  Clone ID: PAT_MRT4530_80406C.1
atggcctcatatgcagatttagaaaattttcaatttgctcaaatttcatccaaaccatggcgcggaaaaacgttaccgcgccctagcaataagcgcggttatggaacaggtataccatcaaataacttcgagaaacgtcggttggtggcattttgcaacggcaaaattcgatatccggagattgcttgtcagcttgaaggcgaagatcatctgcctatgctgctcagaatgtggacattcacctatacagaggagaatgaccattggcttggtcagcacttcctaaaggcactcactcttgcttatcttgcttcgtacaggcttggtcaccacttcctaaaggttttgttgtcaaaagacaactgcgtcacgtcgaaagacgtggttcactcggaatttatcaaataa

SEQ ID NO: 80820 - DNA, 1239 bp, Oryza sativa
  Clone ID: PAT_MRT4530_80407C.1
atgaccgccgcgccggggagcctcccgctggtgaactcgaggcccgtctccctctccttggcggcgagcaggtcgtccttctccagcctgctcagtggcggcgccggctcgtcgttgaacctcatgacgccgccgtcttctctcccgccgtcgtcgccgtcgtcctacttcggcggcgtctcgtcctccgggtttctcgactcgccgatcctcctcacgcccagtttattcccatcgccgacgacgacgggcgcattgttcagctggattacgacggcgacggcgacggcggcgatagcgccggagagccaggtgcaaggaggggtcaaggacgagcagcaacagtactcggacttcacgttcctgccgacggcgtccacggcgccggcgacgacgatggccggagccaccgcgacgacgtccaactccttcatgcaggactccatgctaatggctccattgggaggggacccgtacaatggcgagcagcagcagccatggagctaccaagaaccgaccatggacgctgacactaggccagcggaattcacctcgtcggcggcggcgggtgacgtggccgggaacggcagctacagccaggtggcggcgccggcggcggccggcggcttccgtcagcagagccggcggttcgtcggacgacggctacaactggcgcaagtacgggcagaagcagatgaaggggaagcgagaacccgcgcagctactacaagtgcaccttccctggctgcccgaccaagaagaaggtggagcagttcgccggacggccaggtcaccgagatcgtctacaagggcgcgcacagccaccccaaagccgccgcagaacggccgcggccgcggcggctccggctacgcgctgcatggcggcgccgccagcgacgcatactcctccgccgacgcgctctccggcacgccggtggcgacgcccgagaactcgtcggcgtcgttcggggacgacgaggcggtcaacggcgtcagctcgtcgctgcgggtcgcctctagcgtcggcggcggcgaggatctcgacgacgacgagcctgattccaagaggtggaggagagacggcggcgacggcgagggcgtctcgctggtggccggcaaccggacggtgcgtgagccgagggtggttgtgcagacgatgagcgacatcgacatcctcgacgacggctaccggtggcgcaagtacgggcagaaggtggtcaagggcaacccaaacccaag

SEQ ID NO: 80821 - DNA, 439 bp, Oryza sativa
  Clone ID: PAT_MRT4530_80408C.1
aagatgacaaaaatatgcacataaactgcatatgaaaaccatgagggcactttatacaagccggacaaaagctaaaagaagtttacgatgcctaaaggctgaggcacacggaatctgaaaaccccgcagctagttaaaaacaacatacacagcctacatgagacataacttacttggggagataagagggcaactaccacctaggccacattatacgcaaaggtacctttttttcagcccacatgaacccggggtctaggaaatattcgaccttgtccttgcgctctgagatatggtcgaactttaaatctctctgtccaagaggagcttgaattgaagggcgtcgtgcgcggcgaagaatggcgcgaacaccagtgactcgacggccatgagcttgatgaggatgttcagggacgggccccacctgtactagagcggg

SEQ ID NO: 80822 - DNA, 1977 bp, Oryza sativa
  Clone ID: PAT_MRT4530_80409C.1
atgcctagctgctgctgcctcctcggcctcggcttcccctcgccgccctccgccctccgcatcctgcgccgccgcatggcctctcgcgccttccagctccgcctcaacccgctcaccggcgactccgaatggctcgtcgttgaggaggaggaggaggaggaccaccacccgacaccgccacccaagcagcttctcgccaccacctcctacctcgacatgctcaacgactccgcccggaaccgcgcataccgccgcgccatcgaagccgccgtcaccgacccttcctcgcgcgtcctcgacattgggtcagctaacccaacccaattcaaatacctcctcaattttgcaaaaggtggaatggatgcttatgtctttaatgatttcagagctgggactgggttgctatccatgatggccgcccgagctttggcagctgttgggggtgaaactagaggaggaagtgtttcagcatgtgaatcttacctcccaatgggaaaattgatgcgaagggtactgagagccaatgggatggaaaacagggtcaaagtctttcacaagcgttcggatgagctcaaagtcagagatgacctggattcaccagctgatatattggtaagtgaaattcttgattctgagctgttgggcgagggtctgatacctactttacagcaagcatatgacatgttattggcaaaaaatccaaagatagttccttatcgagccactacatatgggcagctagttgaaagtacattcttgtggaagctacatgatttgcacaacaatgaagcaaatgctgcagacggtgtatggcttactcctggtgagatggagaggattgtgtctgtgaagccacaacaacatgcaatgcaatgtgatgcactagaagatgagatacgattggtatggactttagttttgcaaaatctggtagaaaagtgggtacttcaattggattctgctgggtcaatcttctactcaactgctcctagatgggcgagacaatcaagtagtgaggggccgcaacgcgacatgaaggattggtgtgatcactggaagcagtgtgtatggttcatgcaaggcaaggggatccctgctacggaagaccaagttctttcgttacgagctagacataaccaaaccagcatctcctatcagctgaacatcaatgatgaagcatgtgatagaagttccaaaggtgaccatctaacgttgttgccagaacggattgcactttatggtgataaagattggagatcagctctgataaataccattaaaaatgctttaactgtgaaatcttccccaacttgtgttgtggctgacgacagcatgttcttggctctcttaatttcctccatgtcacccacttcaaaagtcatcgcgatgtaccctggtctacgggacaagggtgcagcctatcttcgatctgttgcagatgcaaataatttttccatagaccagattcaagtgattggtaaaagagcctcatctattacagctgatgacctgaaacataaaaaggttaatttattagtgggggagccattttatcttggaagtgaaggaatgcttccgtggcaaaatctacgtttctggttcgacttatggaggagccgtagcagccttaaagatgtagagggttttgatcactcagttgtcaatgagactttaggagcctgtggttgcctgcctggagaccagcaaggtccttgtctgccgtattatgtatggcaatgtggttataccaagaaattaagtaaagtgtactctctgatggatttcaacttttctgagccaatccactcctgttttgggaaaacaaagatcgagttttctcatgatggaacatgccatggttttgcggtttggattgattgggttcttgatgagagaaaatccgttgtgttaacaaccggaccagctcagataaccgatactggaaacaaggagtacagctctttagcaagcctgtag

SEQ ID NO: 80823 - DNA, 2646 bp, Oryza sativa
  Clone ID: PAT_MRT4530_8040C.1
tcgttcgggcgaaacgccaaacgaaacgaggcgctgccctgccaccttcgcctcacgaacgccagcctcgctgtttcccctccctctcgcaccgctcgttcccgtttccacgcttcctctcctccccccggttcagcttcccgttcaggttcaggcaatcacgcctcctctcctctcctctcctctccttcttcactccactccaacgccccacgccctcccccgctttataagggggagctccacatcaccacccttcccacaccatcgcggcagccaccgcatctttcctcctctttccctggagccatttcctcccctaaagggcctttccttttcttgatctctcttctatcttcgatccatccatccatccggccatccttcctaggtgaatttcaacgatgcagttcagcagtgtgtttcccttagagggtaaagcatgcgtgagcccaataaggagaggtggtgagggctcagctagtgatagattgaagatcggggacagtagcagcatcaagcatgatagagcagtgaggaggatgtgtcttggttataggggcaccaaaaacggtgcacaatgtgtgctcacctcagatgctggcccagacactcttcatgtccgaacatcattccggaggaactttgcggatccaaatgaggttgctgctgttatattgggtggtggcaccgggactcaactttttcctctcacaagcacaagggccacgcctgctgttcctattggaggatgctataggcttatcgatatccccatgagcaactgtttcaacagtggcataaacaagatattcataatgactcaattcaactcagcatctcttaatcgtcacattcatcgtacgtaccttggtggtggaatcaactttactgatggatctgttgaggtattagccgctacacaaatgcctggggaggctgctggttggttccagggtacagcagatgcagttagaaaatttatctgggttcttgaggactattacaagcataaagctatagaacacattttaatcttgtcaggagatcagctttatcgtatggactacatggagcttgtgcagaaacatgttgatgacaatgctgacattactttatcatgtgctcctgttggagagagtcgagcatctgactatggactagtgaagttcgacagttcaggccgtgtaattcaattttctgaaaaacccaagggcactgacttggaagcaatgaaagtggataccagctttctcaattttgccatagacgacccgactaaatttccctacattgcttcgatgggagtttatgtcttcaaaagagatgttcttttaaaccttctaaagtcaagatatgcagaactacatgactttgggtctgaaatcctcccaagagctttacatgagcacaatgtacaggcatatgtcttcgctgactactgggaagacattggaacgatcagatcgttctttgatgcaaacatggccctttgcgagcagcctcccaagtttgagttttatgatccaaaaactcccttcttcacttcacctcgatatttgccgccaacaaagtcagataaatgcaggattaaagatgcgataatttcccatggctgtttcttgcgtgaatgtaccatcgagcattcgatagttggagtccgctcacgccttaactctgcatgtgagctcaagaataccatgatgatgggtgcggatttgtacgaaactgaagatgaaatttcaagactactgtcagaaggcaaggtccccattggtgtaggggaaaacacaaagataaacaactgcatcatcgacatgaacgcgagggttggaaggaacgtggtcatcacaaacagcgagggtgtccaagaaagtgatcggcctgaggaagggtactacataaggtcgggaatcgtggtgatcctgaagaacgcgaccatcaaggacgggaaggtcatataggagagctcgctgatgccacagatctctgaaccctgaacctgcaaatgcagtgcagtgcgtcttttcttgaggggttaggacatgcaagctcgttgattccacatggcagagaactcgagggaagatcccaggaagacggatgatcgagaaagattgtgtagtactagcagttcttcgctcgttaaaatgtgtgtactaaataactaataagctgccccgagtgaagtagcagcagcaactttttggagggtcgttggtgcatctcatgtgtaaataaactcaaaactggtaaaaaaatgtatccatcatgccattatctccaaaaaaaaaaaaaaaaaaaaaaaaaaaaaaaaaaaaaaaaaaaaagcggccaaaaaaaagctctccatgttcttcaagaagggcattgagcagaaccgtggagaataatctatgttaaaattataatttgtatgtttacatgtgtatgcttgttttcgattcatggatgtctgcctacctacctgttgatgtgttgttactttgcacgtccgcgtcccactgcagcaactgtcgtcgtggcatgagcgaaaacttggtctcgataccacgccatctccttcattcgctcacatttagctgcgtatgtttgtctgtaacaaagaaatactcgggtgaaatttatctttaccagtatttagcc

SEQ ID NO: 80824 - DNA, 795 bp, Oryza sativa
  Clone ID: PAT_MRT4530_80410C.1
atggatccaaatggttccttccccaagaatgatggatctagcagaaaggaagcctacctttcccccctgcatgaagctctaagaggcaccacagccgtacaagggttaggtgagtatgttggccataactcttctactaccccgcccatcatctctggaccacaagaaacaactatcttgccaagccataactactcttcgtacaatccaaatacggcactagcacctccaccatttcagcttccccaccaacagaacttcctgacaacccctatggggacctactttgactcatctgagcaagcacacatcatgtctactgaatccccaccagtcacctccttgctccagggagatcctttcgctgttgttcatgcacatcttaacactactggagtcttggataatggtccaatctttgagaattctgctacaagcttgcttgtccctgaggtaaactccatgccatctgtctatccttttccacttcaaaacattcagcccttcatatctggcaccataagtcaacagcaacgcttgcaatctggatcatcatcccatgttgaatcttttggcccaccatatgtcccaagggaacaacctgaaccaataggtggtacaaaaagtgtgcaagttccagctggtcgctctggggtcgttaatgaaagggtttacacatgcaggcactgtcctaatgccacatttagtacaccacaagcatatggtggtcacatgagtgcccatagcaaaaaggacaagaaaaacatgtcctcaggtccatcttccagaggctga

SEQ ID NO: 80825 - DNA, 467 bp, Oryza sativa
  Clone ID: PAT_MRT4530_80411C.1
caataaaaaaaataataaggtttaggaacaaaaacattttttttaaaagaacagccagggattttttttttaacagggggggggggggggggcactagtagtagggggagggctaaagaaagccctttatttttttaaccagggacaaaaacaacatatttttaaaaaaaacctaaccggaccggacttttcaatttaaacaaaaaaaagattggggatccaaaaaccaattcagtaaaaaaaaaaaaaaaacaatattggttaaaaaaccctctcctcccccgggggggggtggacaatcccccggggcatggggggaacgttttaaaactcctttttttcctaaataaaccccccaactatcgggggtaaaaaaaaccgaacaaaaaataactttatatacttaaccatggggacgggaaacccggccgggaaaaactgtaaaaaatgggggattttacgttccc

SEQ ID NO: 80826 - DNA, 712 bp, Oryza sativa
  unsure (1)..(712): unsure at all n locations
  Clone ID: PAT_MRT4530_80412C.1
tctagatcgcgagcggccaccaccaccaccaccggcagcgccatgacagcctgaacttgtgtttaagtaagccccaaagcgtagcaaagtattgcaggaccaacgaaaaggtgaggctgtgctttgatttgatcttcttttttgtgtgcatgaccacctactatacctctctttgattctgcaactctgaatctgaaacgcattgtgttctgacattgcaggtttctttttttttttttctctttggcctctggggctctttcatgattccaaaagtgcaatgttgcatcactggagtgaactgattgtttgctttgctgaattgtattattggaagagttaaaatcttccttagttactaccaacatcccaccaaagaaagagctatctagtctgttctacacgttaagtacccactattacgtcacttcgaaaccacatgggactaaactacactattactgcagtctatataggtttcaaatggagtgcggtgttacacttccaatcctctatggccacgtagccttgcggccagggttaccgatttcgaggtaaaaaccggttnctgttggccgcaaggcttcacaaaaccggacccctactggtttcaagaaccaaaaaanggaatggactccgnactatctctagttctttaccacatgtcatgggaggaataacttaatggaacaaccgcactgnctggtgctgg

SEQ ID NO: 80827 - DNA, 2601 bp, Oryza sativa
  Clone ID: PAT_MRT4530_80413C.1
atgggagtccgcggcggtggaagcgcgctgggacgggctggggcctccagctccaagcgcacgaagcaaggaggacggggtggggccaagcgcacgaagcaaggagggaggcagagagcgaccgagcccggggacgcacaccaggtgttcgacagattgctcaagcgaggcgaccgtgcctccatcttcgacctcaaccgcgccctctccgacgtcgcgcgtgccagccccgccgtcgccatctccctcttcaaccgcatgcccagagccggcgccaccagtgcggctcccaatatcgccacctacggcatcgtcattggctgctgccgccgcctcggccgcttggacctcgctttcgccaccgtcggccgtgtcatcacgacggggttgaggatgagcccaatcctcttcagtcctcttctcaagggcctctgtgaccgcaggaggacgagcgatgcgatggacattgtgctgcgacgaatgcccgagctaggttgcaagccagatctcttctcctacaccattcttctcaagggtctctgtgatgacaagacaagtcaacaagctctcgacttgctccatatcatggctgatcataaagggcgctgcccactcgatgtggtggcgtataccactgtcatcaatggcttgcttagggagggtcagctggacaaagcttattccctgtttgatgcaatgctggatcgagggccatcaccagatgttgtgacttacagctcgattatcagtgccctatccaagactcaagcaatggacaaggccacacaagtctttactaggatggttaagaacggtgttatgcctgattgcatcatgtatactagtcttgtgcatggatattgctcttcaggaaagcccaaagaggccattgggattttcaaaaagatgtgcagacatggtgttgaacccgatgtcgttacttatactgcgctgatggactatctatgcaagaatgggaaaagcacagaagctagaaagatttttgattctttggtcaagaggggacacaagcctgatagcactacctatggtactctgcttcatggctatgctactgaaggagctcttgttgagatgcatgatcttttggatttgatgatgaagaaaggtatgcaacttggtcatcatatctttaacatgataatgggcgcatatgctaaacataacaaggtagatgaggccttgcttgtatttagcaatatgaggcagcaaggattgaaccctgatatagtcaactatggaacagtattagacatactttgtacagcaggcagagtggatgatgctttgtctcaattcaacagcctcaaatctgaaggacttgctcctaacattgttgtttttaccaccctaattcatggcctgtgtacctgtgacaaatgggacaaggttgaggagctagctttcgaaatgatcgatcgcggcatctgtcttgacacaattttcttcaatgcaataatgggcaacctatgcaaaaaaggaagggttatagaagccaaaaacttgtttgacttgatggtgcgcataggtattgaacctaatactaatacatacaatacactcattgatggatattgcttagatggtaagatggatgaagcaatgaaactacttggagttatggtgttcaatggggtaaaacctagtgacgttacctataataccattattaatggttactctcaaaatggtaggatagaggatggacttactcttttgagagagatggatggcaagggtgtgaatcctggcattgttacatatgagatgctgctgcaagggttattccaggctggaagaactgtagctgcaaaagaactctatctcaggatgattaagtgggatacgattgagaatagaaatgatgacgctgaggatttgtttgctgctctctcgaccaatggtttagtgacaaatgttgtgacctactggttaatgatagaaaatgttgtaaaacaagggttgctagaagaattggatgatttatttcttcatatggagaagagtggctgtactaagttacttcacaaagagcagtttgactgccatgccatgcactgcatctgcggttcaaagttcttcattgttcctcttcagcggcgagcggcggagcgagccacggcgataccggcgaaagcgagcacaccgggtggctgcacaggacgaggggagacgagccaacggctcggattcgccggaggttgctcgacggcggcggattgcggcggcggcaaccggcggcaagggaagagggaaacggcgacgaggccacgaggggccgattcccggcggaataattctaaatttgttgccttggtgtcttcatctggatcttctttggatacttctcctatgtcggctctttttgcttttaatgctttgtctgatgatcaacgggaggaacttggaagtgaggtggacccgttcaatgcttttgggtgtggagagttgaagcacatcaagttcaattgtcctaaccgcaagaaggcaataaaggaggaagtggataagaagaacaacaagaaggagaagaaaaagagttgcatgcagaggctaactcgagaactcatagaagcttga

SEQ ID NO: 80828 - DNA, 183 bp, Oryza sativa
  Clone ID: PAT_MRT4530_80414C.1
tctgtccaaacccgttttcatggactatgccatgcagcagatgccgtggactctacagctgcacatagtcccaatcttccggatcattctgtgagagttcaacgtgtttgcatatactagtcttctatggattttatcttcatgaagtggtcatacactctcacccattcaaccctaaatttc

SEQ ID NO: 80829 - DNA, 458 bp, Oryza sativa
  Clone ID: PAT_MRT4530_80415C.1
atgtatttccacattcttcgcaggttccactgcgtaaagaatgcgttcagcctcctttcaaagactggcaaagcgcaaacgagtaaattgtcacaattaagggcttaccaaagattaggtattcgtgcaagcccgtataccgtgaaatggttatcaacggaaataactatgtggttgtcaaagtggcgaactggatgcgaagacatcctggccgatctttcgaaaattacgaccggtgtcatgtccaacgccgcaaaaatgtagctatgttttggcgaaacttcaagatgaccaattgccaagctgctattgcttgacgtcggtatagtttggcgtgcatttcacctccttccccccttagagtaatatataaaataagtagcgatgacgaaccatgttcgtctgaggtaacaggggtaaggcgaaaatgtcctgatccggatattgtaatctatctg

SEQ ID NO: 80830 - DNA, 1926 bp, Oryza sativa
  Clone ID: PAT_MRT4530_80416C.1
atggctacctctggtccggctcgcgggtggctaccggcgcttgcgcgaagaatcgcttcagtcacggggacgcttaaccctcctgccagtcgtgtttctcgatttcctggatctcggaacatggccagcggcagtggagtggaaggcgagggattgggtataccatacaggcgccgcttcatcccatttgccaacgatcctatccacacaaccaaagataatatcatttctatggacaagcaccttcccatcacccaaggcaaggacagtgctgcaactaaggagttcatctcttgttatggccattgccgtcctaccacgtatggcgatgaagatgcttctaggacagctgtggaggtcaccggtggtaaacaagatccaaggggggcagttcagaacctaatagatggtgaagtggcagttcaggagctaatagatggtgaagaaattgcaaggaaccaaagggccagtgaggttagtgacaacgatggatatgaagagttcaatgatcgtgctgttaactaccactgtgactgtcatgtttggacgccacttattgcaagcagccaccgtgacggttctatatacgataccaggggcacctttggatctgggtggaaatgggattatcgtattgcagatcgtaacgagactcggttggaggcaatgatgttatcacatcccacgaaagattgctacatgagggatggaacttgcatatggcatcctgcaaatagcatgttgcaaattttctcagtaaagttggctaaaactcctgtagttgatggctcaattgaattgtatggatacattgctgtgcgggaccttcaggatccattacttaattatatagtcaaaattggcagggatgatcccatcattgtggagcaggtgcaaggttccctcatcgaaatgactggccctaagcgagggatcgacttttcttgtgctgttctagttgaatatgacatgagaatcaagacaggagaacgagaggaagatgatctacaactgattgatggtgcaacagatcttgaccatatattgacatcacatgtaccagtgagaaatcgcatttatggagattgcggcgcagttgacataactcaagcgaatcttttgtatgcatttgaggcgactgtagaagtcgtcatatcagaagtgcagactagttttgatttgtgtctcagctgttttaccagtgggttacatgaggaaattcggctctttgatggtgcgatcagtgagtcacgtgacttgaggagcttggagcaacggagtggtggcgttgacagcggagacggcgacagctgctacagaggatctcgacgcagccggcgtgaaggagggagcagggtgtgcgctcgctggttgagccgcgcaaggggaggacgcacggcgggtgagaggcgcactgtacgagctgcgtctagacttggctgtggtagtgttcccgaccattatgggtctagacttggctatggatacaaaagcacaagctaccgtcatctcggaaatgcatgccaactgtttagagttgagccatggagccatggtgtccatactagcaatcctgatgtcttgtcaataccaatatctaaaatggccagtgtcaaggctgctaacaacatcaccatcgaaccagtggttcagtatgttgataaagagctggacaaggcatccaatagggataaaggggccaaaggaacagaggtttacttaactgcttttcactgtgttcattcgaacaaaatcctgagaccatggattattgctagagctgctaatgagaagcagaacaggaaggtcaagagatgtggttatgattccattgttggttttgatggaaacaatcctattgatgccagtattgcagtaaagatatcagagatggctagaaattctggggctcccacctttgactag

SEQ ID NO: 80831 - DNA, 2623 bp, Oryza sativa
  Clone ID: PAT_MRT4530_80417C.1
gagccgcctgcaaatcccctcgcgctcgattcttcgcctcctccgacgccccatcgtcgcgccttattctgccctgcggcaccgcatctcgactcccctcccgcgatctctcctctcctccatggctacctctgagtccggctcgcgggtggctaccggcgcttgcgcgaagaatcgcttcagtcacggtgacgcttaacccatggctacctctggtccggctcgcgggtggctaccggcgcttgcgcgaagaatcgcttcagtcacggggacgcttaaccctcctgccagtcgtgtttctcgatttcctggatctcggaacatggccagcggcagtggagtggaaggcgagggattgggtataccatacaggcgccgcttcatcccatttgccaacgatcctatccacacaaccaaagataatatcatttctatggacaagcaccttcccatcacccaaggcaaggacagtgctgcaactaaggagttcatctcttgttatggccattgccgtcctaccacgtatggcgatgaagatgcttctaggacagctgtggaggtcaccggtggtaaacaagatccaaggggggcagttcagaacctaatagatggtgaagtggcagttcaggagctaatagatggtgaagaaattgcaaggaaccaaagggccagtgaggttagtgacaacgatggatatgaagagttcaatgatcgtgctgttaactaccactgtgactgtcatgtttggacgccacttattgcaagcagccaccgtgacggttctatatacgataccaggggcacctttggatctgggtggaaatgggattatcgtattgcagatcgtaacgagactcggttggaggcaatgatgttatcacatcccacgaaagattgctacatgagggatggaacttgcatatggcatcctgcaaatggcatgttgcaaattttctcagtaaagttggctaaaactcctgtagttgatggctcaattgaattgtatggatacattgctgtgcgggaccttcaggatccattacttaattatatagtcaaaattggcagggatgatcccatcattgtggagcaggtgcaaggttccctcatcgaaatgactggccctaagcgagggatcgacttttcttgtgctgttctagttgaatatgacatgagaatcaagacaggagaacgagaggaagatgatctacaactgattgatggtgcaacagatcttgaccatatattgacatcacatgtaccagtgagaaatcgcatttatggagattgcggcgcagttgacataactcaagcgaatcttttgtatgcatttgaggcgactgtagaagtcgtcatatcagaagtgcagactagttttgatttgtgtctcagctgttttaccagtgggttacatgaggaaattcggctctttgatggtgcgatcagtgagtcacgtgacttgaggagcttggagcaacggagtggtggcgttgacagcggagacggcgacagctgctacagaggatctcgacgcagccggcgtgaaggagggagcagggtgtgcgctcgctggttgagccgcgcaaggggaggacgcacggcgggtgagaggcgcactgtacgagctgcgtctagacttggctgtggtagtgttcccgaccattatgggtctagacttggctatggatacaaaagcacaagctaccgtcatctcggaaatgcatgccaactgtttagagttgagccatggagccatggtgtccatactagcaatcctgatgtcttgtcaataccaatatctaaaatggccagtgtcaaggctgctaacaacatcaccatcgaaccagtggttcagtatgttgataaagagctggacaaggcatccaatagggataaaggggccaaaggcaacagaggtatggtggtggctgatcatttccaactgtggccatctccttatcagcttaattgtgaatgttctcacactgagcagcaaccatggccaccgcctactcaagcaggagacattggttgtcaagttgcgctgcgacgagtgctagggtcatcatccaaatgcagccaaggtgacttaatgccggtgacaccaccaaggccactgacaataggaaaattgcataactcgaggagccgttctgctggaaacacaactgaagccgtacaatcaattattgagtctcatgcaatatctttacactgtagaatttccaagtcaatgtgcattgcacttaattttgttgagagctggctacaaaacacagccaagaaattatgcaatggccagttgcttaacctttcagttgggatacattttgacgacagaaagatttctactacattgttttttgctgagttgcttgagcacccaataatatattttcaggtttacttaactgcttttcactgtgttcattcgaacaaaatcctgagaccatggattattgctagagctgctaatgagaagcagaacaggaaggtcaagagatgtggttatgattccattgttggttttgatggaaacaatcctattgatgccagtattgcagtaaaggtttccattgatgtgattggtacttggacagattcagagacgctatatgcataa

SEQ ID NO: 80832 - DNA, 269 bp, Oryza sativa
  Clone ID: PAT_MRT4530_80418C.1
gagctgcttgtaaacatccctgaagaaaaaatccgagaagcactcaaagttattcttgacgtaaggaatcaaccggtgctcatccactgcaagagaggcaagcaccggactggctgcgtcgttgggtgcctgagaaagttgcagaaatggtgcctaacttcagttttcgacgagtaccagcattttgcagcggcgaaggcgagaagtactgatcagagattcatggagctgtttgacacatccagcttgatgcacctgacggcctcaca

SEQ ID NO: 80833 - DNA, 3062 bp, Oryza sativa
  Clone ID: PAT_MRT4530_80419C.1
atggcgactccagacgttatattgccaggaccttctttaagacccatgccttatatgagatctgcaccttctgcaagacccgaataccatgagtgtgctacttgccacgggcctgctaagactcgctgctccagatgcaagtctgttagatactgctctggaaagtgtcaaataattcactggaggcaaggtcataagcaaacatgtcagcaatggaatggttttggtactagcagctctggtggactacctcctactgagaatactgaacagatgccattcttaagtaacctgaactcacctcttcgagggagcgatgttcatctgcatgacatggatttcgataccatgtcagagccatcctttgtgacaacagatagctataatcttgataccagcccatttctgtcagaccgaagcaacatgaataaaccaaaccaatttctacatacaagtgaaaatggtgctgccattggatcttatgagaagaacgactatagtattgatggagaagtcccttcttctgagattctgtcaggaaataagggtttaaataacagttctggttcaggtgaaaactgcggaaaccgtgatgtaatttatcctctcaatagtgtggtacatcaacccaataattatgcccctgaaataagaaagcggcccaaagcaagcatcacggtttatgaatctgataaaggcgtgtatttaacttctgatatgatcagttctggtgaggggccatatgcttctgctgcagagtcactacaaagaagtaactcgtctggaaatgttaccggaaaaggaaacatgatacataagaaaccaccatacccatctggatctaccaaaacagctgtttcaacaaacagcagtttgcaaggatgcaatggcatctcaaaagcaggagcatcaaaggttgaagccctgaagaagccttcaaaatttctcaaaaccagtctggtgggtttgatcaatgataacaagaggagtaaggtactgttcccatatgaagatcttgttaagttttttcagtatgaagtacggggcatctcacctagaggtcttttcaattgtggaaatagttgctatgcaaatgctgttctacaatgtctcatgtgcacaaaacccctgatgatctatctgcttctgagactgcattccaaagactgtaataccaaaactcaagcccccaccctccttggtgtagttgtgaaatctctcaccatctctgatttctttgacattgattgctttattcttttaggttgctcaaagaattggtgcctcatgtgtgaacttgagcaatatgcttcaactttgcgtgaaagtggtggccctgtttctccaagtagaatcctttctaatctgaggaatattggatgtcgcttgggtggtggaagtcaagaagatgctcatgaatttttaaggcatcttgtgatgtctatgcaaggggcatgcctggatggacttggtggtgagaagcaggtagaagcaagcttgcaggaaactacactgatacagcagatgtttggtggccgtcttaaatcgaaggttaagtgcctcagatgctaccatgaatctgaaagatacgagaatataatggatcttactttggagattcatggttgggtcgagtccttgcaagatgctttgacacaattcactgctcctgaagatttggatggagaaaatatgtataaatgtggaaggtgttctgcctatgtcaaagctaggaaacaattaagcgtgcatgaggtgccaaatatattaactgtagttcttaaaagattccagacagggaaatatgggaagatcaacaaatgtgttacttttcctgatatgttggacatggttccgtttgtgactggagctggtgataatcctcctctttacttcttgtatgccgtggttgtacacgtggatacagaaaatgcatcattctctggacattacatatcatatgtcaaagatatgcagggcacatggttgagaattgatgattcagaggtccaggctgtttcactgaatcaagttatgtcagaaggtgcatatatgctgttctacatgagatcttttcctcgcccaccgaagatttacattgagaagggcctatcatcagttcctacatgttcaaagcgccattcatcaaaatcctccaagggttctaagcaagacctgaatcatactgagtcactctttgcttccagtgatcaaacctatggaatatacgatttcagaccagacaacggctatatacaagatcagcatgctgctttgagaaccagaaatttctatcataccgatgatgcttttgcagattcaattagcacagacttctcagatgctacatcaagcgaatggtcactgtttaccagctctgatgaatcctcatttacgactgaaagcactagagattcattcagtgttgtggactatggtgacaatgctggccttgatccaatttcctctatatttgggccttattatgctcaagaccatcctcctggcagttttgcctcgtgtacaaggttgtcaccttccaatccacaaacaaggtacttccaagagaacacaggctttgtctcagattcttccatgccggctcacctgcccggcaatgtacatagaggaagatatccagacagggcctgttcttcttcagctgaacctcctgcttcagcaaatccgcgaagcgtatatggtaggtatggccttagtagagaaggttttgttcaaacatctggattttgtcaaatgtaattgtctacatttcatagttttagctggagtttggcagttgtggttaccactgccattaaataccgcctcatgttcttttatttcagatgaggcatatttaattttagctgcatatcctaggttagttgagtgagtgactcaatgtagcaggccagcagggtaattagatttgtctaggtgcctagcatttcaggagatatatgttagaacacagtgacaggctttgtgccatccattgttcaaccaaaagccagtcatatcatttatctagttgcacaaattgtaccaaaaaaaaaaaaaaa

SEQ ID NO: 80834 - DNA, 500 bp, Oryza sativa
  Clone ID: PAT_MRT4530_8041C.1
ggggaatctttaatccttgaatgcgttctggagctccaccgccgtggaggcgctctaaactatggatcccccgggctgcagaattcatcacgagattttacgtctacatgcacaaaggcaaaacacaaaaaaacggcttaacatcagaatgttcaaatgttgcggtgtgtattttattggaaaatctgaattctgtcatgcattcaagtctgaatccttgttaaaaaaaatgcatattaccttcccccttctctcccccccctatccccttcttccctccttaccggtggtctgcttttcttcactcccctcctctttacctcttattgcttcctctttactatatcgctctccctccaatctcttatttctctcccccggggggggggggggcctctgggtaccccctcttcttccccccctcttaatagtatagtctctttccttttttcgctaactccctccccgggggggtcccccctttttttatctctgacact

SEQ ID NO: 80835 - DNA, 269 bp, Oryza sativa
  Clone ID: PAT_MRT4530_80420C.1
aaaaaaaaaaaaaaaaaaaaaaaaaaaaaaaaaaaaaaaaaaaaaaaaaaaaaaaaaaagggcggccgtgggagaaggaaccaccctgacatacgcagacgtggcgcctcttccctcttctatggtgccacctctattcattaaactggccgccgtttaataacgtgcgcagtgggaaaaccatggtggtacccaactaaactgcctcactggaaataccctgttttccagctgctgaattagctaagaggacctcccctttcgccctt

SEQ ID NO: 80836 - DNA, 578 bp, Oryza sativa
  Clone ID: PAT_MRT4530_80421C.1
gcacgagggcctcgtgccgaattcggcacgaggggagaacgcggcggcgtggacgagcacgagcccggatcggaagggcggggacggcgaaggcggtggtggtgacggcggcgaccgcctgatgcgtgcgctgcggctgtcgcagtcgcgggcgcgggaggcggaggagaagctggcggccgccggggcgagcaacggcgagctctcggcgctgctggtgcgggactcggtggtgctgtcggcgcaccgccggtgggtcatgatgctggaggccgagaactccgggctcagaggagcagcaggagccgccggctcggccaaggaaggcgtcggcgaggacgaggacgaggacgacgacggcggcgcccggcgcggggccgctgcgtggtggctcgcgctcgccgtctgcgtcggcattgccggcatcggcctcgccatgggcaagctcctctgaaaactaaccgtttcttcacctttttgttaaggggaaactgcacattggaggatcagatcagacatcatgaaaatccatcgttctacgaaaaaattctgcacaaaaaaaaatgttgctagcatct

SEQ ID NO: 80837 - DNA, 687 bp, Oryza sativa
  Clone ID: PAT_MRT4530_80422C.1
agcttcgggttgccgttgcgtcgtccccttgggccgcagtgccgctgcccgtggtccacacctccactggttattgcagtgctgagagacgccctcctcagcatggctacatcatcggtggacttctcgtcggccattctcgtgccgcgaccgtcttggaggtcttctctgctagtctcctccgacattggcgtatgattcatggtggtcccctgtctcgcccgcgcggtattggcaacaccggcgcgcgcgtttgtcccgagttgtcccggggtctggcaagccctgtgtgacgtctcgtccttcgcggttcgactacatcggctcttcggcatcatcttcctcaacgactgtcgcgattatgtcaccgtcttcgtctccagcgcatcctcgcgcaccttggtccacgacgccctcccgtgcgtccacgaccactctacggcgccccatgcgtggcccgcggctcggcaaactcgacatcagcttcccgacttcggctacatcgaccacggctactctacgcacggcttcatcgaccacggctctctcggctccttcaggctacgtcgacaatggcataaagggctatcatccgtgttgagcactcttgtcggtttcttctccagtccaagtgtccgcgctgctcacgcttggactgcgggggatgttagagtatatggtagttag

SEQ ID NO: 80838 - DNA, 533 bp, Oryza sativa
  Clone ID: PAT_MRT4530_80423C.1
actgtatttctccgacgattcttctataaacgcgccccgaggacattctccaaacataatgggctactgcataggcgcacgcgcgggggcgacacccgcatgccgcttcgtgtggctgggcggaggggcacgcgctcacctcccgctcattgtggggtggacgcggggggtgcggtgcaccgctgccgcgccatgatcttgccccggtggactggcacaagccaatagaagaaagggatccggataaaggagatgagacacttggcgtaccccgacccgaccgtgcatgaagtgaaggaaaagtaggtaaagcaatggaacgaggtcctgaacattaacgcgtggtactacgccctgcaaaacagcacagtggaccaaaaagacaccttgaggtacgccaacatgactacgctatcgttacaaatgaggagaagcactccatatatacaatagtgacatagataaagatgaaacacatgctgatgtccttattggaaaaggaacatgcctagagtgacagagcctagctatgc

SEQ ID NO: 80839 - DNA, 1887 bp, Oryza sativa
  Clone ID: PAT_MRT4530_80424C.1
atggaggaacagaggatgtgctaccgtactgcgctgctgcttgctgctgttattttccttttccgatcagagatcggccggtggtgcagctacctctacaaggctaccgacgtcgccgtccaggccgttggtcccgctacttcgccttctacttcgtccagcatgactcatcgccagcgttgctgtatcttcctcgactacacttcgctcttctccggcaactgcgtgctgctccggcaattctccctctacgccgttctcgcgccgcgaccgtcccggaggccttctctgctggtcttctccgacattggtcttcccgacttcggctacatcgaccacggctattctgcgcacggcttcatcgaccacggctctctcggctccttcgctttggctacgtcgaccatggcacaaagggctatcatccgtgttgagcactcttgccgggttccagccggctgcgacggtggcggcttcggcggcgaggacagttgtggagagggcgtggtgagagggtgcggctgccgcctcgtcctcgccgctcgccggcaccgtctctccatctccccgtcctctcaccgctcgcctgcgccgcctcgtcctctcgatgcttgccggtgccggcgctggcgagcgttctccccgcgcgctcacctcgccggcgaccacggggaggagcttggcggtggaggggacgagctcgagctcgccggcgaggcggcgaccacggggaggaacttggcggcggaggggacgagctcgagcttgccggcggcgtcaggcacaaggggaggggcggagagtggcggcggcgcgtgggacgagcttgagctcgccgacggcgtcgggcgtgggggtagggagaggcggagagcgacggatcggcggcgtcgggcgctgggggtggaggcgcagagcggcggcgttgggcgtggccgcgtgggccgcgtcgcgtggcgccggcgtgtgggggagacggggagctcagccgccaccaccagggaaaggggaagggaagctaggtctcacgggtcggcggcggcagcgcgtgacgcggcggcggtgacggcgggggatgaggagctcggcgcggcttctcccctccatctcggtggcatgcgggcggacggagctcggcgcggcttccctcttccctctcggacggagctcggagcaggatgcgatccgactgcctcgccatcgttgccttctccggcgcgccacgcggagcagcagctggcacgagcggtgccggccctccacggcgggagctcgtcgcgacggctagcggagctgaatgactacgcgacagccctcgtctcctactcgggccacgccattgccacctcctcctcgggcctcccccgcgcggcggatgaggaggatgacgggctccacgcggaccacgcgaggaggtcccgccgcatcgtcggctacgatggcgagtaccaccgccagcacccggtccacggcatctcaaccccgccgcccgcgcgccgtggccatctcctctcgagccccgcccacgccgcgcgcctcgtccgtcgccccggccaaccgccttgccgccactgctgcctcgcctcctccgtcgccgcgctcgcctcctctgccgccgcgctcgcctcctccgccgcacccccgccggcaccacctcacttcgccttgagcagcgcgagctcccgccgccgccgcctcgtctcgcctcctccgccgcagcctcgcctcgcctccaccgccgcagcctcgcctcgcctcgcctcctccgccgcaccccgccgccgctcgccacctccttcgccgctgtgcgcgtgtgagacagagagtgagagaagagagaggaagggtgagagagagaagagagagaggaatagtggaataggagta

SEQ ID NO: 80840 - DNA, 649 bp, Oryza sativa
  unsure (1)..(649): unsure at all n locations
  Clone ID: PAT_MRT4530_80425C.1
ccggccggggttcacggcatctcgagacccggcacgacacgacatcttcacgaagtaacgccacactaacccttcagacacaatggccaagatctcgcgtggtgcccctggtggcaagctcaagatgaccctgggtctccctgtcggtgccgtcatgaactgcgctgacaactccggtgcccgaaacctctacatcatcgccgtcaagggtattggtgctcgcctgaaccgattgcccgctggtggtgtcggtgacatggtcatggccaccgtcaagaagggaaagcccgaactccgaaagaaggtccaccccgccgttaccgtccgacagtccaagccctggaagcgattcgacggtgtcttcctgtacttcgaggacaacgctggtgtcatcgtcaaccccaagggtgagatgaagggctccgtcattaccggccccgtcggtaaggaggctgctgagttgtggccccgtattgccagcaactctggtgtcgtcatgtaaggtgcttgcttgcgaaaggaaatcaaggaaagacaaaagggcgtgcggtgcgtgggtgggttggtttctgtcccgaatgcgatcagatagagcgcggtaaagaaacattatccccccctcccccagactcttattcttntttcatct

SEQ ID NO: 80841 - DNA, 507 bp, Oryza sativa
  Clone ID: PAT_MRT4530_80426C.1
atgtctcatcgccagtatcgccgtatcttcctcgactacacttcgatcttcttcggcaaccgcgtgctgctccggcaattctccctctacgccgttcttgcgccgcgaccgtctcggaggccttctttgctagtctcctccaatattggcgtatggttcatggtggtcccctacctcgtccgcgcgctcttcggcgtcatcttcctccacgatcgccgcgattgtgtcaccgtcttcgtctctagcacgtcttcgcgcgccattggtccacgacgccctcctcttcctgacttcggctacatcgaccacggctactctacgcacggcttcatcgaccacggctctctcggctccttcgctttggctacgtcgacaatggcacaaagtgctatcatccgtattgagcactcttgccgacggtggccaacatggaaggtgctgcacatccagatcgaggagagcattggccgtgttgagacggtggttgtcttcggcgagctactgtag

SEQ ID NO: 80842 - DNA, 1535 bp, Oryza sativa
  Clone ID: PAT_MRT4530_80427C.1
ttttcagttttttccctccttaccacttgcaaaaattttcatctcccctcctctcctctctctctcctctctctgatatcctcacccctctctttttctttctcttcctctctctcactctctttctcttcctctctctctttctctcctttacgcgtggccaacgagggggcgccgagcagcgggcggcaggcggcgtcgagcagcgggcggcgggcggcgcggccgaggagccggcgccgggagcaggctgcgggcgccacggcaaggaggaggcggcgggcgccgcagtgaggaggaggcgtcgggaacgggcggcggcggctcggctcggcagccgacaacgacgacggccgcggtgggagcggcgacggcgggcggcgggagcggctacggtggcggtggcttcgcaaccttggctcggcggccgacaacgacgacggccgcggtgggagcggcgacggcgggcggcggtgagcggctacccgccgacctcaccaccttcagatccacgccgttcgttcgccggctcctcctccggaccacggccgtcgtccggggggacgagctcccgttcgtcgtctccatgccgcgcgtcctgcaatccgccagggcgctggcctcgccgcctcgacgcgcccggctacaacgacttctgtaaccgatcgtcattgagcacgcgtctacgccaccaaccttcgggttgccgctgcgtcgccccattgggctgcagtgtcgccgcccgtggtccacctccaccggttgttggagttctcgccgctgcatcgacatcgagccgtacctgtgtcgccccttcaggtcacaacgttgcccctctcgtcgtcttcatcgtcgttcgcgcttcgacaccctcgtcgtccacactggtcattgttagccactcgggttacctctacatggctaccgacgttgccgtctaggccgttggtcccgctacttcgccatcttcttcgtccagcatgattcatcgccaccgtcgccgtatcttcctcgactacacttcgctctgctccggaaattctccctctacgccgttctcgcttgtcctggggtctggcaagccctgtgtgacgtctcgtccttcatggttcgactacatcggctcttcggcgtcatcttcctcaactactgtcgcgattatgtcaccgtcttcgtctccagcgcatcctcgcacaccttggttcacaacgccctcccgtgtgtccacgaccactctacggcgcctcatgcgcgctctgcggctcggctacctcgacattagcttccctacttcggctacatcgaccacggctctaggctccttcgctctggctacatcgactatggcacaaagggctatcatccgtattgagtattcttgctggtttcttctccagtccaagtgtccgcgttgctcacgcttggactgcggggggatgttagagtatatgtactcctatatataccggccccctaggctcaatacaattattccacgttacacaatatatctctcctatactatccaacaataa

SEQ ID NO: 80843 - DNA, 159 bp, Oryza sativa
  Clone ID: PAT_MRT4530_80428C.1
atgtcctcggcggcggttgcgtcctcgcactcctgtcggccgccgcacgctggcgtggcgcgcatgggacagccgtccacattggtcgtcctatccggtgcaggcctccaaggctccaaggacgagctgtgcacaggaggtggtgctttgctgtgctaa

SEQ ID NO: 80844 - DNA, 1703 bp, Oryza sativa
  Clone ID: PAT_MRT4530_80429C.1
ggaaactagggttatggtcagctcttgccactatgattgaaagcaatggtgacagttcaaaagcacaatatctcatacagttgctttcagcacacgaaaatccctagtataaaatcatgatatagatgacatctggacagaaaaatgcatccagaaatcatatgactagaattagaccacaaaagaaaaacagggccaccttatgtcttggactcgagtttttgtttccaattctcatccttgcatctccgttgatctgcaatcattgactcgaaaacatccagcagatcatccagtccctttgcatcctctccaagtttcctcatggcaacaactatgctctcaatggtagacaagcacccagcccttggctcatgcctcacctcactatacaagctaacaccatctgattctagcttcacatgtggcagaagttgtagccatggattctcatggtacatacgttgcgcctttgcccaagttccatccaacacaatcaaatgttgtaactgacagtctgaagcatcaatgctgattgcccgctggcacgggaatagcagagctgactttggtggtatggtgattgagaattcctcaaacaccgaaacttccccagtttgttttgacttcttcatttgtattttcgtgacagtaaaaccgttggagacagctgactgaccaagtggtcctcttgacaaccatctgattttgggcttcacaccacgctcaatttcaatcttgagttccttctccgtataggtaatagagcacttatccatgtttttcacagtccagtcttgaccaatagcagcaacagttccaacattttctctaggtataccattgcagttttgggcagttgccatttgaaattctgaggcgttttctactaaatgacgagggagattaccatttacctcgccaatactgtgatgattttcaccgtggataccatcaacaaaggagtttcctgtctggttagctgaggagcccagtctttcagaatctgagcaatatccattcctcttcatactctgaaaccccaattcctcacctccacctaagtcgcttttaacactacagatctctccatccaaatcaaagccaatcctatcagggatatccacaagatccaatatttcaccaccgatatcgctagaacctcgaatattcgcagctttcacacccaaatcactagaagcattgatgcccttcgtcacataatcacgccttgcacaactaactgctccacccgattcgccagaaattccattagagcatattgcagaatctaatgtttcaccttcgcattgcacaggaccagcagggcctcccgttccgccgccaaaaccgtcgccctccagcacctgaatctccccgggcccgtcgggacggtcatgatttccaccgccggcggcggcggcggcgtcgagcgtcctgaggtggaagctggcgcggtggttgacgtcgccgacgagcgcgacggcgaggttgcggaggccgaggcgggcgacgcgggtggagttgagcgggtggcccgcctccatgaggtgctgcaggacggtgacgccgacggcggtgtcgagcggcgggcggcggaggcagccgcagaggcagaggcggaggggcttggtgcagacgccgcacatggggcggcgctggtcgggctcccgccgatgcgcctcgccctggttcgccgccat

SEQ ID NO: 80845 - DNA, 293 bp, Oryza sativa
  Clone ID: PAT_MRT4530_8042C.1
atggctccaagcaaggcacggatgggccttgtggacgatcggctaaatcacgagtacttagagggtgtagagaagttcatagattatgcattcagtaaattagatggtgtccaggaatttaatggggaaggatataatggaatgcaagacctgatggaagatttatttcctcagtgcaacacccctggtggagacgaagcgacacatgaatctactgatcagggacctgaagaggagccaaacactgatgcggccaagttctatgctttgcttgacaaatacaaccaaccact

SEQ ID NO: 80846 - DNA, 1199 bp, Oryza sativa
  unsure (1)..(1199): unsure at all n locations
  Clone ID: PAT_MRT4530_80430C.1
atgacgacttctaccgccgatcgtcttcaactgcgcgtctacgccatcaagcttcgggttgccgctgcgtcgccccctcgggccgcagtgccactgcctgtggttcacatctccactggttgttgcagtgctgagaggcgccctcctcatcaaggctacatcatcggtggacttctcgccgctgcatcgacgtggagctgcagttgtgttgtcctctcggaccgcagtttcgctgctttcgtcgtcttcctcaccgttcgcgcatcaacaaccttgtcgtccatattggtcatcgtcagccgctcagggtcttcttcctctacttcgagcatcgccgccgcgtttcccagctgccactgtcgtcgctctaggctggtggtccagctacctctacatagctaccgacgtcgccgtccaggccattggtcccgctacatcgccttctacttcgtccaacatgattcatcgccagcgtcgccgtatcttcctcgactacacttcgctcttctccgacaaccgcgtgctgctccggcaattctccctctacgtcgttctcgcgccgcgaccgtcttggaggccttctctgctagtctcctccgacattggcatatgattcatggtggtcccctgtctcgcccgcgcggtattggcaacaccggcacgcgcgttcgtcccgagttgtcccggggtctggcaaaccctgtgtgacgtctcgtccttcacggttcgactacatcggctcttcggcatcaacttcctcaacgactgccgcgatcgcgtcaccgtcatcatctcctgcacatcctcgcgcaccttggtccacgaccactctacaacgccccatgcgcgtcctgtggctcggctacctcgacatcagcttcctgacatcggctacatcgaccacggctactctacgcacggcttcatcgaccacggctctttcggctccttcattttggctacgtcgacaatggcacaaagggctatcatccgtgttgagcactcttgccggtttcttctccagtccaagtgtccgcgttgctcacgcttgaaatgcggggggatgtttgagtcatattaggatatgattgatttgtgtggactcattccatatcataattcttccttatctcctccccatgtactcctatatataccgcccccctgaggctcaatacaatcaatccacgttacncagt

SEQ ID NO: 80847 - DNA, 491 bp, Oryza sativa
  Clone ID: PAT_MRT4530_80431C.1
caattgacgcggttctatccgccagtgaggtgcctgccctgccaactacttaggagtgtgctagtattctacatggttgtctcctccatgatcacttagcaggtcaatttcaacacctgcctctcacaaaaactagatatatgatattttatcgacaccggcagttgctcgatgttcttgaagaatagcatgtcaaactgaataatcttagccaagatcatgcagcgatagatttattaagtttgatggttacgatttgcagtttccttttcctattaacttatctgtgctgtcaaataagctttagtgatcgtcaacaaagcatgtgtacctctgaagcaagagcacaccagctagagctgatcatttgttttttagggtttactgcatgaaaagtatcatgtattaattgatgatcatgtctcatggatcatgatatagagatacccaaataataatgtggacacatgttggtgaaaaaaaaaaaaaaa

SEQ ID NO: 80848 - DNA, 2127 bp, Oryza sativa
  Clone ID: PAT_MRT4530_80432C.1
atggcctcgccgccgccggagcgggcgccggcggcggaggctcgccggcgcaggacgacggtgtaccacggccaccgccgaccgtctccgcaccgccccaccgtccgaggcggcgtattctccgacctccgcgccaccaccgccgcctcctcccaaccgaggcctccctcctcctcctcctcctccgccccattccgcctcgccgactgggacccctcctcctcctcctcctccacgccttctccttccgccaccgcggccgcccgccgcctctccccgctcgcgcggttcctcctcgacgcgctccaccgccaccagcgctggggcccgcccgtcgtcgcggaactcaccaagctccgccgcgtggcccccgagctcgtcgccgaggtcctcagcgctcgcccgccgccgcccccgccgctcgcgctcccgttcttcctgtgggcgggacggcagaagggcttccgccactgcttcccggcgttccacgcgctcgcctcgctcctctccgccgctgggctccccgccgcggccgaccagcttcccgacctcatgcgagcccatggcaagccggtctcgcattcccagctcaacctcctcgtcaggctccacaccggcgcgcgtcgcccgctccgcgcgctccacgccctccgccgcttccgccacgagttctccgtgcagcctgaggtccacgcctgcaaccgcgtgctgggagcgctggctgcggctgggcatgttgatgataccctcaagctgttcgacgaaatgtcgcactgcagtgtgcggcctatgccggtgacattcgcgatcatggtgcgtgcgctggcgcgggcggggatgacggataaactcctggagatgattgggaggatgcgggctgaggtgtgcagaccggatgtgtttgtgtacaccgcactggtgaagacgatggttcgctgggggcatatggagggttgcatcagggtttgggaggagataagaagggatcatgtggatccagatacaatggcttacaccacaatgatagctgggctatgcaatgcgggaatggtggagaaggcagaagaattgtttggggagatgaggaggaagggtttgctggtggacaggatggtgtatgcgtctctcattgatgggtatgtctccacaggaagggtcagcgatggttgtagagtgttgaaagagatggtggatgctggttaccgtgcagacctggggatctataacacactgattggcgggctatgtgagatagagcgggaggataaagcacacaagatgtttcagattgtcgttcaggaggatctaataccaagctccgagactgtttcaccattgctggctcgttatgccgataagggcgagatggttaagttttttggattggttgataaactagtggagctaagcttgcctatagttgaaattttagtggacttcctgaagctctttgcatgcaagagtggcaatgaattgaaggctgtggaagtttttaatgctttcagaagaagggggcattatagtgttggcatttataacattctcattgagaatctgctgaagatcaaggagaggaagaaagcacttgtgttgttcgaggaaatgcaaagttcagatgactgcaagccggactcatgtacatatagccatatgatcccatgttttgtggacgaaggaaatattgaagaggcttgctcgtgctacaacttgatgatgaaggcagtttggataccaagcatttcagcctattgtgctcttgtgaaagggttgtgcaaaaaaggagagataaatgcagctatttcacttgttaaggattgtcttgggaatgtggaaaatgggccaatggaattcaagtacaccttgactattcttgaagcttgccaatcaaaaagcccagagaaggtcatcaaagtggtggacgaaatgattgagttagcctggaaggttgatggcttgatacagaggatcgtctcccacagatccgatgccccaggtcgctcccacctccctcacggcctcaccccatcaatcatgcgtcacaaaatgcagttagaagtcccgagcagcggcaaccgggtctcgcccagcctccgctcccaagctttgagatttgagaatcccgggtag

SEQ ID NO: 80849 - DNA, 3072 bp, Oryza sativa
  Clone ID: PAT_MRT4530_80433C.1
atggcacggggctctgctctgctcgacggcagtgtactaccgccttcccgcatcgtgagcgagaggcacgccggactgccgcgccgctttatgccggagtccgccaccggtcgggagatagtgatgctgggcgaggggcgcccggcaccagactacccggggcggtccatcttcttcctccccttcgcaatggctgggctggtcccgccattttcttctttcttcatggatgtcctggagttctacgatctccagatggcgcacctcacccccaatgcggtgatgacattggccatcttcgcgcacctgtgcgagatgttcattggggtgcgcccctctcttcagctgttccggtggttcttcaccgtgcagtcggtgtcaccgccgtcggtggttggcggctgctacttccagccgcgggggccggtgttgaaccgctacatcccctgcgtcctccgcaagaagtgggacgactggaagagcgactggttctacacccccctcgccaacgaagcgcgcctccgacttccaagccagcccccggcgcaggtctccagctggcgggcgccggtagatctgggggaggactacgacgccgtcctcgaccgcctggcgggcctgcgatcccaggggctcaccggggccatggtgtacggcgattacctccgtcgccggattgcgccgctccaacggcgcgcccggagcgcctgggagtacactgggcctgaagactacatgcggacccaccagggagccagatgggattgggctcccgaggacttcaagatcgtggtccaaagggtgctgaatcttagctccgtggaggcgtctcgcattcctcaggagatcctccccctctgcagcgatcccgaccgcgcctccattctaaccattatgatgggggtcggggcctcagaggagagagcccctaagggccacgacggcgcgggcgagcgccgccggggccgccctgccgacgcccaggggaagaggaagttgggaggaacacctcccccatctcctccccgagggggcggggcggcgcgtgccagcagtcggcgcccggagggggccgcgccgacgtcgcagcccgagggggagcgcaagaagaaacggctccgcaagacgggggagacggaaccatgccggggaaacctgatttcccctccaaggtggtcattcaaccgaccccctcgcagcgatgtcccgtcgcattcctcccgccaccccaagtccggccagtccgaggccgaagatcctgcggccgcggaggagcggaggcgagaatctgaccggcgtgaagccgcagaccgccttcgggaagctgaagaggccgcccgggaggccgcccggattcgccaagcggaggaagctgctcgggaggaggccgcccgggctgaggaagccgctaaggaggaggccgcccgggctcgccaggctgaggcaacagctgctgctggcgcgtcaactgggcccactccttcgggcaaccctcaggcgacagcctccggggaggctcgcgacgaggccgcgggcacatcgcctgggcccacctccccgggcgacgcccaggatcaaacgggtccgggggacatccccgagcccagcacgtcctccggggggccgagccgcatcgccttctctccaaggcggctcttctcctcatcttccgtcgccccgctgagcgccgagcccattctgcaggccttggccgccgcaaacaccgcggtgctagatgggttcagcgcccaagtggaggccctgcgcgcggaacgagcggagctcgaggccgcatgggcacgcgttgaggaggggcggcgctcggtggacgccatggtggaggtgggccgtaaagctcaccgccgtcacgtctcggagtttgaagcccggaaggcggcgctgacggagatcgctcgtgaggtggaggaggagcgagcggccaccctcatcgctaccaccacgatgattgaggcacaagacgccctccgccttcaaaacgccagccgggaggcggagctgaaagaaaaactcgacgccgcccagggagttcttgactccgccgctgcccgagagcggcgggtaacagaggctgaggcggcgtcccggcggcgcgaggagtcccttgaggcccgtgctatggcgctggaagaacacatcgggaccgtggggaaaggcttgacggaccgcgaggccgccgctgctctccgggaggcgacgctggcggcgcacgaggccgcctgcgccgaggaggagtgcgcgctccgcctccgcgaggacgcactcgctgagcgggagcgagctctcgaggaggctgaggccacgaccaaatggctggcggacagcctgtcccttcgcgaggcggcgcaggaggagcaggcgcgccgcaatcttgaatgcgtccgcgccgagagagccgcactggaacagcgggctgctgacctcgaggcgcgggaaaaggagctggacgcgagggcgcatatcggtggggcggccgcgggcgaaaacgacttagccgcccgcctcgcagctgccgaacacaccgtcgccgatatgcagcgagcgctggactcctccaccggggaggccgaggcccttcgcttggcgggcgagattgggcccggcatgctttgggatgcggtctcccgcctgaagcgcgccggtcggcaagcgggcctctggaaaggccagacgacggtgccccccaccaatctggaaggcctcgctccgcacctcaacaggatggcctgggttctcgaacaactccccgaggagcttgagaagaccatcaagtcatcctcgagggacctcgcgcggggagcggtcgagctcgtgctggcgagttaccaggcccgggaccccaacttctctccatggatggcgctggaggagttcccccccgggaccgaggacgatgcacgcgcgcgggtccgggatgccgccaaccacatcgtccaaagcttcgaggggtcggcccctcggctcgcgttcgcccccagctccgatgaggagggcgacgccagcggtgaggacgacggtggcgacgaggccggcgacccgggcacattggaatga

SEQ ID NO: 80850 - DNA, 2748 bp, Oryza sativa
  Clone ID: PAT_MRT4530_80434C.1
atggcacggggctccgcaccgctcgacggtagcgtgctgccgccttctcgcatcgtgagcgagaggcaggctgggctgccgcgccgattcatgccggaatctgccaccagccgggaggtggtcgcgctgggtgagggacacccggcgccacactacccggggcggtccgtcttcttcctttccttcgcaatggcagggctggtcccgccattctcttctttcttcatggatgttctggagctttatgatctccagatggcgcacctcacccccaacgcggtaatgacgttggccatcttcgcgcacctgtgcgagatgttcatcggggtgcgcccatctctccggctgttccggtggttcttcaccgtacagccggtgtcgccaccgtcggtagtcggtggctgctacttccagccgcaggggccggtgctgaaccgctacattccctgcgtccttcgcaagaagtgggacgactggaagagcgactggttctacacccctctcgccgacgaagcgcgcctccgacttccgagccagcccccggcgcaggcctccagctggcgggcgccggtagatctgggagacggctacgacgccgttcttgaccgcctggctggtctgcgattccaggggctcacgggggccatggtgtacggcgattaccttcgtcgccggatcgcgccgctccagcggcgcgcccggggcgcctgggagtacaccgggtccaaggactacacgaggacccaccagggggtcaaatgggactgggtccctgaagacttcaagatggtgatccaacgggtgctgaatctcagctccgtggaggcatccctcatcccccaaggtgtcctccccctctgcagcgatccagagcgcgccaacatcctgaccatcatgcaggcggtcggggcgttaggggagcgggctcctcgaggccacgatggcgcgggcgggagccacaggggggaacaatctaccccgggagggggtcgtgcttctgggccccgtgacgggggcccggggggcagccgccctgccgacgcccgggggaagaggaaacaggaggataccccctccccatctcctccccgagggggcggggcggaagctgcccaggaggccgtccgggctcgccaggctgaggaagccgcttgggaggaggccaaactctgccgggccgaggagtccgtccgggagacggaggcggcgcgcgcacgccgggcggcctgccaagcccccgacccgactccgtccgaggcgacaacgacttccgaggccacccacgacgaggccgcgggcgcgccgctcggacccgacccctcgggcgacgttcgggacgagcccgcttcgggggacgcccccgagttcggcacgtcgatcggcgggccgagccgcgcggcgcccacaccgaggcgggtctcccctctgccttccgctgccccactgagcgcagagcccctcctgcaggccttggccgctgcgaacaccacggtgttggacgggttaagcgcccagatggaggtcctgcaggcagagcgggcgaaggtcgatgcggcgtgggcgcgcgtcgaagaggggcggcgctcagtggaagccatggtggaggcgggccgcaaggcacaccgccggcacgcctcagagctcgaggcccgtcgtagggacctggcggagatcgccagggaggtggaggaggagcgggagactgccctcatcgccaccgccgtgttcaacgcggcgcgggacgacctctgtctccaatacgggagccgggcggcggagctagagaagaagctcgacgcgtcccggcagctcgaagaggcccttgaggctcgcgccacggtgctggaggagcgcgcccgcgccctggacacgaaggagagggaactggcgggtcgcgaggccgccgtcgccatccgggaggcaacgctggcggcgcacgaggccgcctgcgccgaagaggagtccgcactccgcctccgcgaggacgagctcactgagcgggagcgagctctcgaggaggccgaggccgcggcgcagcggcgggaggagcaggcgcacctcaatctggaaggcgcccgcgccgagagggccgcactggatcagcgggccgctgaattcgaggcgcgggcgaaggagctggacgcgagagcgcgcagcgacggggcggccgcgggcgacggcgacctagccgcccgcctcgcagccgccgaacacaccatcgccgagctgcagggcacgctggactcgtccgccggggaggtcgaagccctccgcttggcgggcgaggtagggcccgacatgctccgggacgccgtctcccgtctagaccgtgccgggcggcaggcgggcctctggggcgggcggaccgcgaaatacgccgccaaccaggagggcctcgcccagcgcctctcagagatggccgggaccctccagcggctccccgaggagctcgaggagacgatcaagtcatcctcgagggacctcgcccggggggcggtggagctcgtactggcaagctaccaggccagggaccctgacttctcctcgtgggcagcgctggacgagttccctcctggaaccgaggatggcgcgcgcgcgcaggtccgggactccgccgaccacatcgtccacagcttcgagggtacggcccctcggctcgcgttcgccctcgactccgacgaggagggcggtaacggtggtgcggacgacagcgacgacgaggccggcgacctgggcgcgtcggcgtga

SEQ ID NO: 80851 - DNA, 2549 bp, Oryza sativa
  Clone ID: PAT_MRT4530_80435C.1
gagagaactagtctcgagttttttttttttttttttttttttttttttttttttttttttttttttgtggtattccaccatcactggttcttccctaaatctgagctgtctgattaaatacataaatagtcgctatacaatatatgcagatctggacatacgtggaattatcttatctccttttttttatacaatagaaatacagtaactcaatggtgagaacatttattatttacaggtgatggtaaaactgtcaaaacgtgactatagaaagacacaaaatattctaagcgctgccgcaaggtgctgtgcttctgctgctgccactgtggttatgctttggctcgaattctggctcaaaacacgctgggctacacatgaagaccatttcggtgagatgatctctgagagcttcaagacttttgatagttcattgaagattggaactgtgaaatttgtcaaagggaaaatcaacggaagctgtacaagttaatcgccatgtacagatgaacaacccccacagtgatctatgcaggtgaaatccgttgataggctacccctgtcagtgagctgtacttcctcccatagaagacgtatatgatggcaccaaccgctagccacatcgaaacacgaatccacgtatgaatcccaaggttcataagcaggtatacgttgatgagaatgcaacatactggaagtataggaacaaatgggcacataaaacctccggtttgtcttaaagagctcttgtcttgcccaatgaaccagagtgcaatggtagcactaaccaaaagcaaactaccaaaggcacaacggaaaaaaggagaaagaaattccaacacaagccaatctggaagtcttatgcccctcctcgatgtcattacttcctttggctggtcgctctcaaccgatgctggacggtggaccaccttcgaagttgaggcttgtcgcacccggatcgctgccccctcgttgcccaaaagatcctccgaattttcctcatctggttctgaatacccagagtctgaagttagtgattcagatgaacctggaagagccactttcgttgctatctcatttggaggagcatatcgcactattaaaacagaaatggcaaccatagtaaatgccaatagtgtgcccacgcttaccatccctgccaattctgagacgtccatgaaaagagccaggatagcagcacatatccctgacaatattgtgctcaaggttgggacttgggtcgttggatcaacagctgaaaagagtggtggaagcaatccatctcttgccatagccatcacaattcttggctgagggagaatagcacctatcaaggatgctataagagcaaaaacagccccagtggaaataatgtacactgcccattgcattccatatttagcaaaagcagatgaaataggagtgttaggatccaatgcataatatggcaccaagccaacaataacaatagaaaccatcatgtagaggaagcagcacaaggacaaggtcagacacattccccatggaagatcacgttggggattcttcacctcttcagctgtgctagcaactgcatcaaagccaatataggcaaagaagagggttgctgatccagatagaacaccagccacacctttagggaagtaaccttgttcatcattatagccactccagccattctggaatgctaagtatccaccagcacaaatgacgaacagcataactataacatttgcaatggtgatgatgccttccacaaatgaactctccttaattcccaggcaaagtaatgcagtaactatcaatacaagaatagcagcacaaggatcaagcggggtttcaaaccatttaacatgtatttgtgttaggaaaaagggaagcttctcatggccaccaaaaaatagagccaagttcggagaaatgccacgagccactgatgacccaccaattgtgtactccagaatcagagcccaaccaatcaaccaagcgacactttctccaatgcaaatgtatgagtagtgataggcacttcccgccaatggaaaacggcaagagagctctgcatagcacaatgctgaaagagcagctgctatgccagctatcagaaaggaaagggtcaaggctggtcctgcatgctcacgagccacagttcctaccaggacatagatgccggcaccaatcgttgagccaacacattcatatgatttgccaattgccagttgacaccaacgcagcatgccattaggcactaggcacaaagcctcatttcttctagggtgttctacgcaggatgaaaacgaagaggcggagattagaacaaggcgacgcgggataccgatggcgatgaggtcaggaacggacagcgccttggcgaggtgccgccctttgcccccaccggccggcgcccccgccgccgaggactcggcgcggtcggcggcggagcacgccggcttcctccgcaccaggcactgcaagtcctgcagcgagaggcgggtcgcgatggccgagcccgacgcctgcaaatcctgccacgagaggcgcctcgccat

SEQ ID NO: 80852 - DNA, 3023 bp, Oryza sativa
  unsure (1)..(3023): unsure at all n locations
  Clone ID: PAT_MRT4530_80436C.1
ccccgaggctctctcgcctactacagctccccccgccccgtcttctccctcctcagtcccgagccactctccttcctagcagcagcagcagcagcacacagcgcggcaagaaacagggagcttcagggtgagaggagctagaatgatgggccccaaggccaacgccgccgccgccggcgacctcccggagtacgccgaggtcgatcccaccggccggtacggacggtacaacgacgttcttggcaagggcgcgtccaagaccgtgtacagggcgttcgacgagtaccaggggatggaggtggcgtggaaccaggtgaagctgcacgacttcctgcagagcccagaggacctggagcggctctactgcgagatccacctcctcaagacgctcaagcaccgcaacatcatgaagttctacacctcctgggtcgacgtctcccgccgcaacatcaacttcatcaccgagatgttcacctccggcaccctccgccagtataggcagaagcacatgagggtgaacatatgggcggtgaagcactggtgcaggcagattctgagtggattgctgtacttgcatagccatgatccacccatcatccaccgggacctgaagtgtgacaacatcttcgtgaatgggaaccagggggaggtcaagatcggtgaccttggccttgccgccatcctccgcaagtcccacgccgtccactgcgtaggcacgccggagttcatggcgccagaggtgtacgaggaggagtacaacgagctggtggacatatactcgttcgggatgtgcgtgcttgagatggtcaccttcgagtacccgtatagcgagtgcacgcacccggtgcagatctacaagaaagtgatctctgtaagaattgcctcctggatccttggtactaagccggaagcgttgtacaaggtcaaagatccgatggtgaggcagttcgtcgagaaatgcctggccactgcatcccggaggctctcagcgagagagctgctcaaggacccattcctgcaggttgacgatttggtcttttgtccgggtgatggagattacagcctgatgaactatctgcggcagccttatttagaacacgcttatagtaatgtctccatgatgagtaatggattatctgaaagcattgacgaggatacaccaacggaagatagatgggattgtgaagatgatgacattaaagctgatggtattgacttgttcaatgggcatgaagatgagcctcttggcaatgtggatatcacaatcaaagggagaaaaagtgaggatggaagcatattcctcagattacggattgcagataatgatgggcatgtacggaacatctattttccttttgacatagaggccgataccgcattgagtgttgcaactgagatggtagccgagctagatataactgaccatgaggttactcgaattgctgagatgattgatggcgaggttagtgcactggtgccagattggaggcctggcccaggcatagaggaatctcaagacactacatactgccataactgcggatcaaatgtatcgtcatgtggttcactttatgcctacatgtcatctgctgctcgaggttgccagtgtgcagagctacatgggcggtttgaggagataacattccaagccaatggagagcagaccgatttgcaggactccggaggcagctctgatgatggaggtggccaaacacaacatgtcaaagatcaggaagccgaacagtcttgctcacctcggcactatgagtatgacactagcctccaagcaaaagggttcgacatgaagcatgaagtaaagatggccaaatacaaagcacggaaaatggcacatctaaggagagctattcatccatctctggactttgacaacttgaatggagaaaggaggatgaagtcttcactgaacaagttacagtcttttcatattggtaagaatcacaatttccgcataccgacctgcgagcgaagcccaggcgctagagacgctgaggaggaccctgacatttttaatctagcgtaccatagccggcaccccgatccaggagcccaaagggcccggcattgtgaggttgatgcacagagcagtccagatctcatagcaaaggatggtcaccacatgctacctgatactaatattctcacttgctactgccagctcgtcttgctggagcaggacaaaggggtttccctccttgccgccgccgccgccgccaccgccgccgcagcctcctctcgctccgcctcaccgccgctcgacgccatgggccgcatgcacagcagcgggaaggggatgtcctgctcggtgctcccctacaggcgcgccgctcccgcctgggtcaagacgtccgcgtcggaggtggaggagatgatcgtgcgcgccgccaagaagggccagctgccgtcgcagatcggggcgatcctccgcgacgcccacgccgtcccgctcgcccagggcgtcaccggcggcaagatcctccgcgtgctcaagtcccgcggcctcgcgcccgaggtgcccgaggacctctacttcctcatcaagaaggccgtcgcgatgaggaagcacctcgagaggaacaggaaggacaaggacaccaagttccgcctcatcctcgtcgagagcagggtgcaccgcctcacccgctactaccgcctcgccaagaagatccccgccttcttcaagtacgactccaccaccgcgagcactctcgtggcctgaagtggaactgaaggtttcgttcgttttcagcttcttttttgggcgacttgaattctcttgacagccatggagttttgtttaatcttaagtaagtaggaatgcttttgttggtgtaatgtgttaaatctacctcctgcacctgaagagaagttgcttactgagactcgatctaggaatgcttttgttggtgtaatgtgttaaatctacctcctgcacctgaagagaagttgcgtactgagnactcgatcagattttattttccaaaaaaaaaaaaaaaaaagcggcc

SEQ ID NO: 80853 - DNA, 2391 bp, Oryza sativa
  Clone ID: PAT_MRT4530_80437C.1
atggtgtacggcgattaccttcgtcgccggatcgcgccgctccagcggcgcgcccggggcgcctgggagtacaccgggtccgaggactacatgaggacccaccagggggtcaaatgggactgggtccctgaagacttcaaggtggtgatccaacgggtgctgaatctcagctccgtggaggcatccttcatcccccaaggtgtcctccccctctgcagcgatccagagcgcgccaacatcctgaccatcatgcaggcggtcggggcgtcaggggagcgggctcctcgaggccacgatggcgcgggcgggagccgaaggggggagcaatctaccccgggagggggtcgtgcttctgggccccgtgacgggggcccggggggcagccgccctgccgacgcccgggggaagaggaaacaggaggataccccctccccatctcctccccgagggggcggggcggtgcgtgccagcagcaggcgcccggagggtgctgtgccgacgtcgcagcccgagggggagcgaaaaaagaagcggctccgcaagataggggggaccgaaccatgccggggaaacctcatctcccccccaaggtggtcgtttagccgacctcctcgcagcgagatcccgtcgcgcccttcccgccattccaagtccggccggtctgaggccgaggagacggcgaccgcggaggcccggaggcgggaagctgaccggcgagaagccgcagaccgcctccgggaagccgaggaagctgcccaggaggccgtccgggctcgccaggctgaggaagccgttcgggaggaggctagactccgccgggccgaggagtccgtccgggagacggaggcggcgcgcgcacgccaggcggcctgccaagcccccgacccgactccgcccgaggcgacgacgacttccgagtcctcccacgacgaggccgcgggcgcaccgctcgggcccgacccctcgggcgacgctcaggatgagccaacttcgggggacgtccccgagtccggcacgtcgatcggcaggccgagccgtgcggcatccttaccgaggcgactctcccccatgccttccgctgccccactgagcgcggagccccttctgcaggccttggccgccacgaacaccacggtgttggacgggttaagtgcccagatggaggtcctgcaggcagagcgggcggagctcgacgcggcgtgggcgcgtgtcgaagaggggcgacgctcggtggaggccatggtggagacgggccgcaaggcacaccgccggcacacctcagagctcgaggcccatcggagggagctggcggagatcgccagggaggtggaggaggagcgggagactgccctcatcgccaccgccgtgttcaacgcggcgcgagacgacttctacctccaatacgggagccgggcggcggagctagagaagaagctcgacgcgtcccggcagcgcgaagaggcccttgaggctcgcgccacggtgctggaggagcgcgcccgcgccctggacacgaaggagagggaactggcgggtcgcgaggccgccgtcgccatccaggaggcaacgctggcggcgcacgaggccgcctgcgccgaagaggagtccgcactccgcctccgcgaggacgagctcactgagcggaagcgagctctcgaggaggccgaggccgcgacgcagcggcgggaggagcaggcgcgcctgaatctggaaggcgcccgcgccgagagggccgcactggaccagcgggccgctgaattcgaggcgcgggcgaaggagctggacgcgagagcgcgcagcggcggggcggccgcgggcgacggcgacctagccgcccgcctcgcagccgccgaacacaccatcgccgagctgcagggtgcactggactcgtccgccggggaggtcgaagccctccgcttggcaggcgaggtagggcccggcatgcttcgggacgccgtctcccgtctagaccgtgccagccggcaggcgggcctctggggcgggcggaccgcgaaatacgctgccaaccaggggggcctcgcccagcgcctctcagagatggccgggaccctccagcggctccccgaggagctcgaggagacgatcaagtcatcctcgagggacctcgcccggggggcgatggagctcgtactggcaagctaccaggccagggaccctgacttctccccatgggcagcgctggacgagttccctcctggaaccgaggatggcgcgcgcgcgcaggtccgggacgccgccgaccacatcgtccacagcttcgagggtacggcccctcggctcgcgttcgccctcgactctgacgaggagggcggtgacggtggtgcggacgacagcgacgacgaggccggcgacccgggcgcgtcggcgtga

SEQ ID NO: 80854 - DNA, 216 bp, Oryza sativa
  Clone ID: PAT_MRT4530_80438C.1
atgagcgtccaaaagcgccggctttggctcccatcggcccaacggctaaaagcagctgatcatctcgaccttgttgccaagtgtttggacatcaaaattaaggcactgaaacttttgcaattggatgtagcaacagcaacagcagcaaacaggagcagacatgcagggtcccaagcagaaggcacgcgagcctgcatgacaaacaaggacaggtaa

SEQ ID NO: 80855 - DNA, 487 bp, Oryza sativa
  unsure (1)..(487): unsure at all n locations
  Clone ID: PAT_MRT4530_80439C.1
actcctatagggcgattgggatcantcgagccggccgggaggtttccctccttgccgccgccgccgccgccaccgccgccgcagcctcctctcgctccgcctcaccgccgctcgacgccatgggccgcatgcacagcagcgggaaggggatgtcctgctcggtgctcccctacaggcgcgccgctcccgcctgggtcaagacgtccgcgtcggaggtggaggagatgatcgtgcgcgccgccaagaagggccagctgccgtcgcagatcggggcgatcctccgcgacgcccacgccgtcccgctcgcccagggagtcaccggcggcaagatcctccgcgtgctcaagtcccgcggcctcgcgcccgaggtgcccgaggacctctacttcctcatcaagaaggccgtcgcgatgaggaagcacctcgagaggaacaggaaggacaaggacacccagttccgcctcatcctcgttcagagcagggtgca

SEQ ID NO: 80856 - DNA, 244 bp, Oryza sativa
  Clone ID: PAT_MRT4530_8043C.1
cgagctccaccacctcgagctcactgttggattacttgtgctcagccaccaccttgggctatcagtgcttgcccccacctcaacctccaagtgcttccgccacgggctccaccttgagggtccatccctcctctccgccggcttctccctccgttgtcactactgcaacttcatttgccacaagagcgatcttcgatccgagcatgcgagagagggagagaaaagggacagctcggggatctag

SEQ ID NO: 80857 - DNA, 5415 bp, Oryza sativa
  Clone ID: PAT_MRT4530_80440C.1
atgtcgtctttcgccagcccacttggtgcaccatcggccgaatatgctgagcacctttccaacctagttgcgattcccagcctggcgcatgaaaatcactactttcttggcccaatcggcaatccagaccccaccgagtttattattggtgaaactaataggatccccttcagattaaccaacccagatctaggtcactggaagaataccttcaaatcctggccatccctagagaaagttccactagaaaagagctggaccacatggttcaaacgtgtatcagccagcaagagggttcactgggatgaaattggaatcggccaagcacttgaccttactatagcgaactcggccaaagatgaacccctgatggcagctgcttcttacttctggtcaaacactaccaatgcctttctgttcaatcaagcgccgatgactccaactctcatagatatcattatgatcacaggtctggatgttacctcatcggcccaccctatgagtttgaacacaaagaaccaatatgactttaaaaccaaaagtatagggggttggtcaggctatgtggcaacatacatgggccagggctcggtcacccctcgagaacatgtggctttcctattaatgtggctagaaaaatttcttttttgtggatcaagttgtggccccacaaccaactggcaatttctggctgaagctctagaaacaaagagacaattccccttgggcaaaattctcctcggctatctataccagatgctgagcaatgcatcggctaagatagcagtcggctcagtagttggagcagggaaatcttctcggctacaatcagcccatgtgtcctccctgtttcgacagttggcgcgccaggtaggggttgcgtcaagtttttcgccgaccagtgtgatgggttccgtctccggcatcgacgacttcgtcttccctcccgggcaggcgtttcggttcggcagcctcgacttcatcactaacaacttcggcaagatctctctcctcgactcggattcgaaccagtcaggaaagaaccaggtctcagccccgttcggtattccggcgtcgagtggattggccagccggcttcaagccgactggaatcgagaaaagtctggagaatcccttcgagattacatccaacgcttttctgaacagcgcaacaagatctccgaaattaccgacgacgtcatcatcgccgctttcaccaaaggaattcgccacgaagaactagtcggcaagttcgggcgcaaacctcccaagacagtcaaacagatgtttgaaaaagccaatgagtatgccaaagccgaagacaccattatcgcatccaaacagttgggtcctacttggaagccaaagaaagatgcgccgactacgggagggggtggaagtaacaatcacaaggaccgcaagcgtaagcccgaggaacttgttgcgactactacacactcctcccgacaacaatcgcgcgtcaacacttttgacaagatcatgaactctcaatgtccgcatcatcccaactccaaccacgcagctaaagattgcttcgtctacaagcagtttgcagagcaatatgccaagaatgcacggaagacccctgacggagaacaaagcacgtcgaaaaagaaggatgatgatgatgatgccccgacagattttcaagatcaccgcaaggagctcaaccacatctttggcgaccctctggcttacgagtctaaaagaaaacaaaagctgactgaacgggagatcaacgctgtccagcccgatacgccccagtatcttcggtggtcggagacaacaatcaagttcgaccactcggatcatccagaccgagtggtccacccggggcggtacctccaggtactagacccagtggttcgaaacgtcaagctttgcagatccctcatcgatggtggcagtgcactcaatatcctcttcgccaagaccctggacgacatgcagatccctcgcaccgagttgaagccgagtaacgcgcccttccatggagtcatcccagggttatccgctacgccactcggccagatcactcttccagtcacctttggtactcgggaaaacttccgcacagagaacgtctgcttcgaagtcgctgatttcgatacagcgtatcacgccatactcggacgcccgacgttagccaagtttatggccatcccgcactacacctacatgacgatgaagatgcatggtcctcgaggagtcatatccctacggagcgacatcaagcaagccgtcacatgtgacaaggaaagttgcgagatggcccaaacctgcgagatcgcgatcgctcgagaagacatccgactggttgcagccacggcaagtgaaggagaggtgcctactaccaagatctcaaagagtggagaaagcgaagccaagaccaagaaaatccccctagatccttctgatcctactaaaactgctgtaataggcgccaagttagattatatctttgcgtggaaaccatccgatatgcctggtattcctagagaggtgattgagcactctttgcatgttaaggaagacgctaaacccatcaaacaacgactccgccgctctgcacaagacaggaaggacgcgatcaaggaggaattgaccaagctattagcagcgggcttcatcaaagaagtcctttatcccgactggctggctaacccagtcctagttcggaagaagaccgggcaatggcgcatgtgtgtcgattacaccgacttcaacaagtcttgccccaaagatcctttcgagttgccttgcattgaccaggtagtcgactcgaccgccggctgcgagctgctcagttttttggattgctactcggggtatcatcagatccgattgaaggaatccgactgcttgaagacttcgttcatcatgcccttcagggcctactgctacatcaccatgcctttcggattaaagaacgcaggagcaacttatcaacgtatgattcagagatgtttctcaactcaaatcggtcgcaacgttgaagcctatgtggatgatgtagtcgtcaagaccaagcagaaggatgatttaatcacggacctagaagaaacctttgcgagcatccgcgctttcaggatgaaactaaatcctgaaaagtgcaccttcggagtaccgtcagggaagctgcttggatttatggtgtctcatagaggcatacaggccaacccggagaaagttaacgccatcctcaacatgaaaccgccgagttcccagaaagacgttcaaaaactgactggatgcatggcggcgctcagccggtttgtctcacgactcggcaagcgggggatgcccttcttcaagctgttaaagaaaacagacaatttccagtggggacccgaagcacagaaagcctttgaagacttcaagaaacttctcactactctaccagttctggcctcaccacacccacaagagccgctattactgtacgtgtcggccacttctcaggttgtgagcacggttctggttgtcgagcgtgaagaagaaggccatgttcagaaagtccagcgaccaatctactttgttagcgaggttttggccgactccaagacgagatatccacaagttcagaagctgttatatggtgttctaattactgtcaggaaattatttcactacttccaaggccactcggtcacggtggttacgtcgtttccactcagcaatatactccataatcgcgaagcaaacgggcgaatcgcaaaatgggccttagaactgacgtccttggatatatcgttcaagccgcaaacttcgatcaagtcccaagctttagccgacttcgtcgccgagtggaccgagtgccaagaggacacgcccgaggaaaagatggagtggaaatacgaggcgctccttcacggactacggatcgcaatctctttgggaatcaagcgtctgatagtttgcggagattcacagttagttgttaatcaagttatgaaagagtggtcctgtcttgatgacaatatgatcgcttatcgacaagaggtacgcaagttggaggataagttcgatggactcgaactcacccatgttcttcggcacaataacaaagcagccgacagattagcaaatttcggatccaaacgcgaagcagccccttctgacgtgttcgtcgaacatctttatgagccaaccgtaccaaggagagaaacagctgaggccgcggacactcaagacatagctatggttgaagccgactggagagagcccctcatacgatttctgacctcccaagaactccctcaagataaagacgaagccgagcagatttccaggcgcagcaggctttatattattcatgaggccgagctgtacaagaaaagtccatcaggaattatgcaacgctgcgtgtcttcagaagaagggagacaattgctgaaggatatacattccggtatctatggcaatcacgctgctgcacgcaccattgtcggcaaggcttaccggcaaggttgtcaatttttcgccagacaaactcatctgccagcccaagagttgcaaaccatcccgctgtcctggccgtttgcggtttgggggcttgacatggttggcccgtttaaaaaggcagtcagcggttacacacatctctttgtggctatcgacaaattctccaagtggattgaagccaaaccggtcatcataatcacggcagataaagctagagattttttcatcaacattgtgcatcggttcggggtacctaattggatcatcactgataatggtactcaattcaccggcggagtattcaaagatttttgtgaagacttcggcatcaaaatttgttatgcctccgtagcgcatcctatgagcaatggacaagttgaacgagccaacgggatggtactccaaggaataaaggcacgagtttttgaccgactgaatccttataccgacaaatgggtggaacagctgctatctgtactttggtccttgcgcaccacccccagtcgggctacgggccagtcgccattcttcttagtttacggagcagaagcaatgttgcctagtgaagtagaatttgaatctttgcattttcgcaattttcatgaagagcgctacggagaagaccgagtggatgacctacaccgactagaagaggcccgcgaagcagccttaattcagtcggcccgatacttgcaagggttgcgtcgttatcataatcgtaacgtccgatcgcgagccttcttagtcggcgacctggttctgagaaaaattcaaactatacgggatcggcacaagttatctcctttatgggaagggccatttataatctcagaagttactcggccaggttcttatcgactcaagcgtgaagacggtacacctatcgacaattcttggaatatcgaacatcttcgtcgtttttatgcctaa

SEQ ID NO: 80858 - DNA, 2432 bp, Oryza sativa
  Clone ID: PAT_MRT4530_80441C.1
ctctccttcctagcagcagcagcagcagcacacagcgcggcaagaaacagggagcttcagggtgagaggagctagaatgatgggccccaaggccaacgccgccgccgccggcgacctcccggagtacgccgaggtcgatcccaccggccggtacggacggtacaacgacgttcttggcaagggcgcgtccaagaccgtgtacagggcgttcgacgagtaccaggggatggaggtggcgtggaaccaggtgaagctgcacgacttcctgcagagcccagaggacctggagcggctctactgcgagatccacctcctcaagacgctcaagcaccgcaacatcatgaagttctacacctcctgggtcgacgtctcccgccgcaacatcaacttcatcaccgagatgttcacctccggcaccctccgccagtataggcagaagcacatgagggtgaacatatgggcggtgaagcactggtgcaggcagattctgagtggattgctgtacttgcatagccatgatccacccatcatccaccgggacctgaagtgtgacaacatcttcgtgaatgggaaccagggggaggtcaagatcggtgaccttggccttgccgccatcctccgcaagtcccacgccgtccactgcgtaggcacgccggagttcatggcgccagaggtgtacgaggaggagtacaacgagctggtggacatatactcgttcgggatgtgcgtgcttgagatggtcaccttcgagtacccgtatagcgagtgcacgcacccggtgcagatatacaagaaagtgatctctggtactaagccggaagcgttgtacaaggtcaaagatccgatggtgaggcagttcgtcgagaaatgcctggccactgcatcccggaggctctcagcgagagaggtgctcaaggacccattcctgcaggttgacgatttggtcttttgtccgggtgatggaaattacagcctgatgaactatctgcggcagccttatttacaacacgcttatagtactgtctccatgatgagtaatggattatctgaaagcattgacgaggattcaccaacggaagatagatgggattgtgaagatgatgacattaaagctgatggtattgacttgttcaatgggcatgaagatgagcctcttggcaatgtggatatcacaatcaaagggagaaaaagtgaggatggaagcatattcctcagattacggattgcagataatgatgggcatgtacggaacatctattttccttttgacatagaggccgataccgcattgagtgttgcaactgagatggtagccgagctagatataactgaccatgaggttactcgaattgctgagatgattgatggcgaggttagtgcactggtgccagattggaggcctggcccaggcatagaggaatctcaagacactacatactgccataactgcggatcaaatgtatcgtcatgtggttcactttatgcctacatgtcatgtgctgctcgaggttgccactgtgcagacctacatgggcggtttgaggacataacattccaagccaatggagagcagaccgatttgcaggactccggaggcagctctgatgatggaggtggccaaacacaacatgtcaaagatcaggaagccgtacacagtaatgggtttgtacaaatgggtacaacacgtcctcgtgaccagttttgttttagttcattccaggaacagtcttgctcacctcggcactatgagtatgacactagcctccaagcaaaagggttcgacatgaagcatgaagtaaagatggccaaatacaaagcacggaaaatggcacatctaaggagaggtattcatccatctctggactttgacaacttgaatggagaaaggaggatgaagtcttcactgaacaagttacagtcttttcatattggtaagaatcacaatttccgcataccgacctgcgagcgaagcccaggcgctagagacgctgaggaggaccctgacatttttaatttagcgtaccatagccggcaccccgatccaggagcccaaagggcccggcattgtgaggttgatgcacagagcagtccagatggtcatgtttacagttaggagttaatacacaggagctcagctgccaacaaatctcccaagaacaaaatctgtaaccctaaatgctgttgatgcctgaaatgctttcttgccgtgtaaattccatagagtatagagtgtacattgctttggttctttttgtatgcaataatatgaagtatagctatgtacgcaagaaactgaaatgcatctgggtcatctgtggatatgccacagctgtgtgtaacttcctagcttgagaatttagagggttgccttttgtcttggaaagaaaagattacattttttggatgataaaaaaaaaaaaaaaaaaaaaaaa

SEQ ID NO: 80859 - DNA, 2943 bp, Oryza sativa
  Clone ID: PAT_MRT4530_80442C.1
atggcacggggctccgctccgcttgacggtagcgtgctgccgccttcccgcatcgtgagcgagagacaggccgggctgccgcgccgcttcatgccggaatctgccaccggccgggagatagtctcgctgggcgagggatgcccggcgccacgctacccggggcggtccgtcttcttcctcccttttgctatggcagggctggttccgccattttcttctttcttcatggatgttctagagttttacgatctccagatggcgcacctcacccccaacgcggtaatgacattggccatcttcgcgcacctgtgcgagatgttcatcggggtgcgcccatcccttcggctgttccggtggttcttcaccgtacagccggtgtcgccgccgtcggtggttggtggttgctacttccagccgcgggggccggtgctgaaccgctacattccctgcgtcctccgcaagaagtgggatgattggaagagcgactggttctacacccccctcgccgacgaagcgcgcctccgacttccgagccagcctccagcgcaggcctccaactggcgggcgccggtagatctgggagatggctacgacgccgtcctcgaccgcctggcgggcctgcgatcccaggggctcacaggggccatggtgttcggcgactatcttcgtcgccggatcgcgccactccagcggcgcgcccggggcgcctgggagtacaccgggtccgaggactgtatgaggacccaccagggggtcagatgggactgggctcctgaggacttcaagatagtggtccaacgggtgctgaatctcagctccgtggaggcatccctcattcctcaaggagtcctccccctctgcagcgatccagaccgcgcctccatcctgaccatcatgcaggcggtcggggcgtcggaggagcgggctcctcgaggccacgatggcgcgggcgggagccgcagaggggaacaatctaccccgggaggggggggcggggcggcgcgtgccagcagcaggcgcccggagggggccacgccgacgtcgcagcccgagggggagcggaagaagaaacggctccgcaagacgggggggacagaaccatcccggggaaaccttatttcccctccaaggtggtcgtttaaccgaccccctcacagcgagatcccgtcgcgtccctcccgccattccaagtccggccagtctgaggccgaggacccagcgaccacagaggctcggaggcaggaatctgaccggcgagaagccgcggatcgcctacgggaagccgaggaggccgcccaggtggccgtccgagctcgccaagctaaagaagccgctcgggaggaggccagacttcgccaggtcgaggcggcgacgacttccgaggcagctcgcgacgaggccgcgggcgcatcgcttgggcccactccctcgggcgacgctcaggacaagccaggtccgggggacatccctgagtccggcacgtccatcggcgggccgagccgcgcggcatcctcaccgaggcggctcttccccacgccttccgttgctccactgagcgcagaaccccttctgcaggccttggccgtcgcaaacaccacggtgttggacgggttaagtgcccaggtggaggccctgcaagcagagcgggcggagcttgacgccgcatgggcgcgtgtcgaagaggggcgacgctcggtggaggccatggtggaggtgggccgcaaggcacaccgccggcacgtgtcagagctcgaagcccgtcggaaggtgctgggggagatcgccaaggaggtggaggaggagcgggaggctgccctcatcgccaccaccatgatgaacgaggcgcaggacaccctccgccttcaatacgggagctgggaggcggagctagggaaaaagctcgacgccgcccggggggtccttgacgctgccgctgcccgagaacggcgggcggcggagaccgaggtggcatcccggcggcgtgaagaagcccttgaggcccgtgccatggcgctggaagagcgcgccggcgtcgtggagagggacctggcggaccgcgaggccgccgttgccatccgggaggtaacgctggcggcgcacgaggccgcctgcgccgaggaggagtgcgcactccgcctccgcgaggacgcgctcaccgagcgggagcgagctcttgaggaggccgaggccgcggcgcaacggctggcggagagcgcgtccctccgtgaggctgtgctagaggaacaagcgcgccgcaatttggaaggtgcccgcgccgagaaggccgcactgaaccagcgggccgctgaactcgaggcgcaggctaaggagctggacgcgagggcgcgcagcggcggggcggccacgggcgaaagcgacttagcctcccgcctcgcagctgccgaacacaccatcgccgatctgcagggcgcgctagactcgtccgccggggaggtcgaggccctccgtttggcaggcgaggtagggcccggcatgcttcgggacgccgtctcccgtctagatcacgccggccggcaggcaggcctttggggcgggcggactgtgaagtacgccgccaaccaggggggcctcgctcagcgcctctcagagatggccgggactctccaacggctccccgaggagctcgagaggacgattaagtcatcctcgagggacctcgctcgaggagcggtggagctcgtactggcgagttaccaagccagggatcccgacttctccccatggacggcgctggacgagttccctcccgggaccgaggacggcgcgcgcgcgcaggtccgggacgccgccgaccatatcgtccacagcttcgagggttcggcccctcggctcgcgttcgccctcaactccgacgaggagggcgatgacggcggtgtgggcgacagtggcgacgaggctggcgacccgggtgcatcggagtga

SEQ ID NO: 80860 - DNA, 508 bp, Oryza sativa
  Clone ID: PAT_MRT4530_80443C.1
gggttaatttacattggcattgaggtaaatttggggcttatttattattttctactggggattgaactatttagagctatatacccgtatcgttttacagattttatatcgaatcatgatgtattgcatttagatttttttcgctaggcctaccctaggttcaaatcctgggtccggcactgcctaaattacccaaggacgcggtaaggaaattattgggctcagctattgggctttttcatgagcctgtaaaacattagtacatgctgtcacaaaaatattctattgttagggagttcggagaagaaaacaccgaaccccagactatcacagagcagactgcatgtcatgctttcttctgctcagacatcacattgatcagtatttctctcttccctaatcactcaatgacgacatgctatgtctgaattcctttttgtggagttcccttctgaggtctgaatgtattccctcggtgattgaatcgagtcagatcttagtttttttt

SEQ ID NO: 80861 - DNA, 3021 bp, Oryza sativa
  Clone ID: PAT_MRT4530_80444C.1
atggcacggggctccgctccgcttgacggtagcgtgctgccgccttcccgcatcgtgagcgagagacaggccgggctgccgcgccgcttcatgccggaatctgccaccggccgggagatagtctcgctgggcgagggatgcccggcgccacgctacccggggcggtctgtcttcttcctcccttttgctatggcagggctggttccgctattttcttctttcttcatggatgttctggagttttacgatctccagatggcgcacctcacccccaacgcggtaatgaccttggccatcttcgcgcacctgtgcgagatgttcatcggggtgcgcccatcccttcggctgttccggtggttcttcatcgtacagccggtgtcgccgccgtcggtggttggtggttgctacttccagccgcgggggccggtgctaaaccgctacattccctgcgtcctttgcaagaagtgggatgactggaagagcgactggttctacacccccctcgccgacgaagcgcgcctccgacttccgagccagcctccagcgcaggcctccaactggcgggcgccggggctcacaggggccatggtgttcggcgactatcttcgtcgccggatcgcgccactccagcggcgcgcccggggcgcctgggagtacaccgggtccgaggactgtatgaggacccaccagggggtcagatgggactgggctcctgaggacttcaagatagtggtccaacgggtgctgaatctcagctccgtggaggcatccctcattcctcaaggagtcctccccctctgtagcgatccagaccgcgcctccatcctgaccatcatgcaggcggtcggggcgtcggaggagcgggctcctcgaggccacgatggcgcgggtgggagccgcaggggggaacaatctaccccgggagggggtcgtgcttctgggccccgcgtcgggggcccggggagcggccgccctgccgacgcccgggggaagaggaagcaggaaggaacccctcccccatctcctccccgagggggcggggcggcccgtgccagcagcaggcgcccggagggggccacgccgaccgagatcccgtcgcgtccctcccgccattccaagtccggccagtctgaggccgaggacccggcgaccacagaggcccggaggcgggaatccgaccggcgagaagccgcggatcgccttcgggaagccgaggaggccgctcgggaggccgcccgggctcgtcagaccgaggaagccgttcgggaggaggccggactccgccaggccgaggcgacgacatcctccgaggcgacccgtgaaactgaccggcaagaggccgcggatcgccttcgagaagccgaggaagctgcccaggtggccgtccgagctcgccaagctgaagaagccgctcgggaggaggccagacttcgccaggccgaggcggcgatgacttccgaggcaactcgcgacgaggccgcgggcgcatcgcttgggcccacttcctcgggcaacgctcaggacaagccaggtctgggggacatccctgagtccggcacgtccatcggcgggccgagccgcgcggcatcctcttcgaggcggctcttccccacgccttccgttgctccactgagcgcagaaccccttctgcaggccttagccgtcgcaaacaccacggtgttggacgggttaagtgcccaggtggaggccctgcaagcagagcgggcggagctcaacgccgcatgggcgcgtgtcgaagaggggcgacgctcggtggaggccatggtggaggtgggccgcaaggcacaccgccggcacgtctcagagctcgaagcccgtcggaaggtgctgggggagatcgccaaggaggtggaggaggagcggggggctgccctcatcgccaccaccgtgatgaacgaggcgcaggacaccctccgccttcaatacgggagctgggaggcggagctaggaaaaaagctcgacgccgcccggggggtccttgacgctgccgctgcccgagaactgcgggtggcggagaccgaggtggcatcccggcagcgcgaggaagcccttgaggcccgtgccatggcgctagaagagcgtgcctgcgccgtggagagggacctggcggatcgcgaggccgccgttgctattcgggaggtcacactggcggtgcacgaagccgcctgcgccgaagaagagtccgcgctccgcctccgcgaggacgcgctcaccgagcgggagcgagctctcgaggaggccgaggccgcggcgcaacggctggcggacagcctgtccctccgcgaggctgcgcaagaggaacaagcgcgtcgcaatctggaaagtgcctgcgccgagagggccgcactgaaccagcgggccgctgaactcgaggcgcaggcaagggagctggatgcaagggcacgcagcggcggggtggccatgggcgacagcgacttaaccgcccgcctcgcagctgccgaacacaccatcgccgatctgcagggcgcgctagactcatccgccggggaggtcgaggccctccgcttggcaggcgaggtagggcccggcatgcttcgggacgccgtctcccgtctagaccgcgccggccggcaggtgggcctctggggcgggcgaactgcgaagtacgccgccaaccaggggggcctcgcccagcgcctctcggagatagccgggactctccaacggctccccgaggagcttgagaggacgattaagtcatcttcgagggacctcgcccgaggagcggtggagctcgtactggcgagttaccaagccagggatcccgacttctccccatggacggcgctggacgagttccctcccgggaccgaggatggcgcgcgcgcgcaggtccgggacgccgccgaccatatcgtccacagcttcgagggttcggcccctcggctcgcgttcgcccccaactccgacgaggaggacgatgacggcggagtgggcgatagtggcgacgaggctggcgacccgggtgcatcggagtga

SEQ ID NO: 80862 - DNA, 498 bp, Oryza sativa
  unsure (1)..(498): unsure at all n locations
  Clone ID: PAT_MRT4530_80445C.1
cgcacacaacacgcacgcacgcaccgcgcctccngaccagtacaagccctccacagtagtagccaccaccaccactttacacccccctcgcctccccgtccctttcgcccagcaccttgtcggagaccgacgcgcctccgcccgctcgatcgatcgaagtcggcgtcgctcgcctccactgctgctgctgctactcctcgcgccccttccttccttgcggaggcggcaacctgtgacgccacgacaccaccgggggagagctaccggagtcggcgggcgcaccggctcccaccaccaccgggggaaaagtagccgttgcggcgtcgccttttttattgttgtaggatgnaggggtgccgctcggcggtgaggtggagtnggaggtgggtnggnnanatnccnntggtgaggttcgaggtgcggantgaggtggggcttggggaccccgacctgtacggcggcggcggcggcggaggaggaggatgaggangagcacga

SEQ ID NO: 80863 - DNA, 3084 bp, Oryza sativa
  Clone ID: PAT_MRT4530_80446C.1
atggcacggggctccgctctgctcgacggtagcgtactaccgccttcccgcattgtgggcgagaggcaggctgggctgccgcgtcgcttcatgccggaatccgccaccggccgggagatagtgatgctgggcgaggcgcgcccagcaccagattacccggggcggtccatcttcttcctccccttcgcaatggccgggttggttcctcctttttcttctttctttatggatgttctggagttctacgatctccagatggcgcacctcacccccaacgcagtgatgactttggccatcttcgcgcacctgtgcgagatgttcattggggtgcgcccatctcttcggctgttccggtggttcttcaccgtgcagtcggtgtcgccgccgtcggtggtcggtggttgctacttccagccgcgggggccagtgttgaaccgctacatcccctgcgccctccgcaagaagtgggacgattggaagagcgactggttctacaccccccttgccaacgaagcgcgcctccgactcccaagccagcccccggcgccggtctccagctggcgggcgccagtggatctgggggatgactatgacgccgtcctcgaccgcctggcgggcctgcgatctcaggggctcacaggggccatggtgtacggcgactacctccgtcgccggattgcgccgcttcagcggcgcgcccggagcgcatgggagtacaccgggtccgaggactacatgaggacccaccggggagtcagatgggattgggctcccgatgacttcaagatcgtggtccaaagggtgctgaatctcagctccatggaggcgtctcttattcctcaaggactcctccccctctgctgcgatccagaccgcgcctccattctgaccatcatgatgggggtcggggcctcagaggaggtggctcctaagggccacgacggcgccggcgggagccgccaggaagaatcaaccccaggagggggccgtgcttctgggccccgcgacgggggctcggggagcaaccgccctgccgacgcccgggggaagaggaaacagggaggaacacctcccccatctcctccccgaggggacggggcggtgcgtgccagccgcaggcgcccggagggggccgcgccgacatcacagcccgagacggagcgcaagaagaagcggctccgcaagacgggggagacggaaccatcccggggaaacctgatttcccctccaaggtggtcgttcaaccgaccccctcgcagcgatgtcccgtcgcgttcctcccgccatcccaagtccggccaatccgaggccgaagatccggcggccgcagaggaacggaggcgagaatctgaccggcgagaggccgcagatcgccttcgggaagctgaagaggccgcccgggaggccgctcgggttcggcaggcggaggataccgctcaggaggaggccgcccgggctcgccaagccgaagaagctgctcgggaggaggccgcccgggctcgtcaggctgaagaagccactcgggaggaaaccgcccgggctcgccaggctgaggcgatggcgtcttccgaggcggttcacgacaagaccgccggcgcgtcgctcgggcccactccctcgggtgacgctcaggcgacaacctccggggcggctcgcgacaaggccgcgggcgcatcgcctgggcccgctccctcgggcgacgcccaggaccaaacgggtccgggggacatccccgagctcagtgcgtcttctggcgggccgagccgcgtcgcattttctccaaggcggctcttctcctcgtcttctgccgccccgctgagtgccgagccccttctgcaagccttggccgccgcaaacaccgcggtgctagatggattcagcgcccaggtggaggccttgcgagcggaacgagcggagctcgaggccgcatgggcgcgcgtcgaggaggggcggcgctcggtggacgccatggtggaggtgggccgtaaggctcaccgccgccacatctcggagcttgaagcccgcaaggcggcgctggcggagatcgcccgagagggggtccttgacgccgccgctgcccgagagcagcgagcaacggaggctgaagcggcatcccgacggcgcgaagaggcccttgaagcccgtgccatggcgctggaagatcatgccggcgccgtggagatcagcttggcggaccgcgaggccgccgccgctatccgggaggcgacgctggcggcgcacgaggccgcctgcgccgaagaggagtccgcgctccggctccgcgaggacgcgcttgctgagcgggagcgagctcttgaggagtccgaggccgcgacacaacggctggcggacagcctgtccctccgcaaggcagcgcaggaggagcaggcgcgccgcaatctggaatgcatccgcgccgagagagccgcgctggagcagcgggctgctaacctcgaggcgcgagaaaaggagctggacgcgagggagcgcagcggcggggcggctacgggcgaaagcgacttagtcgcccgcctcgcagctgccgaacacaccgtcgcggacatgcagcgcgccctggactcatccaccggggaagccgaggccctccgcttgtcgggtgagatagggcccggcatgctttgggatgcagtctcccggctggatcgcgccggtcgggaagcgggcctctggaaaggccagacaatttcgcgctctaccaatctggaaggcctcgccccgcaccttaggaggatggcctgggctgtccaacaactccccgaggagctcgagaagaccatcaagtcatcctcgagggacctcgcccaaggagcggtggaactcgtgttagcgagttaccaggccagggaccccggcttctccccatggatggcgctggaggagttccctcccgggaccgaggacgatgcgcgcgcgcgggtccgggatgccgccaaccatatcgtccaaagcttcgaggggtcggcccctcggctcgcgttcgccctcagctccgacgaggagggcgacgccagcggtgaggacgacggtggcgacgaggccggcgacccgggcgcattggaatga

SEQ ID NO: 80864 - DNA, 3474 bp, Oryza sativa
  Clone ID: PAT_MRT4530_80447C.1
atggagatggccatggccatcgacggcctcgccggcggggaggggtcggcgttggctagtgtggagattatggataccccatatctacacggcatgtatagtttggttgggtacggggtgccagatatagatagaatatctttaagaggactcggcatcgacgactgcgccttccctcccgggcaggcgttccggttcggcagcctcgacttcatcaccaacgacttcggcaagatctctctccttgactcaaattcgaaccagtcagggagagaccaggtctcagccccgttcagtattccgaactcggccaagatctaccccaagcttatctcgatcgaatcggctccaaaccactcggacaagatcccatctactccaacaccaccagatcaagatgatggggcctacccgccaatcctgatgaaactccccgacgatctggttgtcgtcttcaccacaaggacgtcttctccccgtaggcctaggcgggactcggctccagcaccgatccggcctagctccagggaagttggcgtcatactccagccactcggcatggtttcgacggatcaattggaaggctacttcagctcccccggcgtcgactcacgaccaacagagatcgtagagtatgatgaattcggctaccgctacgacaaccgcgacctcgatgacttcgacgaaagctttgaagataattacacccctctctatttcgtcgtcttcatggccgataacgagacggaagaacaacgccaagaccgagaagcggaagcacgacgccaagacgttgaagggacagcggacttccgcacccctcaacagaacgctgttgcggcgatcactctcctcgacaccctcctcaaagaagacgcactcaaccaagctgatcacgtcgtcaacatcttgaaccagaccaagaccatgattgccgcctcggtcccggttaactccggaagcatccgcacgccgactagcagccgagttccccatcttcgatctcaagactatcaccagccaagcctcagcatcgccggcgcaggatccaatcgcaggagtaggggtcacgacgagcaatctgtccattcgcctcccgaacgacacagggagcgccgagttgaacggcctcgctccccacctcgttggcgccccgtcgatcttcgtgatacaatcaatcagcgccgtgcagcacgaggctacgctcaccgccattcaccggatcgctacgacgacgacgtggatggagtagctgcctttactaatgacctgcgtcgagtggattggccaaccggcttcaagccgactggaatcgagaagtatgacggcaccactaatccggagtcttggctcaccgtctacggtctcgcaattcgcgcagtaggaggagacagcaaagccatggctaactacttgcctgtggctctagcggattctgcccggtcctggcttcatgggttaccccgtggcacgatcggatcatgggcggaactccgcgaccacttcatcgccaatttccagggcacctttgaacgccctggcacagggattcgttacgaagatctagtcggcaagttcgggcacaaacctcccaagacgatcaaacagatgttcaaaaaagccaacgagtatgccaaagccaaagacgccattatcgcatccaagcagtcgggtcccacttggaagccaaagaaagatgcgccgactacgggagggggtggaagtaacaaccacaaggaccgcaagcataagcccgaggaacttgttgcgactactacacattcctcccgacaatgttcgcgcgtcaacactttcgacaagatcatgaacttccaatgtccgcatcatcccaactccaataatgcagccaaagattgcttcgtctacaaacagtttgcagagcaatacgccaagaatgcacggaagaccttcgatggagatcaaagcacgttgaaaaagaaggatgatgacgatgatgccccgacaggttttcaagaccatcgcaaggaactcaatcacatctttggcggccctatggcttatgaatctaaaagaaagcaaaagctgaccgaacgggagattaacgctgttcagctcgatacgccccaatatcttcggtggtcggagacaacaatcaagtttgactgctcggatcatccaaaccaagtggtccgcccggggcggtaccccctagtactagacccagtggttcacaacgtcaagcttcgcagatccctcatcgatggcagcagcgcactcaatatcctcttcgccaagtccctggatgacatgcagatccctcgcaccgagttgaagccgagtaatgcgcccttccacggagtcatcctagggttatccgccacgccactcggccagatcactcttccggtcacctttagtactcgggagaacttccgcacagagaacgtctgcttcgaggttgctgattttgagacagcgtatcatgccatactcgggcgcccggcgttagccaaatttatggctgtcccgcactacacctacatgatgatgaagatgcctagtcctcgaggagtcatatccctgcggagcgacatcaaacaagccgtcacatgcgacaagggaagctgcgagatggcccaaacccgcgagatagcgatcgcccgagaagacatccgactggctgcaaccatggcaagcgaaggagaagtgcctacaaccaagatctcaaagagtggagaaagcgaagccaagaccaagaaaattcctctagatccttctgatcctactaaaactgctgtaataggcactgagttagatttcctggttcggaagaagaccgggcaatggcgcatgtgtgtcgattacaccaacctcaacaagtcttgtcccaaagatcccttcgggttccctcgcattgaccaggtggtcgactcgaccgccggctgcgagctactcagttttttggattgctactcgggatatcatcagatccgactgaaggaatccgactgcttgaagacttcattcatcacgccctttggggcctactgctatatcactatgcctttcggattgaagaatgcaggagcaacttaccaacgcatgatccagagatgttttttgactcagatcggccgcaacgttgaagcttatgtggatgacgtagtcgtcaagaccaagcagaaggatgacttgattacagatctagaagaaacctttgcgagcatccgcgctttcaagatgaaactaaatcctgaaaagtgcatcttcggagtaccgtcagggaagctgcttggatttatgatgtcccatagaggcatacaggccaacccggagaaaatcaacgccatcctcaacatgaaaccaccgagctcccagaaagatgtccaaaagctgactggttgcatggcagtgctcagccggttcgtttcacgactcggtgagtgggggatgcccttctccaagctgttaaagaaaacagataatttctag

SEQ ID NO: 80865 - DNA, 443 bp, Oryza sativa
  Clone ID: PAT_MRT4530_80448C.1
gcaaagcgaaggaatctcatttaatttccagccacgggtaagaaccaagataatcgcggtacacacgctgagataaggaagagcgtgtccacatgtagctgtcgatgagcttaccagcaggtttatgagctgtctggtgtcagtagggtgagtaattgcttgattttctttttgctgaacacttcaattaccatcaatcagctcattaattgtaccgacacgaaatggcactggtaattactgcggttcattttgacactttttgttgcttcaaaggaagaatctcgaattgctttcgcaatgtggtgttttaaattaattggcttgttccagcttcgatctttttttacaagatgccgaatcttcaaactttctaaaattctcgcgccgttatttcgccgcgacgtacgtatacacgacgacgacccctgcaaccccaaatg

SEQ ID NO: 80866 - DNA, 1612 bp, Oryza sativa
  Clone ID: PAT_MRT4530_80449C.1
ttcatcaatcacatctcattcacatttgaattcagaagatattcacatcgttcacatcagaatcacactcattcacatcagagtttggaagatacatcattcccatcagaattacctccgttcacatcagaattacctccgttcgcatcagaattcagaagaaaagttcacttcacatcagaattcagaatatggcaagagagggaccatccaatggaaggtattcagcacaaccgaattttcttttctgaggcagtagtcaagcttcggcgggctttaagaggacatgcctggggcatcgcagattgaaatgcctggagaagtcagcagcgaggaatggctcaaacctccagaatttatcctcagcaaatgcaagcatctcaggagatggatctcccatttcatcattgatatatggaaatgacattttcaaggtcattttactcatatcaattgcaaggagccatgtttcatcgtaattgtatcctgcctcctccaccatcccattctgtgccaagacaagatatataacacttgagtcatcgatgctgattagagggaactgcactcttgggaacctattggtagtgataaaagggaactcatctaggggccaaagaaaatcgggtttgagcatcgaccaaagataatcagatttgagcacggcatctttctcccacaccatcttatccatttcatccatcctcaaggtccagcaaacgatggtgaaaccagattcaggggtgtaattctcagcaatgaggccatcatcaggaaccagagagacgagcttcatgacgccattggtcacacccacggcctgacaacacccaccgaagcatgctcctctgacatccgcggggaactctaggtagtggagctgtggattctcatcaaacatgtcgcagaacaagataccaagacagtaatccacccagcacaggtagctcccgaacgggatgaccgtgtcggcgtcccagtcccagagaaatttctccagatcgagagagccgccgttcgcaggggtgatcggcggccgcttgagctcccacttgcggctggaggtagaagaacgcagcacgtggagctccggaccgacctctgacctggtgatctggagctccgccacggcgaactcctcgccgtcgcggcacaggacgccgatgtccaggcacttgagcctgcggaggtgctggttcgtgaggcggatcaggccgtccgcctccatcctggccttgagctcgtcgacggagccaccgaagggagcgagcaagtcgagcgacggcgaagagccgccggcccccgccgcccggtagagcaaatagtcgaacgccttgtaggcattgctggggcccaacgaaaccaggtaacccatctggaacaggacggcgtcgcggtgggcggcgacgacggagaagtcgtcgcaatcccctgtgccagcctcccaatccaggaagatgctggacggctccggcggcgcgcggagcaggaagcgcacgccgaccttgtcgcctctcgagttgtgcccgatcgccgcggtcggatcgtcgtcggggaacgggccgtcgcggaagacgtaggggtcgagcatgacccaatcagggaacgccat

SEQ ID NO: 80867 - DNA, 193 bp, Oryza sativa
  Clone ID: PAT_MRT4530_8044C.1
acactaaaccgacacaactaacacttaaatttatttctacctgaacagaagggggtgcagatcatacacacgcccaatcactgaaaagagctaaccatgcttgcgcactagatctttacggcaagatgatagctacaccatcacaatagcatgcctacgcgactcatgttacaccacccatttacagcactac

SEQ ID NO: 80868 - DNA, 5808 bp, Oryza sativa
  Clone ID: PAT_MRT4530_80450C.1
atgggttccgtctccggcatcgacgacttcgccttccctcccgggcaggcgtttcggttcggcagcctcaacttcatcaccaacgacttcggcaagctctctctccttgactcggattcgaaccagtcggggagagaccaggtccccgtgccattcggtatttcgaactcggccgaggcctactctaagatcatctcttccgagtcggcttcaaaccactcggacgagatccaatctactcctccgcgaccagatcaagaggacgggttctatccctcaatcctgatgagacttcctgatgatttggccgctgtcttcacagccaagacatctcccactcgaagatctagacaagctccggcttcggccccgatccaatctagatccagagaggttggcgttatactccaacctcttgggacagtctcaacggaagagttggatggctaccttagctcccctggcgtcagttctcgaccaaccgagatcctcgactgcgacgacttcggctactaccacgaccacggcgacttcgacgacagctatgaggataactacacgcctctctttttcggcgtattcatggctgacaacgaaacggagggacagcgccgagcccgagaagcggaggaagaacgcacacgacaagaaaccgaacgtcgccgactggaggaagaacgacaacgacaggagcgagaacgactacagtgtgagcaacaagatcgcgagcaagttgcaaaggaagctgaagatcgacggcagcgcgccttggaatccgagcggcgagcaagagatctcatcgggcaacaagatgtcgatggaacaatggttttccgcaccccccagcaaaacgcggttgcagcaatcactctcctcgacaccctcctcaaggaagacgcactcaatcaagctgatcatgttgtcaacatcttgaaccagacgaagaccatgatcgctgcctcggttccagccaactccgcaagtgcccgtaccccgactggtagccgagtccctcatctccgatctcatgattatcatcagccaagcctcagcatcatcggcacaggatctagtcgcaggagcaggggccacgacgaacgatccgttcactcgcctcccgaacgtcacagggagcgccgagtcgaacggcctcgctctccacctcaccagcgtcccgtcgatcttcgcgacacgatcaaccagcgccgtgcagcacgaggtcaccgccattcaccaaatcgctacgacgacgatatggatggagtagctgccttcactaatgacctacgtcgagtggattggccagccggctttaagccgactggaatcgagaagtatgacggcaccactaatccggagtcttggctcaccgtctacggactcgcaattcacgcagcaggaggagacagcaaggccatggcaaactatctacctgtggccctagcggattccgcccgatcctggctccacggactaccccgtggcacgatcggatcatgggcagaacttcgtgatcactttatcgccaacttccagggcacctttgaacgccccggcacacagtttgatctctacaacgtcgttcagaagtctggagaatcccttcgagattacatccgacgcttctccaagcaacgcaacaagatctccgacatcaccgacgacgtcatcattgccgcctttaccaaaggcattcgccatgaggacctagtcggcaagttcggacgcaaacctcccaagacggtcaagcagatgtttgaaaaagccaatgagtatgccaaagccgaagatgctattacggcatccaagcagtcgggcaccacttggaagccaaagaaggacacgccgaccgcaggagagagtggaagtaacaaccgcaaggattgcaagcgtaagcccgaagaacttgtggcaacaacgtctccatcttcccgacaacgtccccgcgtcaacacattcgacaagataatgaactcccaatgtccgcatcatcccaaatccaaccacgtggccaaagactgcttcgtctacaaacaatttgcggagcaatatgttaagaatgcacgtaagccctcagacggagagcaaggcacatcaaagaagaaagatgatgaagacgatgccccaactggttttcaagaccatcgcaaagaactcaatcacatcttcggcggacctctggcttatgaatctaagagaaagcagaagctaacagaatgggagatcaatgcggttcagcccaacacgccccaataccttcggtggtcagagatagcaatcaagttcgaccgctcggatcatcccgaccgagtggtccacccggggcggtaccccctggtactagacccagtggttcgcaacgtcaagctccgaagaactctcatcgatggtggtagtgcacttaacattcttttcgctaagaccctggacgatatgcagattcctcgcacggaattaaagccgagtaatgcacccttccacggtgttatcccaggattatcagctacaccactcggccagatcactcttccggttaccttcggcactcgggagaattctcgcacaaaaaatgtttgtttcgaggtcgctgatttcgagacagcgtaccatgctatactcggacgaccagctctagccaaatttatggccgtcccacactacacctacatgatgatgaagatgcctggtcctcgaggagtcatatcactatggagcgacatcaagcaagccgtcacatgtgacaaagaaagttgcgagatggcccaaatccgcaagatcaccctcgctcgcgaagaaatccgactggatgcgaccacagcaagcgagggagaagtgcctgcaaccaagctgacgaagaccgaagaaagcgatgctaagacgaaaaagattcccttagatccctctgatcctgataagactgctgtaataggcgctgagttagattatatctttgcatggaaaccatccgatatgcctggtattcctagagaggtgattgagcactctttacatgttaaggaagacgccaaacccatcaagcaacgactccgccgttttgcacaggacaagaaggatgcaatcaaggaggaattaaccaagctgttagcagcgggcttcattaaagaagtccctcatcccgactggctggctaacccagccctggtttggaaaaagacggggcaatggcgcatgtgtgtcgattataccgacctcaacaagtcttgtcccaaagatccttttgggttacctcgcattgaccagatcggccgcaatgttgaagcttatgttgatgatgtagtcatcaagaccaagcagaaggatgacctgatcgcggatttaggagaaacttttgcaagcattcgtgctttcaggatgaaactaatccctaaaaagtgcatcttcggagtaccgtcagggaagttgctcggatttatggtatctcaaaggggcatacaggccaacccggagaaaatcaacgccatcctcaacatgaaaccgccaagctcccaaaaagacgtccaaaagctgactggttgcatggcggcgctcagccggttcgtctcacgactcggcgagcgggggatgcccttcttcaagctgctgaagaagactgacaattttcagtggggacccaaagcacggaaagcctttgaagacttcaagaaacttctcaccactccaccagttttggcctcgccacatccacaagagccgctactgttatatgtgtcggtgacctcccaggtcgtgagtacggtcctggttgtcgagcgtgaagaggaaggccatattcaaaaagtccaacgaccaatttatttcgttagtgaggttttggccgactccaagacaagatatcctcaggttcaaaagttattatatggtgtcttaattaccgtcaggaaattatctcactactttcaaagtcactcggtcacggtggtcacatcgcttccactcgaggatatacttcataaccgcgaagcgaacggacggattgcgaagtgggccttagaattgatgtctttggatatatcgttcaagccacgaacttcgatcaagtcacaagctttagctgatttccttgccgagtggaccgagtgccaacaagatatgccaggggaaaagatggaatattggactatgcattttgatgggtcgaagaggcttacaggcactggagctggggttgttttaatctccccggctggagaaagactgagctacgtattgtggatacatttttctgcgtcccataacgtggcggaatacgaggcgctgctccatggattaaggattgccatttctctaggcattcgccgattaatcgtccgtggagactctcagttggttgttaatcaagtcatgaaagagtggtcttgtctagatgataatatgaccgcttatcgacaagaggtacgcaagttggaagataaattcgatggactcgaattcacccatgtcctccgacataataatgaggcagcagacagattggccaattttggttcaaaacgggaagcagctccttcagatgtgttcgtcgaacatctttacgaaccaaccgtgcccagaaaagaaacaattcaagctatggacactcaaggcgtaagcatgatcgaagccgactggagagaaccttttataagatttttgaccaaacaagaactccctcaagacaaaagtgaagccgagcagatttccaggtgcagcagactttacgttattcacgagactgagctgtacaagaaaagttcatcaggaatactgcagcgctgtgtgtctttggaagaagggagacaattgttgaaagatatacattctggtatttgtggtaatcatgctgctgcacggaccattgtcggcaaagcttaccggcaaggtttcttctggcctacagctgtgtctgatgctgacaagattgtgcggacatgcgaaggttgtcatttttttgccagacaaattcatctgccagcccaagagttgcaaaccatcccgttgtcctggccgttcgcggtctgggggcttgacatggtcggaccgtttaaaagggcagttcgcggttacacgcatctctttgtggctatcgacaaattctctaagtggattgaagctaaactggtcatcacgatcacagcagataaagctagagattttttcatcaacattgtgcatcggtttggggtacttaatcggatcatcactgataatggcactcaattcactggcggagcatttaaagacttttgtgaagacttcggcattaaaatttgttatgcctccgtggcacaccccatgagtaatggacaagtcgagcgcgccaatggcatggtacttcaagggataaaagcacgagttttcgaccgactgcgtccctatgctggcaagtgggtagatcagctgccgtccgtactttggtctttacacactactcccagtcgggctaccggccagtcgccattctttttggtttatggtgcagaagcaatgttgccgagtgaagtggaatttgaatcactacaatttcggaacttcaacgaggagctctatgaagagggccgagtagatgacatcaatcgactagaagaagcccgtgaagcagctttaattcaatcgactcggtatttgcaagggttgcgccgttatcataatcggaatgttcgatcgcgagcctttttagtcggcgacctggttctgaggaaaatccaaaccacacaggatcggcataaattatctcccttgtgggaaggaccgttcataattgctgaagtcactcggccaggttcttatcaacaattcttggaatattga

SEQ ID NO: 80869 - DNA, 3090 bp, Oryza sativa
  Clone ID: PAT_MRT4530_80451C.1
atggcacggggctctgctctgctcgacggcagtgtactgccgccttcccgcatcgtgaatgagaggcacgccggactgccgcgccgcttcatgccggagtccaccaccggtcgggagatagtgatgctgggcgaggggcgcccggcaccagactacccggggcggtccatcttcttcctccccttcgcaatggctgggctggtcccgccattttctcatttcttcatggatgtcctggagttctacgatctccagatggcgcacctcacccccaatgcggtgatgacattggccatcttcgcacacctgtgcgagatgttcattggggtgcgcccctctcttcagctgttccggtggttcttcaccgtgcagtcggtgtcaccgccatcggtggttggcggctgctacttccagccgcgggggccggtgttgaaccgctacatcccctgcgtcctccgcaagaagtgggacgactggaagagcgactggttctacacccccctcgccgacgaagcgcgcctccgccttccaagccagcccccggcgcaggtctccagctggcgggcgccggcagatctgggggaggagtacgacgccgtcctcgaccgcctggcgggcctgcgatcccaggggctcaccggggccatggtgtacggcgattacctccgtcgccggattgcgccgctccaacggcgcgcccggagcgcctgggagtacactgggcctgaagattacatgcggacccatcagggaaccagatgggattgggctcctgaggacttcaagatcgtagtccaaagggtgcttaatcttagctccgcggaggcgtctcgccttcctcaggagatcctccccctctgcatcgatcccgaccgcgtctccattctatccattatgctgggggttggggcctcagaggagagagcccctaagggccacgatggcgcgggcgagagccgccgggggaaacgatctgccccaggagggggtcgtgcttctgggccccgcgtcgggggctcggggagcagccgtcctgccgacgccccggggaagaggaagctgggaggaacacctcccccatctcctccccgagggggcggggcggtgcgtaccagcggtcggcgcccggagggggccgcgccgacgtcacagcccgagggggagcgcaagaagaagcgcctccgcaagatgggggagacggaaccagcccggggaaacttaatttcccctccaaggtggtcattcaaccgaccccctcgcagcgatgtcccgtcgcattcctcccgccaccccaagtccggccagtccgaggccgaagatccagcggccgcagaggagcgaaggcgggagtctgaccggcgtgaagccgcagcccgccttcgggaagctgaagaggccgcccgggaggccgcccgggttcgccaagcggaggaagctgctcgggaggaggccgcccgggctcgccaggctgaggcgacagcgtcacttgggcccactccctcgggcggccctcaggcgacatcctccgaggcggctcgcgacgaggccgcgggcgcatcgcctgggcctacctcaccgggcgacgcccaggaccgaacgggcccgggggacatccccgagctcagcgtatcctccggggggccaagccgcgtcgccttttctccaaggcggcttttttcctcatcttccgtcgccccggtgagcgccgagcccattatgcaggccttggccgccgcaaacaccgcggtgctggatgggttcaacacccaggtggaggccctgcgtgcagaacgagcggagctcgaggccgcatgggcgcgcgtcgaggaggggcggcgctcggtggacgccatggtggaggtgggccgtaaggcccatcgccgccacatctcggagctcgaagcccgcaaggcggcgctggcggagatcgcccgagaggtggaggaggagcgagaggccgccctcgtcgccaccaccgcgatggtcgaggcgcaagacaccctccgtcttcagcacgcaagctgggaggcggagctgaagagcaagctcgacgccgcccaaggggttctcgactccgccgccgcccgagagcggcgggcaacggaagccgaagcggcgtcccggcggcgcgaggaggcccttgaggcccgtgccatggcgctggaagaacatgccggcgccgtggagaggggcttgatggaccgcgaggccgccactgctctccgggaggcgacgctggtggcgcacgaggccgcctgcgccgaggaggagtccgcgctccgccttcgcgaggatgcactcgccgagcgggagcgggctctcgaggaggccgaggccacgacgcgacggctggcggacagcctctccctccgcgaggcggcgcaagaggagcaggcgcgccgcaaccttgaaagcgtccgtgccgagagagccgcgctggagcagcgggctgccaacctcgaggcacgggagaaagagctggccgcgggggcgcgcatcggtggggcggctgcgggcgaaagcgacttagccgctcgcctcgcggctgccgaacacaccgtcgctgacatgcagcgcgcgctggactcctccactggggaggccgaggcccttcgcttggcgggcgagattgggcccggcatgctttgggacgcggtctcccgcatgaagcgcgccggtcggcaagcaggcctctggggaggccagacgacggtgccccccaccaatctggaaggcctcgctccgcacctcaacaggatggcctgggttctcgaacgactccccgaggagcttgagaagaccattaaggcatcctcgagggacctcgcccggggggcggtcgaactcgtgctggcaagttaccaggcccgggatcccaacttctccccatggatggcgctggaggagttccctcccgggaccgaggacgaggcgcgcgtgcgggtcggggatgctgctgaccacatcgtcaatggcttcgagggctcggcccctcggctcgcgttcgcccccagctccgacgaggaaggcgacaccagcagcgaggacggcggtggcgacgaggccggcgacccgggcgcatatgaatga

SEQ ID NO: 80870 - DNA, 469 bp, Oryza sativa
  Clone ID: PAT_MRT4530_80452C.1
cttgggtcggacgtgatctacagcgaggaggcagtggatgatctgctgctcaccctcaagcacctctcagcccctcacaccaccatcatcctcgcagcagaactccgcaatgatgctgtactggagtgcttcttggaggcagcaatggcggacttccaagtcggctgcatcgagcaacagcaatggcacccagatttccgctctacacgtgttgccttgttcatcttgctcaagaaaccaccttcccaaccggacgtgctgctctagctccaaattttgggcgtccctcatcgaaagctgaattgtagcggagtaccagcatttactccatcctttgttctggactctggagtttaattttacaccttttgcatgtatggaattagggggtcaaaactgtacgcttttgttttctcctattgattacgtgcacttcggaaatgaaaaaaaaaaaaaaaaaaaaaaaaaa

SEQ ID NO: 80871 - DNA, 239 bp, Oryza sativa
  Clone ID: PAT_MRT4530_80453C.1
ggccaccgccggcgagaagggcgccttggcggcgctgaccccctccgcctcttcccgcgcgcggccccgccagccggccaccgtctcgggtcaaatcgaatcgaatcgaatccaaagaggaaaatctggggttcagttgaaccctaatgcccccaggttaggtcagcctcgctgggtatcgcggctgctgaggtttacttggagaggggtaagggtggaattccctcggagggcctgat

SEQ ID NO: 80872 - DNA, 552 bp, Oryza sativa
  Clone ID: PAT_MRT4530_80454C.1
atggagggagttgacgtgaaggcgccgcggccaggctgcggcggcgacgacggcggcgcggcggcggcgtcgttgtcggcgcggcgggaggaggaggaggagggggcggtggtgggcggggaggacgagcaggtggagaggttctacgcgctgctggccaacatccgggcgttgaggggcatgtacagccggtacaacggggaggagggcgccgccggcggcgatggcgacggggcgagcgggaggaagcgggcgaggcgcgcggagccgccgtggaggccggcgttcaggatggaggacttcgagttcgaggaggccgccgccggcgccggcgacgacgacgcggcgtgctccggcaggacaacgaagaagcagagatcaggcggcggcggtcacggcgccgccgtggagaagcggcggacggagaaggaggctgccgccgccgccgccgaggacgacgacgacgagcaggagggaggcgaggtcgtcgaagggaaggaggaacaccgaccgggccgccgcgtcgaggcccacgggcccactgaccagtga

SEQ ID NO: 80873 - DNA, 2045 bp, Oryza sativa
  Clone ID: PAT_MRT4530_80455C.1
gtcagagcgtgcaaagcccaaatgaaagcccacaacctggatctggaatgtactccagtattgttttgttgggtcggcggcggcgggtgagagtggagaatgatgatggctctccgccgcgccgtcggaattggctccgccgccgccctccgctctgccgcctacctccgccgcgcctccccctcgccggcgcggccccatcccctcgtccctccaccgcctgccgcccgaaccttcgccgccccgccccaggtgatgaagaggagcaccaaggacgacgacgacgatggccctcggatcaacaacgacatcacctctccctttgttcgactcgtcactgaccaaggccatagtgttgtccccaggcacgaagctcttcagcttgcggccaggatggacttggacttggtcgaggtccacagaaaatcagaccctcctgtctgtaaaatcatggattttcacaaagagaagtataagaaagacgttaaggagaaagaacgcctaaaaactaagtctgctattgtcttacgcggtggggagaacaaagaagtgcggtttaagggtaaaacagaactaaaagacttgaaggtgaaagcagatggaatcaccagattaatggagcgaggttacagggtgaaggtcttgaatacaaactctaaaattattttaaatgtgttcctatttggcagtgcatggcgatgccctcagatacaagatgtctgcatagtggaaagtggcccacatttggactcgaagcatgcatacgttattgttaggcatgtgaagtttgcaacaaagaaagctggaaagaaagctagcaaggccatagaagatgtaggcaaaggtgcccgcaagaatgcctctgaattgtcaactgttactgccgatagtggagatgagacaaatgattgtggaaatggggccatctcagatcaaatggacaacgctcctgcttacgtctccaatgaattttccatgcagaaagatgcacatgatagaggctctagaagggagttgagttggtcgaaatcgaacccgggcaactacggtgaaaacatgcaaaatgttgatgctggggcacacagaattagctctagtcagcgggcagcacaaacctcagagggtgggtttggttccaataatgtaaaatctggtatggaaaagcaagaaaaggctaatgaagatgtggtacctgcagaaaccaacagatacgccagccgaagacagcagataagaggagataaccagggtttgagccaagatagatccccgcaaggtcatagaaggaatgaaaatgaagttcgctatccggtcaatgactaccaaagacctctgcagcagaacaaccgacaatcaccaaggttcaacgatggtagattaccacaagaaccaagaagaaatgaaaggggaggccatattccgttgaataacaaacaaggccaatttcagcaaatgaatcatcctgctgaatcagcgggtaatggtgcaggctatcctactccgacggccaagagttttggagttttcagtaccagaaaacctgctacgtctgagttggggaaaacaaatggtgctagtaggactgctaattctgatgtacctaaaagctatggaatctttagttctcctagaagggaatctggtgataaaagctcatgaatgaaactatcagcagataagcctataaacagcaggtttacatcaaagtttgtcgtatttggaattggcccaataagcctcgaaatgtaaggatcagcatgtgggtctcatgtttcagtttttgttgatcattgactattattcattcagcctgagcatatttacgtggcggtggcacggtgagaaagccaactgcaagcttgagaggtactgtactactcctatttgttaagtagcttttgggtccacttgtattgttatcatttgattggaagaatcacccctgtttagactagaatagcccttttacttgtcaggttgatcgaatagtgaaaaataatgtcatgagtggtcggatccatttgattgtgatagcattttttact

SEQ ID NO: 80874 - DNA, 765 bp, Oryza sativa
  Clone ID: PAT_MRT4530_80456C.1
atgaagaagaccatcgtgctctaccccggggtcgccgtcagccacttcctccccatgatgcagctcgccgacgagctcgtcgaccacggttatgccgtcgccgtcgcgctcatcgaccccgccttccagcagcacaccgccttccctgccaccgtcgaccgcgtcgtctcatccaagcccaccgtacgcttccacaggctcccccgcgtcgagctccctcccgccaccgccaccgacgacggcgacttcctcctcctcgggtacctggacctcgtgaggcgacacaacgagtgcctccatgatttcctctgctccatgcttcccggaggcgtacacgccttcgtcgtggattctctctccgtcgaagcgctcgacgtcggcgagaggctcaacgtccccggcttcgtcttccacccggcgaacttgggcgcctttgccatcttcctccagcttccttcgatccgtgcagagggtgagccgagcttcagggagctaggagacaaccctctcgagctccctggcctccctcccatgccggcatctcacctcttctcccaatttctcgaacacccagagagtcaagtgtacaaggccatgatgaaccttgactccaagctgtggcagaaggaaagcgatgccttaactcctccagatcttcccaagaagtggtggaagacgaagtaccagaccaacgaactaaagcttgaacaatcatcttatcaccacgacgacgtagccgctgttgcagaacctctactggagtag

SEQ ID NO: 80875 - DNA, 187 bp, Oryza sativa
  Clone ID: PAT_MRT4530_80457C.1
gggaacgctgtccgcccgcacgtaccgcacccgtattcacggaacgaccaaagcattcgagcacgccatcaaatgaactggagacaagattcaagcactgcacgtatacatctgctaactaaaataatggactgaacttatacatgattaagtcgggtgatctcactatggcagaccagctttatgc

SEQ ID NO: 80876 - DNA, 231 bp, Oryza sativa
  Clone ID: PAT_MRT4530_80458C.1
atgaccgtccattgcgtctacgaaggcacgcaacacgcgaacgaagaggaagacgagccgacgcggacgaacagggagcagtcgcgcaaagcacttcccaaaaaccttattgccaccttctcccggtgcaggagtcgaaggcagagattccggagacctgctctcccgatcgcagggtcgcttgatcagggcgcccgtacgatctccactgcgcgtaaccttaccggataa

SEQ ID NO: 80877 - DNA, 612 bp, Oryza sativa
  Clone ID: PAT_MRT4530_80459C.1
gctagtgaacgtgcatagagaattcggcaagctagagatatgacagtatatagactgattataagtggaatgctagaggagtaagtctatatcattggcaaatacacgagcattttctgaaatacaaagtactgaaaggcactcaccagaggagttcttttaaagccagcaacatgatgaatttattcacgctgcaagactatgacagtaaaggtttgatttaaacatccaatattttcagccaattttctgaagatttgaataccaagcatcctaatgactagcaacaagattagttataacctccgggacaggaccaaattcatccaggaattcaaagggtaaaatataccatagctctgcccaagtgcatgaagaatccagcattttgaagggtctttatgatgctcagggattcatgtaagcaataattttgcgatcaatcatgaatgccaacgacgaccagaagctgcacctagagacagaagcttcacacgccaaccttggatgcttggaagttgtgatagtttttctgcacctacatgaactggaagagctgcccgatacagcgtacatgaatcagttaactatatattcatctatatactgcgc

SEQ ID NO: 80878 - DNA, 376 bp, Oryza sativa
  Clone ID: PAT_MRT4530_8045C.1
cttcttccattgctccggcaagatcagctagcttagctcgatctagcaatgaatactaccgtgtaaatatgaaccacaccggccggatcgagattcatcgattgatcatcttgatcgtcggagctagctagcggcgcatgcgcagattagcgcgcgccctagctagaggtagacgaagacgaaggcgaagtttaattaatttggagctatagctagctagcttagctggtgtcgttgcatgtatgctgttttttttttttttggtgagtgatgagttcgaacgaactgaatcatcatttactcattatttttttggtctcgttgtacatgcaaattaaggtaatgaatgaccggccggctaattaaaaaaaaaaaa

SEQ ID NO: 80879 - DNA, 539 bp, Oryza sativa
  unsure (1)..(539): unsure at all n locations
  Clone ID: PAT_MRT4530_80460C.1
gcacgaggggagctcaatgcgcgcggttttgagaaacaagatgtcatcaatacaaattgttctcgagaacatgctccaagaactccgagtttggaggggcactgggtcgtcgaagtgcaaaaccattatgcaagatctaaatctgtaaaaggaacaaaaaaatatctttggagcctgtgtgctcccagttttcttgttgtgtaatcaacttaatttctgctctaatggaatgacatgcaaagcttttgtgtgcccccctgcaaaatttttattatactcatcccctgaaggcctgatcctaaaccaaacacagatagcactatagtgcaaatatgcaaaaacaacatcccttacgatgtattcacaatgatcaatagcagtacttagtanatgaacactgataacggtattaatgtatgcaagaaaaagggtccaatgtggctgcattccagataaaggaatggaaattgcaaatcaggctttacaagcatgccctacgttatctcttcctgaatggaaattgccaatgggatatagta

SEQ ID NO: 80880 - DNA, 271 bp, Oryza sativa
  Clone ID: PAT_MRT4530_80461C.1
ccaacacaagacccaaatgaatacggggtttcatttataaatgaatgccaccaccatctcagaaagatcctcttcatataacatcctcctattcgcgaagctactacaacctccatattcgataagattcacacctgatccacaaacaccaaagcaacttgaattcaccataaaacccagaggcagtacgtatctcaaataataccaagagtcattagcccatgcaaattttacatatgtgctaatctgaataagacaaccacacgtatta

SEQ ID NO: 80881 - DNA, 496 bp, Oryza sativa
  Clone ID: PAT_MRT4530_80462C.1
gtcaaattgtcaaattaagtgctatatatgaagttaaaactaaattcctagttcctccctttccttgttaccatcattgcccaaagattaaaaaaaaggctaaatgtgacgacattttttcatgacaagcggaagaaatgggcacgccttttgcatcaatgattgtgttcggagaggcatctttttatggaatgacgttcattagctcaggcatgtagaagtatgcagctgctgcctagtaattttgttagggtgtttgtactcacacgtccatttcaatttctaccgttgacatgttacatatctcattattagaagtacagtacttatgtacattgtacaccggactggaggtcttggatctcccactctctctagtgtagcaaggtatgtacgcatgtgtccatcagtccatgtagtgtgggtgggctatgtatgtgtcatcagtattaaaaaccagtaacggcatatataccagtcggggctgttttagtcc

SEQ ID NO: 80882 - DNA, 324 bp, Oryza sativa
  Clone ID: PAT_MRT4530_80463C.1
tcctcgcaaaatagtacaatagtttatagtatacttcatgtcgccatcgtcgttgcagacgaggcagcaacaaccttccatagtttcatggtcaaaaaagaagcactgaagacatcgttgccagggccaatcatctgcttcagcgatcgatgtatctacagcggctgccagggatagtacaggttgggcccggagggcgcactgcgtgtgccatcggaggcggcggcggtggaggcgttctgtggcggaccgtgcctggtgcttggctgcgtcgatgccatcatggacaccttccgcctcgctgcaggtctgtgtgtcgcggct

SEQ ID NO: 80883 - DNA, 296 bp, Oryza sativa
  Clone ID: PAT_MRT4530_80464C.1
gaaaaagtacgaattacccccccgaactatcgcggtcgtccgaattacccccctgaaccacaaaatcggacattcttcacccctccaactatgcaaaccggacgaattaccccccttgacccaatccacagtggttttggtttacgtggcgtacacgtggcaatccacctctccggcttcttgttccttcagccacagtacgccgcagctagagtgccgcggcgaccagcgatgccactggtgcgcccaccgccgccatgatcatcaccaccatccaccggtcattgctcctcctc

SEQ ID NO: 80884 - DNA, 509 bp, Oryza sativa
  unsure (1)..(509): unsure at all n locations
  Clone ID: PAT_MRT4530_80465C.1
tttgtttttttttttttttttgttttttttttgagacatattcttagatgatcacaaaattgatgcgaaccacatgaagccagaaacagttttaccatactatctttaacctgaaggctcaggcagtcaggctagtaagctaacaaaaacaaaagatacaacttttgaagacacctttagggcacacaaaaggagaacattctgcggtaaaagggagatcttataaaggactacaaggctaccaaaaacttgacaggggcatagttcttctgccagcagataaactatcagattggcccagttaatcaacacaatgaacatcacgacactgtcgatcaaccaatattacaagcatcttttaggagatagagaataaaacctatacccttaatctgggccttctgttctccttatcaccatttgatttcttcacctggctggttttctccccaacatcactcaccacctctntcttgcccttctttttcttgttactggctttcttcaca

SEQ ID NO: 80885 - DNA, 6196 bp, Oryza sativa
  Clone ID: PAT_MRT4530_80466C.1
atgggcgacggcgagcgccgcgaggacgagaacccgaccaccagtgccgcagatgacgatgatgatgaggattatgatgaacctggtggagggaatcacttcttgggcttcatgttcggcaatgttgatgattctggtgacttggatgctgactatctcgacgaggatgcaaaggagcacctttttgcactggcggacaagcttggcccatctttgaaagacattgatctgatcaagccttctgcagcaccaactgatccttctgagcaagactatgatgcaaaagcagaagatgctgttgattatgaagatattgatgaagaatatgatggacctgaagttgaagcagctacagaggaggaccatttgctatccaaaaaagattacttctcttcaaatgcagtttatgcttcggtcaatagtaaagtttcagtgtttgatgaggagaactacgatgaggatgaagaaccaccaaatgataatgatttgcctagtgataatattgtgcaaaactgcacttcagcttcagctgagcaactggatatggcaccgtcaaatgacaaccttgctgttgaaaagatgtctagttcgttatcagaaccagaagaaagttttgaaagtgaagcttttcagaaagaaatggttgctgaagagcaacttgagtctaaaactgcaacttccctcccagttttatgcatagaggatgggagtgttatattgaagttctctgaaatttttggagcccaggagcctgtaagaaaagccaaaatggaccgccataagcgcccagtgaataaagagctccagattacaaatttcacagatattgttgaagaagacgaggaggtatttctacgcagcactattcaaaatttgtcagctttgaagcatatcaagacgaacgataattttgttgagagtgacagtgatgagtcaacttcagatgttgccttaagactgaaagactcgtgcctttccgaacaaccgatgaaagataaagatattcctactgctgtacaatctccagttttccctgatttttatccactcgagcatgaaaattgggaaaatgatattgtttggggcaattcaccaacaaccgcaattcagccttgcttaacaagctgtgcaatatccaaagaaagcttggatgaccacaatgaagaccaggccgagggttatgtctctgggtgttgggatgtacagaataaatttcatagttcttcagtaatggcagatccttttgggcatacagaaatacctgattcaactagttaccgttcccctgagaacagctattctccattaagaaaggagactgctcaggagaataacagcttagatgaaccaaataacataactcaaccggttaaaatcgacaccacacggcatttaaacaagctctctttactgaacaaggagttgttagaaggatcttggttggataacatagtttgggatcccagtgaggatgtaccaaagcccaagctaatctttgaccttaaagatgatcacatgctttttgaaatattagatgaaaagaatggggatcacctccgctctcatgctcgtgccatgattgttactcggccaatgaaaacttcagcagtggaaaatgttgaccataacaatcaagcaattgcattgagtgggagattcaacatttccaacgacaaattttattctaacaggaaaatgtcgcagcaagctagatctcatgctaaaaagcgtgctacaatgggcttaaagttggtacattctgttcctgctcagaagctccagaccatgaagccaaagttgagcatcaaagaaatcgcaaacttccatagaccaaaagctaagtggtatccacatgaaaataaacttactgctagatttcaaggagatgagtgcagtcatgggccaatgactgctattgtgatgactttgggaggaaaaggagtcaaatttctggtcaatgcagaggaaactccactttctgtaaaatcaaaagcttccaaaaagcttgaatttaaaccttctgagaagatcaaattgttctgttctggaaaagagcttcaggatgacatctccttggctatgcaaaatgtgcgaccaaactctattctgcatgttgttcgcactgaaatacatttatggccaaaagcacagagattgcctggtgagaataagcctctacgtcctcctggtgcattcaggaaaaaatctgacttgtctgttaaggatggacatgtatttttgatggaatactgtgaggagaggcctttgcttcttgcaaatgcaggaatggctgcacgactgtgcacgtattaccagaagacttcaccttctgaccaaacagctacatccctgcgaagcaacagtgatggactgggtacaatgcttgctattgatcccgctgacaaatctccttttctggggaacattcgttctggctcccaccaatcatgtcttgagacaaatatgtacagagcacctgtatttcctcataaggttgcgacgacagattatcttttagttcgttcacccaaagggatgctttctcttcgtcgcattgacaagttgtatgctgttggccaacaggtgaaaaagtcagtctcctggatttatcacagattgactagaagggcaactaatttcaaaattttattctcctggcaggaacctcatatggaagtattttcacctgggacaaaaaatatgcagaattatattctgaatcggattcttgtgtatgtatatcgtgagttccgtgctagggagaagcctggtattattcctcagattcgagctgatgaattacctattcagcctcctataacagaggctattaaaggaccaaagggacatttgttctatattcagagacctgattttcggattccatcggaggaagaactgagaagattattgacacctgaaaatgtctgctgttatgagagtatgcaagctggccagtatcgtctcaagcacttaggaattgagaagcttactcagcctgtgggacttgcatctgccatgaatcagcttcctgatgaagctattgagcttgctgctgcagctcatattgagagggaattgcaaatcactagctggaatcttaccagcaattttgttgcttgtacaaaccaggacaaggaaaatatagagagattagaaattactggtgttggtgatccatctggccgtgggctaggatttagctatgtacgagtaactccaaaagcacctgtatccaattcaacacataagaagaagtcagctgctgcaaaaggcaccactgtgactggaacagatgctgatctccgcaggttgagcatggatgcagctcgagagttgctactcaaatttggcgttccagaagagcaaattgacaagttaacaaggtggcatcggatcgcgatggtgaggaagctttcaagtgaacaagctgcatcgggtgttacaatggatgaaattccagttagtaagtttgcacggggacaaaggatgtcttttctgcagcttcagcagcaaactaaagagaaatgtcaggaaatttgggacagacaaattcagtcactttcagctatggacggcaatgaaaatggcagtgacacagaagctaacagtgatcttgactcatttgctggggatcttgaaaatttgctagacgcagaagaatttgatgatgaagatgttggtaatacagacataagaagcgataaaatggatggaatgagagggcttaaaatgagaaggtgtcatactcaatcccaaattaatgaggaaattcaagatgatgtagcagaggctgctctagtagaaaaactgcttgaagagagtgatagtgatatgaagaggaagaagcagcctgtggaaactacaaattatagcactcctatgtataatcagggcaataaaatgaagcagggtaaggctggccaaatgattaaatcgtctgtatatgccggtgcattaaccccaaaagagagcataccaagagaagccaaggaggttgaaaattttgctgaaggaagtttaccctcaaaactaagaacaaagacaggatttgatgcaaatgatgatattattctagtaaaaaggaaaaatatcccaggaaaggatgggttcaaggaaaagagacagggtgcaaggggagacactcttgtatgtggagcttgtggtcagctcgggcacatgcggaccaacaaactgtgccccaagtacggggaggaccctgaaacatccgaaatggatgtcaattccatcaggtctcatcctcctgatattgtgagtaatgctcaaataaaaacatcaaacaagaggttggtagcaaaagtttcgtctgaagcttttgaaactgaaggacctgaaagtattgaaaaggctaaacctgtccctgtaaaattcaaatgtggagcacctgagaagtcattggataggaacatgtcaatctcagcttctttggtttctgataaacgtatgatggatgctacagattcgaaatcaactggaaaggttaataagattaaaatatctaacaagataaaatatgatgattatcctcctgatactcctaagccatctgttgtaataaggcctcctgctgaagtggagaaggatctacctcgtaagaaaattattatcaagcagcccaaggtgcttggagatcagcaaagacctactgaacttaggagtggtcaggagcccagaaagacaaggaaaattgttgaattgtcaagctttgagaagagagacagagaggatgataatggtttttctggacaacctattcagatcaattcctcacatgatagggggtggggtctggtgggaaaaagaagcaaaggaataatggaaagtagtgaatcctggagagcttttgaggagcaacgagagagacaagaacagagactaattgaagctaggatatatgatgcaaggagagaggatgagctccagaaggcaaagaagaaaaacaagaaaaagaaaaaacatgaatttcgagatgatgacctacttgatcctaggccatacaaaaatgacagaagggtacctgaaagaggtcgagcggcaaagagacgtaccccagctgatatgacagaatacacaccaccagctaagcggcacagaggaggagaggttgagctctccaacatattggaaaaaatagttgaccacttgcggacaatgagctgttcattccttttccgtaaaccggtgacgaagaaagaggctcctgattactttgacataattgagcgtccaatggatcttggtactataagggacaaggtgcgaaagatggagtataaaaatagggaggattttaggcatgatgtggctcagatagcactgaatgcacatacatacaatcttaaccgccatccccacatccctccgcttgctgatgagctcttggagttgtgtgattatcttcttgaggaaagcgcggatgtgctagatgatgcggaatacgcgatcgaggactagtgcacactaaccagatatggcatttagatcttgctatattctaacttagatgctgtaatgctgacctgtaggaggggggaagagcacctgtagaatttttcattttaggctctggctatggtatacctgggatccccaattccaactattttgcctcttgttggtattgggagttgggagttggaatgtacacaaactctaggttagacattgagggcccactgtaactattggcctcttgctgtaaaaatgtagcgatgtaattttttgtccatatccatggccttgggtgtctcaaattctgatgttgtagcattaaatcctatgtgaatggcatctaaccatatgagtcaaaggtgcaacacgtcaaagtatgtgctaaaggttgtacccggtctaacctgattggtgaaggtcccttcaaatcctgcatgattagaggcttaccatacaactatgcgaagtcaaaacctgtaattgtaactgtaacgtgagagatggtgtaccggcagtacaagttgtttgagttgctgccagatgatgatgtatttgatgttgcatgctttgaatgagtattcaccgctcaacgatatcattggatggtgcagttcatagtttcatacctttggtttttggtttgtgatgttgtagcaacagaacaacaagtaatcatccattaaacaatcaagtccctttctcctaaaaaaaaaaaaaaaaaaaa

SEQ ID NO: 80886 - DNA, 3039 bp, Oryza sativa
  Clone ID: PAT_MRT4530_80467C.1
atggcacggggctctgttctgctcgacggcagtgtactaccgccttcccgcatcgtgaacgagaggcacgccggactgccgcgccgcttcatgcctgagtccgccaccggtcgggagatagtgatgctgggcgaggggcgcccggcaccagactacccggggcggtccatcttcttcctccccttcgcaatggctgggctggtcccgccattttctcatttcttcatggatgtcctggagttctacgatctccagatggcgcacctcacccccaatgcggtgatgacattggccatcttcgcgcacctgtgcgagatgttcattggggtgcgcccctctcttcagctgttccggtggttcttcaccgtgcagtcggtgtcaccaccgtcggtggttggcggctgctacttccagccgcgggggccggtgttgaaccgctacatcccctgcgtcctccgcaagaagtgggacgactggaagagcgactggttctacacccccctcgccgacgaagcgcgcctccgacttccaagccagcccccggcgcaggtctccagctggcgggcgccggtagatctgggggaggagtacgacgccgtcctcgaccgcctggcgggcctgcgatcccaagggctcaccggggccatggtgtacggcgattacctccgtcgccggattgcgccgctccaacggcgcgcccggagcgcctgggagtacactgggcctgaagactacatgcggacccaccagggagccagatgggattgggctcccgaggacttcaagatcgtggtccaaagggtgctgaatcttagctccgcggaggcgtctcgccttcctcaggagatcctccccctctgcagcgatcccgaccgcgtctccattctaaccattatgatgggggtcggggcctcagaggagagagcccctaagggccacgacggcgcgggcgagcgccgccggggggaacaacctgccccaggaggggggggcggggcggcgcgtgccagcagtcggcgcccggagggggccgcgccaacatcgcagcccgagggggtgcgcaagaagaagcggctccgcaagacgggggagacggaaccatgccggggaaacctgatttcccctccaaggtggtcattcacccgaccccctcgcagcaatgtcccgtcgcattcctcccgccaccccaagtccggccagtccgaggtcgaagatccggcggctgcagaggagcggaggcgagaatctgaccggcgtgaagccgcagatcgccttcgggaagccgaagaggccgcccgggaggccgcccgggttcgccaagcggaggaggctgctcgggaggaggccgcccgggctcgccaagccgaagaagctgcccgggaggaggccgcccgggctcgccaggctgaggcgacagctgctgctggcgcgtcacttgggcccactccctcgggcggccctcaggcgacatcctccgaggcggctcgcgacgaggctgcgggcgcatcgcctgggcctacctcaccgggcgacgcccaggatcaaacgggcccgggggacatccccgagcccagcgcatcctccggggggccaagccgcgtcgcattttctccaaggcggcttttctcctcatcttccgtcgccccggtgagcgccgagcccattatgcaggccttggccgccgcaaacaccgcggtgctagatggatttagcgcccaggtggaggccttgcgagcggaacgagcggagctcgaggccgcatgggcgcgcgtcgaggaggggcggcgctcggtggacgccatggtggaggtgggccgtaaggcccaccgccgccatatctcggagcttgaagcccgcaaggcggcgctggcggagatcgcccgagaggtggaggaggagcgagaggccgccctcgtcgccaccaccgcgatgatcgaggcgcaggactccctccgccttcaacacgggagctgggaggcggagctaaagaaaaagctcgacgccgcccagggggtcctcgacgccgccgccgcccgagagcagcgagcaacagaggctgaagcggcgttgcggcggcgcgaagaggcccttgaggcccgtgccatggcgctggaagagcacgccggcgccgtggagaggggcttgacggaccgcgaggccgccgctggtctccgagaggcgacgctggcggcgcatgaggccgcctgcgccgaggaggagtccgcgctccgcctccgcgaggatacactcgctgagcgggagcgagctctcgaggaggccgaggccacgacgcaacggctggcggacagcctgtccctccgcgagggagcgcaggaggagcaggcgcgccgaaatctggaatgcgtccgcgccgagagagccgcactggagcagcgggctgctgacctcgaggcgcgggaaaaggagctggacgcgagggcgcctatcggcggggcggccgcgggcgaaagcgacttagccgcccgcctcgcagccgccgaacacaccgtcgcagagatgcagcgagcgctggactcctccatcggggaggccgaggccctccgcttggcgggcgagatggggcccgacatgctttgggactcggtctcccgcatggatcgcgccggtcggcaagcgggcctctggaaaggccagtcgaggatgcgccccgccaacctggaaggcctcgctccgcacctcaacaggatggcctgggtcctcgaacgactccccgaggagctcgagaagaccatcaagtcatcctcgagggacctcgcgcggggagcggtcgaactcgtgctggcgagttaccaggcccgggaccccaacttctctccatggatggcgctggaggagttccctcccgggaccgaggacgacgcgcgcgcgcgggtcggggacgctgccgaccacatcgtcaacggcttcgaggggtcggcccctcggctcgcgttcgcccccagctccgacgaggagggcgatgccagcggtgaggacgacggtggcgacgaggccggcgacccgggcgcattggaatga

SEQ ID NO: 80887 - DNA, 686 bp, Oryza sativa
  unsure (1)..(686): unsure at all n locations
  Clone ID: PAT_MRT4530_80468C.1
ttttgttttttttttttttttttttttttttaaaaatgtaaactttagctatattcattgcagtagccagtgcccagtagggagaaatccttacatctgctagggaagcgctaaactaactacatcatccaaacgtcagcttctccaagctagcgaatttacaggccgtatttttatgtactgatatagtacagcataatacaaagtggaggcgacaaccgcctacagatatacagaaattcctctcttgtcaacagcctctttcctcgtggagcctttctatactgtacagtaaaatcagatcggtgtagtaacagagttacgacatgttgctgacatctctaacattatatatctacgatgtcatgggaacaattctcctgctgaacattcatcagcactcatggatgactgacgctcagaacctctttggggagccgtaggggctttggaccttcaactggctgatatcctgccaggtatccgaaatcgtgggaattcgtcttgtctcgttcatcatgtagcttgatagatatnaaggaagtagcaccattggaaaatgttgggtgtgggtggggggaatggncaggcaacttccagtttggaattgctttaaactggccgcaatggggcttgagcatgggggacacccggtagagaaattgttttgttctcacaacggaaat

SEQ ID NO: 80888 - DNA, 3180 bp, Oryza sativa
  Clone ID: PAT_MRT4530_80469C.1
atggcacggggctctgctctgctcgacggcagtgtattaccgccttcccgcatcgtgaacgagaggcacgccggactgccgcgccgcttcatgccggagtccgccaccggtcgggagatagtgatgctgggcgaagggcgcccggcaccagactacccggggcggtccattttcttcctccccttcgcaatggctgggctggtcccgccattttcctctttcttcatggatgtcctggagttctacgatctccagatggcgcacctcacccccaatgcggtgatgacattggccatcttcgcgcacctgtgcgagatgttcattggggtgcgcccctctcttcagctgttccggtggttcttcaccgtgcagtcggtgtcaccgccgtcggtggttggcggctgctacttccagccgcgggggccggtgttgaaccgctacatcccctgcgtcctccgcaagaagtgggacgactggaagagcgactggttctacacccccctcgccaacgaagcgcgcctccgacttccaagccagcccccggcgcaggtctccagctggcgggcgccagtagatctgggggaggactacgacgccgtcctcgaccgcctggcgggcctgcgatcccaggggctcacaggggccatggtgtacggcgactacctccgtcgccggattgcgccgcttcagcggcgcgcccggagcgcatgggagtacaccgggtctgaggactacatgaggacccaccagggagccagatgggattgggctcccgaggacttcaagatcgtggtccaaagggtgctgaatcttagctctgcggaggcgtctcgcattcctcaggagatcctccccctctgcagcgatcccgaccgcgcctccattctaacaattatgatgggggtcggggcctcagaggagagagcccctaagggccacgacggcgccggcgggggccgccaggaagaatcagccccaggagggggccgtgcttctgggccccgcgacgggggctcggggagcaaccgccctgccgacgcccgggggaagaggaaacagggaggaacacctcccccatctcctccccgagggggcggggcggcgcgtgccagcagccggcgcccggagggggccgcgccgacgtcgcagcccgagggggagcgcaaaaagaaacggctccgcaagacgggggagacggaaccatgccggggaaatctgatttcccctccaaagtggtcattcaaccgaccccctcgcaggttcgtctcactctccttgcaaccatctttctcccaaaacaatgtcccgtcgcattcctcccgccaccccaagtccggccggtccgaggccgaagatccagcggccgcagaggagcggaggcgagaatctgaccggcgtgaagccgcagatcgccttcgggaagctgaagaggccgctcgggaggccgcccgggttcgccaagcggaggaagctgctcgggaggaggccgcccgggctcgccaagccgaagaagctgcccgggaggaggccgcccgggttcgccaggctgaggcgacagctgctgctggcgcgtcacttgggcccactccctcgggcggccctcaggcgacatcctccgaggcggctcgcgacgaggccgcgggcgcatcgcctgggcctacctcaccgggcgacgcccaggaccaaacgggcccgggggacatccccgagcccagcgcatcctccggggggccgagccgcatcgccttctctccaaggcggctcttctcctcatcttccgtcgccccgctgagcgccgagcccattctgcaggccttggccgccgcaaacaccgcggtgctagatgggttcagcgcccaagtggaggccctgcgcgcggaacgagcggagctcgaggccgcatgggcacgcgttgaggaggggcggcgctcggtggacgccatggtggaggtgggccgcaaagctcaccgccgtcacgtctcggagcttgaagcccggaaggcggcgctgacggagatcgctcgtgaggtggaggaggagcgagcggccgccctcattgctaccaccgcgatgatcgaggcgcaagacaccctccgccttcagcacgcaagctgggaggcggagctgaaggaaaagctcgacgccgcccaaggggtccttgactccgccgctgtccgagagcggcgggtaacggagactgaagcggcgtctcggcggcgcgaggaggcccttgaggcccgtgccatggcgctggaagaacacgccggcgccgtggagaggggcttgacggaccgtgaggccgccgctggtctccgagaggcgacgctggcggcgcatgaggccgcctgcgccgaggaggagtccgcgctccgcctccgcgaggatgcactcgctgagcgggagcgagctctcgaggaggccgaggccacgaccagacggctggcggacagcctgtcccttcgcgaggcggcgcaggaggagcaggcgcgccgcaatcttgaatgcgtccgcaccgagagagccgcactggagcagcgggctgctgacctcgaggcgcgggaaaaggagctggacgcgagggcgcatatcggtggggcggccgcgggcgaaagcgacttagccgcccgcctcgcagctgccgaacacaccgtcgccgatatgcagcgagcgctggactcctccaccggggaggccgaggcccttcgcttggcgggcgagattgggcccgacatgctttgggatgcggtctcccgcctgaagcgcgccggtcggcaagcgggcctctggaaaggccagacgacggtgccccccaccaatctggaaggcctcgctccgcacctccacaggatggcctgggttctcgaacaactccccgaggagcttgagaagaccattaagtcatcctcaagggacctcgcgcggggagcggtcgaactcgtgctggcgagttaccaggcccgggaccccaacttctctccatggatggcgctggaggagttccctcccgggaccgaggacgacgcgcgcgcgcgggtcggggatgctgccgaccacatcgtcaacggcttcgaggggtcggcccctcggcttgctttcgcccccagctccgacgaggagggcgacgccagcggtgaggacgacggtggcgacaaggccggcgacccgggcgcgttggaatga

SEQ ID NO: 80889 - DNA, 445 bp, Oryza sativa
  Clone ID: PAT_MRT4530_8046C.1
aacagcacaaaggccaaacacaccagggttcttcttttgcttaaaaaaataaagggtaaaaaaaaccgggggaaacaaccacaaagggggggaaaggggcaccaaaaaaaaagcctacttgcaaaaacggggggacaaaaccaacgggggacaaaaaaggaaccaaaaacgggggggcctgaaaaaggcccccgaaaagacacaaaaccaagaaacccaaaaaaacaactatgggggggaaaaaaccaaccaaaaaacacctatgaggcccccggggccgaaaaacaccaacaaagccagctaccccaaaaaaagccttggcccgaaggtctctcctcgggaaaaaaaaattaaaagaacgggcccccaaactgtggccatcgggggctgaaatagcggggcccaattctggaaaaaaagccctcggtacaaaaccaaatccccg

SEQ ID NO: 80890 - DNA, 3186 bp, Oryza sativa
  Clone ID: PAT_MRT4530_80470C.1
atggcacggggctctgctctgctcgacggcagtgtactaccgccttcccgcatcgtgagcgagaggcacgccggactgccgcgccgcttcatgccggagtccgccaccggtcgggagatagtgatgctgggcgaggggcgcccggcaccagactacccggggcggtccatcttcttcctccccttcgcaatggctgggctggtcccgccattttcttctttcttcatggatgtcctggagttctacgatctccagatggcgcacctcacccccaatgcggtgatgacattggccatcttcgcgcacctgtgcgagatgttcattggggtgcgcccctctcttcagctgttccggtggttcttcaccgtgcagtcggtgtcaccgccgtcggtggttggcggctgctacttccagccgcgggggccggtgttgaaccgctacatcccctgcgtcctccgcaagaagtgggacgactggaagagcgactggttctacacccccctcgccaacgaagcgcgcctccgacttccaagccagcccccggcgcaggtctccagctggcgggcgccggtagatctgggggaggactacgacgccgtcctcgaccgcctggcgggcctgcgatcccaggggctcaccggggccatggtgtacggcgattacctccgtcgccggattgcgccgctccaacggcgcgcccggagcgcctgggagtacactgggcctgaagactacatgcggacccaccagggagccagatgggattgggctcccgaggacttcaagatcgtggtccaaagggtgctgaatcttagctccgtggaggcgtctcgcattcctcaggagatcctccccctctgcagcgatcccgaccgcgcctccattctaaccattatgatgggggtcggggcctcagaggagagagcccctaagggccacgacggcgcgggcgagcgccgccggggggaacaatctgccccaggagggggtcgtgcttctgggccccgcgtcggaggctcggggagcagccgccctgccgacgcccaggggaagaggaagctgggaggaacacctcccccatctcctccccgagggggcggggcggcgcgtgccagcagtcggcgcccggagggggccgcgccgacgtcgcagcccgagggggagcgcaagaagaaacggctccgcaagacgggggagacggaaccatgccggggaaacctgatttcccctccaaggtggtcattcaaccgaccccctcgcaggttcgtctcactctcattttgttcgtcttctggttttttcttctgcttcagcgatgtcccgtcgcattcctcccgccaccccaagtccggccagtccgaggccgaagatccagcggccgcagaggagcggaggcgagaatctgaccggcgtgaagccgcagaccgccttcgggaagctgaagaggccgcccgggaggccgcccggattcgccaagcggaggaagctgctcgggaggaggccgcccgggctgaggaagccgctaaggaggaggccgcccgggctcgccaggctgaggcaacagctgctgctggcgcgtcaactgggcccactccctcgggcaaccctcaggcgacagcctccagggaggctcgcgacgaggccgcgggcacatcgcctgggcccacctctccgggcgacgcccaggatcaaacgggtccgggggacatccccgagcccagcacgtcctccggggggccgagccgcatcgccttctctccaaggcggctcttctcctcatcttccgtcgccccgctgagcgccgagcccattctgcaggccttggccgccgcaaacaccgcggtgctagatgggttcagcgcccaagtggaggccctgcgcgcggaacgagcggagctcgaggccgcatgggcacgcgttgaggaggggcggcgctcggtggacgccatggtggaggtgggccgtaaagctcaccgccgtcacgtctcggagcttgaagcccggaaggcggcgctgacggagatcgctcgtgaggtggaggaggagcgagcggccgccctcatcgctaccaccacgatgattgaggcgcaagacgccctccgccttcaaaacgccagccgggaggcggagctgaaagaaaagctcgacgccgcccagggagtccttgactccgccgctgcccgagagcggcgggtaacagagactgaggcggcgtcccggcggcgcgaggagtcccttgaggcccgtgctatggcgctggaagaacacgccggcgccgtggagaaaggcttgacggaccgcgaggccgccgctgctctccgggaggcgacgctggcggcgcacgaggccgcctgcgccgaggaggagtgcgcgctccgcctccgcgaggacacactcgctgagcgggagcgagctctcgaggaggctgaggccacgaccaaacggctggcggacagcctgtccctccgcgaggcggcgcaggaggagcaggcgcgccgcaatcttgaatgcgtccgcgccgagagagccgcactggagcagcgggctgctgacctcgaggcacgggaaaaggagctggacgcgagggcgcatatcggtggggcggccgcgggcgaaagcgacttagccgcccgcctcgtagctgccgaacacaccgtcgccgatatgcagcgagcgctggactcctccaccggggaggccgaggcccttcgcttggcgggcgagattgggcccggcatgctttgggatgcggtctcccgcctgaagcgcgccggtcggcaagcgggcctctggaaaggccagacgacggtgccccccaccaatctggaaggcctcgctccgcacctcaacaggatggcctgggttctcgaacaactccccgaggagcttgagaagaccatcaagtcatcctcgagggacctcgcgcggggagcggtcgaactcgtgctggcgagttaccaggcccgggaccccaacttctctccatggatggcgctggaggagttccctcccgggaccgaggacgacgcgcgcgcgcgggtcggggatgctgccgaccacatcgtcaacggcttcgagggctcggcccctcggctcgcgttcgcccccgactccgacgaggaggggaacgccagcagtgcaagcgacggtggcaacgaggccggcgacctgggcgcgtcagaatga

SEQ ID NO: 80891 - DNA, 1917 bp, Oryza sativa
  Clone ID: PAT_MRT4530_80471C.1
taacttcattgtttatttgctactacacatacaatgtacaacatgttttgctgagttcgacaagaagtcgaggcaagggaacctattaagacatgctgaagatttttttacatctgacatccaaagatgtcaatcttaatccagtgcttataccgattcaaaattttaccaaacctacatttccaagatcactggatgtgcatttgcttgtttaagaaatactgtaatccagatacttgcttgctgcaaaagcttgtttcaactgtaaccaataggtttgctcaggagacttggtcactgtgtttctcatgttaggcttctatgttatctggatggggaaacatgtcagggcagttaatttgaaaatcccatatctggcaagaagaggtaccgaaatctagaatcaaacggaatgatgccaaatgtgcgggtgcccaggagactttgccgcctttgagacacacagtgctcaacaaaagtagcttgcgatgctctaataaaatcacgttgtgcatcttggagttcttcccttacattgcctgctgtatatatcttcaccgcaggagaagagtacaatccacagctgagagcaaatgtcaagagtggctcaggtgacccaatgcaaaactttttctgctcctcaggcacttttatcttctgaagggcaagaagcagagccatttgtggcctatgatttggaggtttcatcttcagaatcacatactcgatgaatgcagcgctgaatttccttagtgattctgcagcatactcaagttgtttcttcccaactgacatccacgaaacttcagccgctgcaccgtagctcccaatgtcagcccaactaagcttctcgcgagctttgtacggatcaaagacggtctctgaagctaatagattattgttgtagttcaaatcgacctgaggactctgcacccaggaggatatggaagttggttcggacagcgaccagaatgcagaaattgaatagtttccgctaggagatggtccagactgctgcttctccgtcgagggagtcctcgaggactccctgcaggaatctgacaaggaaatgaagatgttcttcatgcagcgaacgatgtcctccgaaagctgattaggattgccaaagcatttggatgaaagctgcctctgtagtttcatagctgagtcgtgcaggacagcaaaaggataaaccttgtccactctacatgacttctcgtttgcggtgtcatctgattcggatttggtggagtggcaggagcagacggagcgtggctgctgcagctgcagctgcggtggcggcggcgcctgcttgaggcggtactcgacgagcctcctctcgttccgctcctggatgagctgaaaatgcagggacaccatgtcgtcctccagcttggagatggtgccttccaggatggagatgttggagagcagctcctgtgcgttggtggggaggtaggacatgtcggcgagagtgagcgcggcgcggtggagcgcgttctcgaggatggcgtgcagcgtcgtctcctcctgcagcgccttctgcagcttcttcacgtcctgctccagctgcgacctgcaggaggacgcggcggcggaggcggaggacgacgacgaggagaagcccctcctcgccttggccgacagcgacagcggcggcatggtggcgcgcgaacgagtagtgtagtgtggcgtgtcgggggaggcggacgcggacgcggagtgggtggccaaacccaacccgcagctcgagaaaggcgggggcagacgagcgagcgcgacaccacgacccaccgtggcaaagtggcagccagccaaagcttggcccttccttccagcacgcggcccggagcccaaggatcggatcagaggcagcgaccaccccactgtcacggatccagaacaaattccacccat

SEQ ID NO: 80892 - DNA, 2601 bp, Oryza sativa
  Clone ID: PAT_MRT4530_80472C.1
atggcacggggctccgctccgcttgacggtagcgtgctgccgccttcccgcatcgtgagcgagagacaggccgggctgccgcgccgcttcatgccggaatctgccaccggccgggagatagtctcgctgggcgagggatgcccggcgccacgctacccggggcggtccgtcttcttcctcccttttgctatggcagggctggttccgccattttcttctttcttcatggatgttctggagttttacgatctccagatggcgcacctcacccccaacgcggtaatgacattggccatcttcgcgcacctgtgcgagatgttcatcgggccggtgtcgccaccgtcggttggttgggggttgctacttcccagccgcgggggccgggtgctgaaccgctacattccctgcgtcctccgcaagaagtgggatgactggaagagcgactggttctacacccccctcgccgacgaagcgcgcctccgacttccgagccagcctccagcgcaggcctccaactggcgggcgccggtagatctgggagatggctacgacgccgtcctcgaccgcctggcgggcctgcgatcccaggggctcacaggggccatggtgttcggcgactatcttcgtcgccggatcgcgccactccagcggcgcgcccggggcgcctgggagtacaccgggtccgaggactgtatgaggacccaccggggggtcaaatgggacagggtccccgaagacttcaaggtaatgatccaacgggtgctgaatctcagctccgcggaggcatccctcatcccccaaggagtcctccccctctgcagcgatccagatcgcgccaacatcctgtccatcatgatggcggtcggggcctcagaggaacgagctcctaagggccatgacggtgcgagcgggagacgcaagggagatcaatctaccctaggagggggttgtgcttccgggccccgtgatgggggctcggggggcagccgccctgccgacgcccgagggaagaggaagcaagaggcgagatcccgtcgcgtccttcttgccaattcaagtccggccaatctgaggccgaaaatgcggcgaccacggaggctcggaggcgggaatctgaccggcgagaagccgcgaatcgcctacgggaagccgaggaggccgcccaggtggccgtccgagctcgccaagctgaagaagccgctcgggaggaggccagacttcgccaggccgaggcggcgacgacttccgaggcagctcgcgacgaggtcgcaggcgcatcgcttgggcccactccctcgggcgacgctcaggacaagccaggccttggccgtcgctaacaccacggtgttggacgggttaagtgcccagatggaggccttgcaagcagagcgggtggagctcgacgccgcatgggcacgtgtcgaagaggggcgtcgctcggtggaggccatggtggaggtgggccgtaaggcacaccgccggcacgtctcagagctcgaagcccgtcggaagatgctgggggagatcgccagggaggaggcggagctagggaagaagctcgacgccgcccggggggtccttgacgctgccgctgcccgagaacggcgggcggcggagaccgaggtggcatcccggcggcgcgaagaaacccttgaggcccgtgccatggcgctggaagagcgtgcctgcgtcgtggagagggacctggcggaccgcgaggccgccgttgctattcgggaggtcacactggcggtgcacgaagccgcctgtgccgaagaagagtccgcactccgcctccacgaggatacgctcaccgagcgggagcgagccctcgaggaggccgaggccgcagcacagaggctagtggagagcgcgtccctccgcgaagctgcgcaagaggaacaagcgcgtcgcaatctggaaagtgcccgcgccgagagggccgcactgaaccagcgggccgctgaactcgaggcgcaggcaagggagctggatgcaagggcgcgtagcggcggggcagccacgggcgacagcgacttagccgcccgcctcgcagctgccgaacacaccatcgcggatctgcagggcgcgctggattcgtccaccggggaggtcgaggcccttcgcctggcaggcgagatagggcccagcatgcttcgcgacgccgtgtcccgtttagactgcgccgggcggcaggcgggtctctggggcgggcggactgtgaagtacgccgccaaccaggggggcctcgcccagcgcctctcggagatggccgggactctccagcggctccccgaggagctcgaggggacgattaagtcatcctcgagggacctcgcccgaggagcggtggagctcgtactggcgagttaccaggccagggaccccgacttctccgcatggacggcgctggacgagttccctcccgggactgaggacggcgcgcgcgcgcaggtccgggatgccgccgaccatatcgtccacagcttcgagggttcggcccctcggctcgcgttcgccctcaactccgacgaggaggacgatgacggcggtgtgggcgatagtggcgacgaggctggcgacccgggtgcatcggagtga

SEQ ID NO: 80893 - DNA, 2367 bp, Oryza sativa
  Clone ID: PAT_MRT4530_80473C.1
atgaaaagctcatctccgtacgtgtggccttgcaagactcgacagacgattatcgcagtaggtctaaaaagaaagacctcgaccgatgccaagaataacggaggaaaaaaaaagtttcatatgcttttcgatggggccttggtatcagacgcagcctatcgacgaacaggttcatcgagcggttgttgggttggccggaaaactggcccggtctatcatgacgcacagcctgctcagcggaagccgtcgcgcgctttccttgcagtttcggcccgatgcaccgccacgcgtatttccggcccaaaccagcccaactgcaagcgcgctcgggcagataccccccggagtgacacgccgctgtcccccccatgccgcacccggcacccgctcgacggaatgccgagcccgagtccgagcgcgccgccctccgcttccctcttcaactccctcatcgcgtcccgcgcccgcgccggccgcgccgccgagggctttgcgctcctcgcgcgcatgctcgccgcgggcgtcgccccgacggcgttcaccttcgcgccgatcctctcctcgccttcggccggcgcccgctgcgcggcgcagctgcaccctcacatcctcaagagcgggctgctccacagcgacccctactccgggacatcgctggtggggttctttgggcggaatggccggtttgatgatgcactcaggttgttcggcgaaatgcctgtgcggagcgtcgtcacctggaactgtctcatctcttcgtttgcgcagcatggacgtgcctgcgatgctgtgatctggttcagggcgctggttcgaagcggtaacagcgtgtctgatggctctcttgtggcagtacttcctgcttttggcacaccagagcaagttcatgggcttgtgaagaaaattgcgatagattccttctcaacagttgcaaactcattgctgaattcatactgtactcacagttccacgtctttggcagagaatctgtttagtgagttcatgttcagagacgtggtttcttggaatacaatgatcattgccttcgctaggagaagcttgcctcagagagcccttgaatttttctggatgatggaaggttggagtgttttgcccaatgaaataacatttagcagtgtaatttatgcctgcaccagtataaatggacatgaacatgggaagtccattcatgcaaaagttatcaaacacaatctcaatacgagaccatttgtgaacacttcactgtttgatttctattcaaaatgtggttgtacgaaggatgctcacaaagttcttgaagaagctcctgaggatagcaccacacgttggaatggactgatttcttgtcactcagatactgatgttccaacgtcgttttttattctgagagagatgttgcgatctggtgttatgccaaacgagattcactcgttggtaacaagattgggttacgacggctatgactatgtctcaagtgccattatatcttcatatgcttcacatgaaatggtttctgatgctttggcttatggggctggggtatataacagagtccgcatgtatgacgaagcgaagaagctacttttacatcagggatgtaatgacactgtttcatggagcatacttatcactgcttgtgcaaggaatggtgattatgctgaagctcttaaatttttcgaactgatgagaattttggggcatcattttgatagctatgtatctgtgagcctgctaagcatttgtacaaagtctaatagccttgttcttgatatgtatgctaagtgcggtagaattgaagaatgtctgaaagcctttaaggaaatggaagataggaacattatctcctggacagctataatttctggccttgcacttaatggtttttctcgtaaggccctggcatggtttaaagccatggaagaggatggcttcaaacctgacaagattctttgtttatatgatcttgtaatagatggaatttatccaggtaatttggcgccgtacgtgctggcggtactgcattcggcgcatagccagttcagctacactactagtcttgtccttggctttgattctactcaatgtttactttgcgtctgcattgtgctctgcctggtcttggtggtcgtcgtggggctcgcggccacgcaggccgaggcggcccgtgccttggcagagtacgccgctccgccgggcggcgactacgacgacgacgtggctggcggcggcggcggcggcggatttggtatccgtggacgtcgtcggccggggagcctaccagcaaaacggctcgcagaaggccatgacgcgggccattgttacggcctaatggttgtgggcttcttctgcgatgaggcccttcgggct

SEQ ID NO: 80894 - DNA, 2904 bp, Oryza sativa
  Clone ID: PAT_MRT4530_80474C.1
atggcacggggctctgctctgctcgatggcagtgtactaccgccttcccgcatcgtgagcgagaggcacgccggactgccgcgccgcttcatgccggagtccgccaccggtcgggagatagtgatgctgggcgagggacgcccggcaccagactacccggggcggtccatcttcttcctccccttcgcaatggctgggctggtcccgccattttcttctttcttcatggatgtcctggagttctacgatctccagatggcgcacctcacccccaatgcggtgatgacattggccatcttcgcgcacctgtgcgagatgttcattggggtgcgcccctctcttcagctgttccggtggttcttcaccgtgcagtcggtgtcaccgccgtcggtggttggcggctgctacttccagccgcgggggccggtgttgaaccgctacatcccctgcgtcctccgcaagaagtgggacgactggaagagcgactggttctacacccccctcgccaacgaagcgcgcctccgacttccaagccagcccccggcgcaggtctccagctggcgggcgccggtagatctgggggaggactacgacgccgtcctcgaccgcctggcgggcctgcgatcccaggggctcaccggggccatggtgtacggcgattacctccgtcgccggattgcgccgctccaacggcgcgcccggagcgcctgggagtacactgggcctgaagactacatgcggacccaccagggagccagatgggattgggctcccgaggacttcaagatcgtggtccaaagggtgctgaatcttagctccgtggaggcgtctcgcattcctcaggagatcctccccctctgcagcgatcccgaccgcgcctccattctaaccattatgatgggggtcggggcctcagaggagagagcccctaagggccacgacggcgcgggcgagcgccgccggggggaacaatctgccccaggagggggtcgtgcttctgggccccgcgtcgggggctcggggagcagccgccctgccgacgcccaggggaagaggaagctgggaggaacacctcccccatctcctccccgagggggcggggcggcgcgtgccagcagtcggcgcccggagggggccgcgccgacgtcgcagcccgagggggagcgcaagaagaaacggctccgcaagacgggggagacggaaccatgccggggaaacctgatttcccctccaaggtggtcattcaaccgaccccctcgcagcgatgtcccgtcgcatccctcccgccaccccaagtccggccagtccgaggccgaagatccagcggccgcagaggagcggaggcgagaatctgaccggcgtgaagccgcagatcgccttcgggaagctgaagaggccgcccgggaggccgcccgggttcgccaagcggaggaagctgctcgggaggaggccgcccgggctcgccaggctgaggaagctgctaaggaggaggccgaccgggctcgccaggctgaggcgacagctgctgctggcgcgccctggccgcgcgcaaacaccgcagtgctggatgggttcaacgcccaagtggaggccttgcgtgcggaacgagcggagctcgaggccgcatggacgcgtgttgaggaggggcggcgctcggtggacgccatggtggaggtgggccgtaaggctcaccgccgtcatgtctcggagcttgaagcccggaaagcggcgctggcggagatcgcccgtgaggtggaggaggagcgggcggccgccctcatctctaccaccgcgatggtcgaggcgcaagacaccctccgccttcagcacgcaagctgggaggcggagctgaagaaaaagctcgacgccgcccaaggggtccttgactccgccgctgcccgagagcggcgggtaacggagactgaagcggcgtctcggcggcgcgaggaggcccttgaggcccgtgccatggcgctggaagaacacgccggcgccgtggagaggggcttgacggaccgcgaggccgccgctgatctccgagaggcgacgctggcggcgcatgaggccgcctgcgccgaggaggagtccgcgctccgcctccgcgaggatgcactcgctgagcgggagcgagctctcgaggaggccgaggccacgacgcaacggctggcggacagcctgtccctccgcgaggcagcgcaggaggagcaggcgcgccgcaatctggaatgcgtccgcgccgagagagccgcactggagcagcgggctgccgacctcgaggcgcgggagaaagagctggacgcaagggcgcgcgtcggtggggcggctgcgggcgaaagcgacttagccgctcgcctcgcggctgccgaacacaccgtcgctgacatgcagcgcgcactagattcctccatcggggaggccgaggccctccgcttggcgggcgagatggggcccgacatgctttgggactcggtctcccgcatggatcgcgctggtcggcaagcgggcctctggaaaggccagacgaggatgcgccccatcaatctggaaggcctcgctccgcacctcaacaggatggcctgggtcctcgaacgactccccgaggagctcgagaagaccatcaagtcatcctcgagggacctcgcccggggggcggtcgaactcgtgctagcgagttaccaggcccgggaccccaatttctctccctggatggcgctggaggagttccctcccgggactgaggacgacgcgcgcgcgcgcgtccgggatgccgccgaccacatcgtcaacggcttcgagggctcggcccctcggctcgcgttcgcccccaactccgacgaggagggcaacaccagcagtgcagacgatgggggtgacgaggccgtcgactcgggcgcgtcggaatga

SEQ ID NO: 80895 - DNA, 429 bp, Oryza sativa
  Clone ID: PAT_MRT4530_80475C.1
accggtgcaagtgtgcagttgctattgtcaactcgagttgtttccatggtcattgtccaagatgtgacgagaaggcagtaaaggagtagtactacttgtaaaatttgcacaattcggtactacctcagagattgttgcgtcgtgcgcgccgtcgtctgaacgcgacggcgatggcaacgccaacggcgacgcgctcctggcccctttcagggtcctcttctccctctcccggttggcctccatgagcgccgcctccaggagggctttggcgtccggctcgagctcgctgatgaacttgagcggggacggccacaccaggggctccgccgacgacgggttcagcagcgcggcgcacgcgacgtgccctcgcttcatcgccacctcgtacggaatcctcccgacggagtctcgctggagcccacgcgtccg

SEQ ID NO: 80896 - DNA, 2628 bp, Oryza sativa
  Clone ID: PAT_MRT4530_80476C.1
atggcacggggctccgcaccgctcgacggtagcgtgctgccgccttcccgcatcgtgagcgagaggcaggccgggctgccgcgccgattcatgccggaatctgccaccggccgggaggtggttgcgctgggcgagggacgcccggcgccacactacccggggcggtccgtcttcttcctctctttcgcaatggcggggctggtcccgccattctctatttttttcatggatattctggagttttatgatctccagatggcgcacctcaccctcaacgcgataatgacgttggccatcttcgcgcacctgtgcgagatgtttatcggggtgcgcccatctctccggctgttccggtggttcttcaccgtacagccggtgtcgccgccgacggcagtcggtggctgctacttccagccgcgggggcaggtgctgaaccgctacattccctgcgtcctccgcaaaaagtgggacgactggaagagcgattggttctacacccccctcgccgacgaagcgcgcctccgacttccgagccagcccccggcgcaggcctccagctggcgggcggcggtagatctgggagacggctacgacgccgttcttgaccgcctggcgggtctgcgatcccaggggctcacgggggccatggtgttcggcgactacgttcgtcgccggatcgcgccgcttcagcggctcgcccggggcgcctgggagtacaccgggctcgaggactacatgaggacccaccaggggcgcaaatgggactgggaccctgaggacttcaggatggtggtccaacgggtgctgaatctcagctccgtggaggcatccctcatcccccaaggggtcctccccctctgctgtgatccagagcgcgccaagatcctggccatcatgcaggcggtcagggcgtcgggggagcgggccccccgaggccacgatggcgcgggcgggagccgcaggggggaacaatctaccccgggagggggtcgtgcttctgggccccgcgacgggggcccgggggcagccgccctgccgacgcctgggggaagaggaaccaggagggtacccctcccccatctcctccccgagggggcggggcacgagatcccgtcgcgccccccccgccattccaagtccggccggtctgaggccgaggagacggcgaccgcggaggcccggaggcgggaagctgaccggcgagaagccgcagaccgccaccgggaagccgaggaggctgcccaggaggccgtccgggttcgccaggctgaggaggccgctcaggaggaggccagactccgccgggccggggagtccgtccgagaggcagaggcggcgcgcgcacgccaggcggcctgccaaacccccgacccgactccgcccgaggcgacgatgacttccgaggccacccacgacgaggccgcgggcgcgccgctcgggcccgacccctcgggcgacgcttgggacgagccagcttcgggggacgcccccgagtccggcacgtcgatcggcgggccgagccgcgcgacacccacaccgagggggctctcccctctgccttccgctgccccactgagcgcggagcccctcctgcaggccttggccgccgcgaacagcacggtgctggacgggttaagtgcccagatggaggccctgcaggcggagtgggcggagctcgacgcggcgtgggcgtgcgtcgaggtggggcggcgctcggtggaggccatggtggaggcgggccgcaaggcacactgtcggcacgcctcacagctcgaggcccgtcgtagggacctggcggagatcgccagggaggtggaggaggagcgggagactgccctcatcgccaccgccgtgctcgacgaggcgcgggacgacctccgcctccaatacgggagccgggcgacggagctagaggagaagctcgacgccgcccggggagtccttgacgccgccgctgcccgggaacggcgggcggcggagaacgaggcggcgtcccggcagcgcgaagagggccttgaggctcgcgccacggcgctggaggagcgcgcccgcgccctggacgcgaaggagagagacctagcggaccgcgaggccgccgtcgccacccgggaggcaacactggcggcgcacgaggccgcctgcgccgaagaggagtccgcactccgcctccgcgaggacgcgctcaccgagcgggggcgagctctcgaggaggccgaggccgcggcgcagcggctggcggacagcctgttcctccgcgaggcagcgcgggaggagcaggcacgccgcaatctggaaagcgcccgcgccgagagggccgcactggatcagcgggccgctgagctcgaggcgcgggcgaaggagctggacgcgagagcgcacagcggcggggcggccgcgggccacggcgacctagccgcccgcctcgcagccgccgaacacaccatcgccgagctgcagggcgcgctggactcgtccgccggggaggtcgaggctctccgcttggcgagcgaggtagggcccggcatgcttcgggacgccgtctcccgtctagaccgcgccgggcggcaggcgggcctctggggcgggcgatacgcgaagtacgccgccaaccaggggggcctcgcctag

SEQ ID NO: 80897 - DNA, 4236 bp, Oryza sativa
  Clone ID: PAT_MRT4530_80477C.1
atggatggggtcaccgccgccgcttccaatgctccccaccccaaccacaaggcgttccggttcggcagcctcaacttcatcaccaacgacttcggcaagatctctctccttgacttggattcgaaccagtcgggaagagatcaggtccccgcaccgttcggtattccgaactcggccgaggcgtactccaagatcatctctcccgagtcggcttcaaaccactcggacgagacccaatctactccaccgcgaccagatcaagacgacggggaggttggcgttatactccaacctcttaggacagtctcgacagaagagttggatggctacctcagctcccccggcgtcggttctcaaccaaccgaggtcctcaactacgatgacttcggctaccactacgaccacagcgacctcgacaacttcgacgacagcttcgaggataactacacgcccctcttcttcggcaacgcggttgcagcaatcactctcctcgacaccctcctcaaggaagacgcacttaaccaagctgatcatgttgtcaaaatcttgaaccagacgaagactataatcgctgcctcggtcccagccaactccgcaagcacctgcaccccgattggtagccgagtccctcatcttcgatctcaagactatcaccagccaagcctcagcattgccggcgccggatctagtcgcagaagcaggggacatgatgaacggtctgttcgttcgcctcccgaacgatatagggagcgtcgagttgaacgaccatactccccacatcgaaggcgccccatcgatcttcgcgacaccatcaaccagcaccgcgcagcaagaggccatcattcaccggatcgctacgacgacgatgtggacggagttgctgccttcacaagtgatttgcatcgagtggattggccagctggctttaagccgactggaatcgagaaatatgacggcaccaccaaccctcagtcttggctcaccgtctatggtctcgcaatcagcgcagcaggaggagacagcaaagccatggcgaattatctacctgtggccctagcggattctgcccggtcatggctccacgagctaccccgcggcacgatcggatcatgggcagagctacgcgaccacttcatagccaacttccaaggcacttttgaacggcctggtacacacttcgatctctacaacatcattcagaagtctggagagtctcttcgagattacattcgacgcttctctgagcaacgcaacaagatctccgacatcaccgacgacgtcatcattgcctcctttactaaaggcattcgccacgaggacctagtcggcaagttcggacgcaaacctcccaagacggtcaagcagatgtttgaaaaagccaatgagtatgccaaagccgaagatgctatcacggcgtccaagcagtcgggcaccacttggaagccaaagaaggatacgccgaccgcaggagggagtggaagtaacaaccacaaagatcgcaagcgtaagcccgaagaacttgtggtgacaacctctccgtcttcccgacaacgttcccgcgtcaacacattcgacaagataatgaactcccaatgtccgcatcatcccaactccaaccacgtggccaaagactgcttcatctacaaacaatttgcggagcaatacgtcaagaatgcacgtaagccctcagacggagatcaaggcacatcaaagaagaaagatgatgaagacgatgccccgactggttttcaagaccatcgcaaagaactcaatcacatcttcggcggacctctggcttatgagtctaagagaaagcagaagttaacagaacgtgagatcaatgcggttcagcccaacacgccccaataccttcggtggtcagagatagcaatcaagttcgaccgctcggatcatcccgaccgagtggtccacctggggcggtaccccctggtactagacccagtggttcgcaatatcaagctccgaagaactctcatcgatggtggcagtgcattcaacatccttttcgctaagaccctggacgatatgcagattcctcgcacggaattaaagccaagtaatgcacccttccacggtgttatcccaggattatcagccacaccactcggccagatcactcttccggaaagcgcgctcatcacctttcttcaaaataataaagatatctttgcatggaaaccatccgatatgccgggtattcctagagaggtgattgagcactctttacatgttaaggaagacgccaaacccatcaagcaacaactccgccgttttgcacaggacaggagggacgcgatcaaggaggaattaaccaagctattagcagcgggcttcatcaaggaagtccttcatcccgactggctggctaacccagttctggttcggaagaagaccggacaatggcgcatgtgtgtcgattacaccgacctcaacaagtcttgccctaaagatcctttcgggttacctcgcattgaccaggtggttgactcaacggccggctgcgagctactcagttttttagactgctatttgggatatcatcagatccgactgaaagaatccgactgcttgaagacctcgttcataacgccctttggggcctactgctacatcaccatgccctttggattgaagaacgcaggagcaacctatcaatgcatgattcaaagatgtttttcaactcagatcggtcgcaacgttgaagcttatgttgatgatgtagtcgtcaagaccaagcagaaggatgacctgatcacggatttagaagaaacttttgcaagcattcgtgctttcaggatgaaactaaaccctgaaaagtgcatcttcggagtaccgtcagggaagttgctcggatttatggtatctcaaagaggcatacaggccaacccggagaaaatcaacgccatcctcaacatgaaaccaccaagctcccacaaagacgtccaaaagctgactggttgcatggcggcgctcagtcggtccgtttcacgactcggcgagcgggggatgccctttttcaagctgctgaagaagactgacaatttccagtggggcattcgccgactaatcgtccgtggagactctcagttggttgttaatcaagtcatgaaagagtggtcttgtctagatgataatatgactgcttatcgacaagaggtgcgcaagttggaagataaattcgatggacttgagctcacccatgtcctccgacataacaatgaggcagccgacagactggccaattttggttcaaaacgggaagcagccccttctgatgtgttcgtcgagcatctttatgaaccaaccgtgcccagaaaagaagcaattgaagccacgaatacccgaggcgtaagcataattaaagccgactggagagaacctctcataaaatttttgaccaaacaagaactccctcaggacaaaaatgaagccgagcggatttccaagcgcagcagactttacattattcatgagactgagctgtacaagaaaagtccatcaggaatactgcagcactgtgtgtctttggaagaagggagacaattgttgaaggatatacattctggtatttgtggtaatcatgctgctgcacggaccattgtcggcaaagcttaccggcaaggttttttctggcctacagctgtgtctgatgctgacaagattgtgcggacatgcgaaggttgtcaattttttgccagacaaattcatctgccagcccaagagttgcaaaccatcccgttgtcctggccgtttgcggtctgggggcttgatatggtcggcccgtttaaaagggcagtcggcagttacacgcatatctttgtggctatcgacaaattctccaagtggattgaggctaaaccggtcatcacgatcacagcagataaagctagagattttttcattaacattgtgcatcggtttggggtacctaatcggatcatcaccgataatggcactcaattcactggcggagcatttaaagacttttgtgaagacttcggcattaaaatttgttatgcctccgtggcacaccccatgagtaatggacaagttgagcgcgccaatggcatggtacttcaagggataaaagcacgagttttcaaccgactacgtccctatgctggcaagtggaagcaatgttgccgagtgaagtggaatttgaatcactacgatttcagaacttcaacgaggagcgctatgaagagggccgagtag

SEQ ID NO: 80898 - DNA, 2913 bp, Oryza sativa
  Clone ID: PAT_MRT4530_80478C.1
atggcacggggctccgcaccgctcgacggtagcgtgctgccgccttcccgcatcgtgagcgagaggcaggccgggctgccgcgccgattcatgccggcatctgccgccggccgggaggcggtcgagctgggcgagggacgcccggcaccacactacccggggcggtccgtcttcttcctccctttcgcaatggcagggctggtcccaccattctcttctttcttcatggatgttctggagttttatgatctccagatggtgcaccttacgcccaacgcagtaatgacgttggccatcttcgcgcacctgtgtgagatgtttatcgggccgcgggggccggtgctgagccgctacattccctgcgtcctccgcaagaaatgggacgactggaagagcgactggttctacatccccctcgccgacgaagcgcgcctccgacttccgagccagcccccagcgcaggtctccagctggcgggcgccggtagatctgggagacggctacgacgccgttcttgaccgcctggcgggtctgcgatcccaggggctcacgggggccatggtgtacggcgactaccttcgtcgccggattgcgccgctccagcggcgcgcccggggcgcctgggagtataccgggtctgaagactgcatgaggacccaccagggggtcagatgggactgggcccctgatgacttcaagatagtggtccaacgggtgctgaatctcagctccgtggaagcatccctcatcccccaaggagtccttcccctctgcagcgatccagatcgcaccaccatcctgaccatcatgcaggcggtcagggcgtcggaggaacgggttcctcgaggccacgatggcgcgggcgggagccacaggggggaacaatctaccccgggagggggtcgtgcttctgggccccgcgacgggggcccgggaagcagccgccctaccgacgcccgggggaagaggaagcaagaaggaaccccttccccatctcctccccgagggggcggggcggcgcgtgccagcagcaggcgcccagagggtgccgtgccgacgtcgcagtccgagggggaacgaaagaagaagcggctccgcaagtccggccagtccgaggctgaggagacggcgaccgtggaggcccggaggcgggaggctgaccggcgagaagacgcagaccgcctccgggaaaccgaggaagctgcccaggaggccgtccgggctcgccaggctgaggaagccgctcgggaggaggccaaactccgccgggccgaggagtccgtccgggaggcggaggaggcgcgcgcatgccaagcggcctgccaagcccccgacccgactccacccgaggcgacgacgacttccgaggccacccacgacgaggccacgggcgcaccgctcgggcccgacccctcgggcgacgctcgggacgtgccagcttcgggagacgctcccgagtccggcacgtcgatcggcgggccgtgccacgcggcgcccgcaccgaggcggctctcccctctgccttccgctgcccgactgaacgcggagcccctcctgcaggccttagccgccgcgaacaccacggtgctggacgggctaggtgcccagatggaggtcctgcaggcagagcggaaggagctcgacgcggcgtgggcgcgcgtcgaggaggggcggcgctcggtggaagccatggtggaggcgggccgcaaggcacaccgccggcacgcctcagagctcgaggcccgtcagagggagctggcggagatcgctagggaggtggaggaggagcgggagactgccctcatcgccaccgccgtgctcaacgaggcgcgggatgatctccgcctccaatacgggagccgggcggcggagctagagaagaaactcgacgccgcccggggagtccttgacgccgccgctgcacgggaacggcgggcggcggagaacaaggcggcgtcccagcggcgcgaagaggcccttgaagctcgcgccaaggcgctggaagagcgcgcccgcgcgagggagagggacctggcggaccgcgaggccgccgtcgccatccgggaggcaacgctggcagcgcacgaagccgcctgcgccgaagaggagtccgcactccgcctccgcgaggacgcgctcaccgagcgggagcgagctctcgaggaggccgaggccgcggcgcagcggctggcggacagcctgtccctccgcgaggcagcgcgggaggagcaggcgcgccgtaatctggaaggcgcccgcgccgagagggccgcactggatcagcgggccgctgagctcgaggcgcgggtgaaggagttggacgcgagggcgcgcagcggcggggcggccgcgggcgacggcgacctagccgcccgcctcgcagctgccgaacacaccatcgccgatctgcagggcgcgttggactcgtccgccggggaggtcgaggccctccgcctggcgaacgaggtaggtcccggcatgcttcgggacgccgtctcccgtctagaccgcgccgggcgacaggcgggcctctggggcgggcggaccgtgaagtatgccgccaaccaggggggcctcgcccagcgcctctcagagatggccgggaccctccagcggctccccgaggagcttgaggagacgatcaagtcatcctcgagggacctcgcccggggggtggtggagctcgtactggcaagctaccaggccagggacccggacttctccccgtgggcagcactagacgagtttcctcccgggaccgaggacgacgcgcgtgcgcaggtccgggacgccgccgaccacatcgtccacagcttcgagggtacggccccccggctcgcattcgccctcgattccgacgaagagggcggtgacggcggtgatgaggccggcgacccgggcgtgtcggaatga

SEQ ID NO: 80899 - DNA, 1188 bp, Oryza sativa
  Clone ID: PAT_MRT4530_80479C.1
gatggtataatttgtaaacatatagatagatggtaaactcatttctcccctaaatgagcatgtttccgtggcaaataacacaatgtcaagctcctagggcaaagaaaggtaactaaagcacaagtatatcaatttcccttttgacttcaacacaatacagaactcgatcgatgcttccatgatttgcaaaagctgaatcacaaactgaatggaaaaacaacaggttaagaaaaaaaaaaagaaggaaagaatggttggtgatcaggtgatgatctcgtgtgtgataaagtatcagcttgctcgtagcatgatctctaaggaagttcgtatgctgcagcgttggcggtgacgtagtaggcgacggtgaccccggcatggacgaagcacaggatccctccgagatccagggtatggccttgcgcaaagctgcaatttctccgggggttggagttgcgcatggcaccggcgagcagcagcgagaatccggcaataagagcaagccaggagaggactatcagagtcgctgccagcttcctcttgatggaagcccggatgaactccatctgagagcagatgcaggcacagcctccgagaaagttagccactgcgtgggcagctacaaggagcactgcagccgcgaggcccaactggtatactttggaggatgattgctcacattcgatgaacaacatcctcaccgttttaaccttgttttgagcaatctgagcctgaagtcctagtatgccagcagtaacatccagcgctaaaatcaccacacagacaagaatagcagccccaattgttgctcttgccatcgcagcgtgttctcaaacgtatatcttctatcagccgagagaagttatggaagcaggataagctgagagcagttatgggaggaacaatcttgtttgcctgcttacaacgaaggaggtgtacccctttttattggtaatcggtgaataaagagctgagagcaaaagtagaacaggagaatttttctccaactatgatgtagttatgaactgagtagaaattagctgtcaatagatgctgaaagtattatactttcctttgatcctttgttacatatgagctttattccttccttaaaggacacaagtaaagattagcatctccagtgtgaaagcccatctgtcacatattcaggccacttttgcagattctgct

SEQ ID NO: 80900 - DNA, 216 bp, Oryza sativa
  Clone ID: PAT_MRT4530_8047C.1
atgcgcggcggagaggacgagcggccaggccctcactcgacagcggcctggcggaggcggaggcggcctcgcgccacggcggccagccgggcagcggcagcggatccggaggggaggcagccagccgccgtcggatctgaagggggaggcagctgggcggcggccttacgcggagagccgcacccgacggcggccggtgcggcggcaggcggttga

SEQ ID NO: 80901 - DNA, 2820 bp, Oryza sativa
  Clone ID: PAT_MRT4530_80480C.1
atggcacggggctccgctctgctcgacggtagcgtactactgccttctcgcatcgtgagcgagaggcaggccgggctgccgcgccgcttcatgccggaatctgccaccggccgggagatagtgatgctgggcgagggacgcccggcaccagactacccggggcggtccgtcttcttcctccccttcgcaatggcggggctggttccgccattttcttccttctttatggacgttctggagttctacgatctccagatggcgcacctcacccccaatgcggtgatgacattggccatcttcgcgcacctgtgcgagatgttcattgggccgcgggggccggtgctgaaccgctacatcccctgcgtcctccgcaagaagtgggacgactggaagagcgactggttctacacccccctcgccaacgaagcgcgcctccgacttccaagccagcccccggcgcaggtctccagctggcgggcgccggtagatctgggggatgactatgacgccgtccttgatcgcctggcgggcctgcgatcccaggggcttacaggggccatggtgtacggcgactacctccgtcgccggattgcgccgctccagcggcgcgcccggagcgcctgggagtactccgggtccgaagactacatgcggacccaccaaggagtcagatgggattgggctcccgaggacttcaagatcgtggtccaaagggtgctgaatctcagctccgtggaggcgtctctcattcctcaaggaatcctccccctctgcagcgatcccgaccgcgcctctattttgaccattatgatgggggtcggggcctcagaggaggaaacccctaagggccacgacggcgtgggcgagagccgccgggggggacaatctaccccaggagggggtcgtgcttctggccccgcgtcgggggctcggggagcagccgccctgccgacgcccaggggaagaggaagctgggaggaacacctcccccatctcctccccgagggggcggggcgcgatgtcccgtcgcgttcctcccgccaccccaagtctggccagtccgaggccgaagatccggcggccgcagaggaacggaggcgagaatctgaccggcgagaggccgcagatcgccttcgggaagctgaagaggccgcccgggaggccgcccgggttcgtcaagcggagagtgccgctcgggaggaggccgcccgggctcgccaagctgaggcgatggcgtcttccgaggcagctcacgacaaagctgctggcgcgtcgcttgggcccactccctcgggcgacgctcaggcgacggcctctggggcggctcgcgacgaggccgcgggcgcatcgcctgggcccactccctcgggcgacgctcaggcgacggcctccggggcggctcgcgacgaggccgcgggcgcatcgcctaggcccacttctccgggcgacgcccaggaccaaacgggtccgggggacatccccgagcccagcgcctcctccggcgggccgagccgcgtcgcgttctctccaaggcggctcttctcctcgtcttctgtcgccccgctgagcgccgagccccttctgcaggccttggccgccgcaaacactgcggtgctagatgggttcagcgcccaagtggaggccctgcgagcggaacgagcggagctcgaggccgcatgggcgcgtgtcgaggagggacggcgctcggtggacgtcatggtggaggacaccctccgccttcaacacgcgagctgggaggcggagctaaagagaaagctcgacgccgcccaaggggtccttgacaccgccgctgcccgagagcggcgggcgacggagactgaagcggcgtcccggcggcgcgaggaggtccttgaggcccgtgccatggcactggaagaacacgccggcgccgtggagaggggcttggcggaccgcgaggccgccgtcgccatccgggaggcaacgctggtggtgcatgaggtcgcctgcgccgaagaggagtccgcgctccgcctccgcgaggacgcacttgctgagcgggagcgagctctcgaggaggccgaggccgcggcgcaacggctggcggacagtctgtccctccgcgaggcagcgcaggaggagcaggcgcgccgcaatctggaatgtgtccgcgccgagagagccgcactggagcagcgggctgctgacctcgaggcgcgggaaaaagagctggccgcgagagcgcccatcggtggggcggctgcgggcgaaagcgacttagtcgcccgcctcgcagctgccgaacacaccgtcgccgacatgcagcgcgcccttgactcatccgccggggaggccgaggccctccgcttggcgggcgagatagggcctggcacactttgggatgcggtctcccgcctagatcgcgccggtcggcaagcgggcctctggaaaggccaaacaatgccgcactccaccaatctggaaggcctcgctccgcgcctcacgaagatggcctgggctctccaacaactccccgaggagctcgagaagaccattaagtcatcctcgagggacctcgcccaaggagcggtcgaactcgtattagcgagttaccaggccagggaccccaacttctctccgtggatggcgctggatgagttccctcccgggaccgaggacgatgcgcgcgcgcgggtccgggatgccgccgaccacatcgtcaacagcttcgagggctcggcccctcggctcgcgttcgcccccaactccgacgaggagggcgacgccagcggtgcagacaacgatggcgacgaggccggcgacccgggcgcatcggaatga

SEQ ID NO: 80902 - DNA, 2826 bp, Oryza sativa
  Clone ID: PAT_MRT4530_80481C.1
atggcacggggctccgcactgcttgacggtagcgtgctgccgccttcctgcatcgtgagcgagaggcaggccgggctgccgcgccaattcatgccggaatctgccaccggccgggaggtggtcgagctgggcgagggacgcccggcgccacactacccggggcggtccgtcttcttcctctctttcgcaatggcggggctggtcccgccattctctaatttcttcatggatgttctggagttttatgatctccagatggcgcacctcacccccaacgcgataatgacgttggccatcttcgcgcacctgtgcgagatgttcatcggggtgcgcccatctctccagctgttccggtggttcttcaccgtacagccggtgtcgccgccgacggtagtcggtggctgctacttccaaccgcgggggcaggtgctgcaacgctacattccctgcgtcctccccaagaagtgggacgactggaagtgcgattggttctacacccccctcgccgacgaagcgcgcctccgacttccgagccagcccccggcgcaggcctccagctggcgggcgacggtagatctgggagacggctacgacgccgttttcgaccgcctggcgggtctgcgatcccaggggctcacgggggccatggtgttcggcgactaccttcgtcgccggatcgcgccgctccagcggcgcgcccggggcgcctgggagtacaccgggcccgaggacatcatgaggacccaccaggggcgccaatgggactgggactccgaggacttcaggatagtggtccaacgggtgctgaatctcagctccgtggaggcatcccttatcccccaaggtatcctccccctctacagcgatccagatcgcgccagcatcctgaccatcatgcagacgcgagatcccatcgcccccccccccccccgccattccaagtccggccggtccgaggccgaggagacggcgaccgcggaggcccggaggcgcgaagctgaccggcgagaagccgcagaccacctccgggaagccgaggaggcagcccaggaggccgtccgggttcgtcaggctaaggaggccgctcgggaggaggccagactccgccgggccggggagtccgcccgggaggaggaggcggcgcgcgcacgccaggcggcctgccaaacccccgacccgactccgcccgaggcgacgacgacttccgaggccacccacgacgaggccgcgagcgcgccgctcgggcctgacccctcgggcgatgctcgggaggagccagcttcgggggacgcccccgagtccggcacgtcgatcggcgggccgagccgcgcggcacccacaccgaggcggctctcccctctaccttccgctgccccactgagcgcggagcccctcctgcaggccttggccgccgtgaacaccacggtgctggacgggctaagtgcccagatggaggtcctgcaggcagagcgggcggagctcgacgcggcgtgggcgtgcgtcgaggaggggcggcgctcggtcgaggccatggtggaggcgggccgcaaggcacaccgccggcacgcctcagagcttgaggcccgtcgtaggggcctggcggagatcgccagggaggtggaggaggagcgggagaccgctctcatcgccgccgccgtgctcgacgaggcgcgggacgacctccgcctccaatacgtgagccggacggcggagctagagaagaagcgcgacgccgcccggggagtcctcgacgccgccgctgcctgggagcggcgggcggcggagaacgaggcggcgtcccgccagcgcgaagaggcccttgaggctcgcgccacggcgctggaggagcgcgcccgcgccctggacgcgaaggagaaagaccttgcggaccgcgaggccgccgtcgccacccgggaggcaacactggcggcgcacgaggccgcctgcgccgaagaggagtccgcactccgcttccgcgaggacgcgctcaccgagcgggagcgagctctcgaggaggccgaggccgcggcgcggcggctagcggacagcctgtccctccgcgaggcagcgcgggtggagcaggcgcgccgcgatctggaaggcgcccgcgccgagagggccgcactggatcagcgggccgctgagctcgaggcgcgagcgaaggagctgaacgcgagagcgcacagcggcggggctgccgcgggcgacagcgacctagccgcccgcctcgcagccgccgaacacaccatcgccgggctgcaaggcgcactggactcgtccaccggggaggttgaggccctccgtttggcgaacgaggtagggcccggcatgcttcgggacgccgtctctcgtctagaccgcgccgggcggcaggcgggcctctggggcgggcggtgcgcgaagtacgccgccaaccaggggggcctcgcccagcgcctctcagagatggccggggtcctctggcggctccccgaggagctcgaggagatgatcaagtcatcctcgagggacctcgcccggggggcggtggagctcgtattggcgagctaccaggccagggaccctgacttctctccgtgggcagcgctggaggagttccctcccggaaccgaggaggcgcgcgcgcgcaggtccgggacgccgccaaccacatcgtccacagcttcgagggatggtctgtgccacggtccttctgtgtcttggcttgaacgagggctcgtgcccaggtcccaaccccaagcggcgcgggtcggggctagtgcctggggagatccacgtgtcgagactggccaggccgggagcgtggtgaccgagggttatggatga

SEQ ID NO: 80903 - DNA, 3198 bp, Oryza sativa
  Clone ID: PAT_MRT4530_80482C.1
atgtcgaacaaacaaatattccaagtttaccatggaccaggaaacgtccgttacgggccaactggggtagatctgtcagattttattgtatcagaaaggggaattgatagaccggctgagaggagtgtaccttctataaaaggatggttaatgaggggcttgagagttgatttacagacaagtgacataacaatcaatgttatagtaagtcgggcaactgagggtttttattgggaactaatgccagttcaaaactctcgagtgtggagatggtatttggaaaatgcattgcaacgcgggtggcctctagctttggttccgtttgttcacccgaaggatccaggtgtgcagacgaacatggatgatggcgagggactaagtgctgaagtaaacgagacttctgtggaggaggtcaacgcacgagaggacgggggcgtagtagctccagtgggcattcaaccaggtggagtggccgacgagggggagactgtcggtgccattgtggatgaaatggagagggaggattctgacaacgagcgtgtagaggaaggtgattcgtcagatgatgagacggatattaatccagcagaatgggctagtgaggatttttctgggctgatcgtctctgaagaggatagtgtgagatgggagtacaaagaaaatgaggttattcagggagcgatttatagtagagcagaagatatgaaggaggcggtaaaacattttgcagtgtcacttcatagagagttttgggttgccaagtcgaaccggtcgcaatatgaagttcggtcaataatccgacacattgaagagacatacaagtatactattagctatgccaaggcctggagggccaaacagaaaataatagagatgagatttggaacttacgaagcctcgtatgacaatttgccacgcctgcttggtgttatcgaggaaagaaaccctgggagctcttacgaagtgaagaaattcccctcaattgaacatcctggcaagagtgtgctgcaaagggcgttcttagctctacatgcatgcaagatggcattcgtgaactgtcgtcctgttctctgcattgatgggacattcttgacaggaaagtatcggggccagatactaacagcaataggggtagatgggaacaatcaggtattgcccttggcatttgcttttgttgagagtgagaataccgacagctggtactggttcctgaaattggttaaaacaaaagttgttggtatgaggccaaatgtatgcctgatacatgataggcacgctggcattctgcgagcgataggagagttgcagtttgggagtatggaacgaggataccccggtgtttgggaagatgtacagagtaggtggtgcatgcgtcatatgggagctaatttcttcaagcaattcaagaacaaggagctcatgaacatgttcaagaggctgtgcaatcagaaccaggagaaaaaattcaatgagctttggaagagattagatgagttgacagccaaatgcagtgatcagcgtgcagcggctccatcgaccgccgttgctgaccctcctcaagctcttggacctctcccaacggatagtccaacattggttagaagaactggattggagattcggaaattttctcagtggattctgcatgaaccaaaagagaaatgggccaaggcgtatgacacaggtggtgctagatatggaataatgacaacaaatttggcagaagtttacaactgggtgatgcgcggtgtccgtggactaccactagttggcatagtggagttcattttacatgagacatgcagcattttgtttggagctttcatgcagaaaaagctagaggagttgcgtaaaaaggccatgaaacatcgagctctagtgcaaggtacccaacagcacaggtttgagatactatgtcaagataaggcaggcaggggtatctaccgcaagagagtgaagcaggagtgtgttctcaaagccgacggcacatgtcattgctcttgtgcaaagccgaagctgctccacaggccatgcacccatgtcattgctgccgcagcggagtgtggcataccagatgcagtatatgtgtcacagtacttcagtaagcaagcaatatatcatacatggagcggcgagatttatgggttcggcatagctggggagttcacagagactaacgatgaagtactcaatattcctgacccatcgaagctccgaggcaaggctggaaggaggaggactcgtcgcatccgcaacgatatggacgagtcggaggctggcagggtgaagcgttgcagcaaatgcgatgaacatgggcacacttacaagcattgtcctaaagacaaggagaaaccaagtgtggcggaggcaggactatcaggatcagcagcagatggagctcgccctacggatggcacgtcaggatacacctcagttgttggacccggcaatagatcaccgacaccggtctcaccttactgcggtgcagggggctcagcttgggacgttccgggcatggacgtgcggggagctactcacggttcacgactccttcagaactcagtcacattcagtactctcttccccacttgcttcattacaaattcgaccggctttcgtcaatggctagacgccgaggtgttgaggatccaaactggcgttgcgatccttgtgtatacctactaccaccttggtgccagcgtcctctctgcctatgcgacctgcactacggcttgcgcatacatcgagtgggtcgatacagaaaatcccattctcgacctaaccacttgtttacaagaaagtcgctggtatttcgcatccgaaagtactgagcaatacttacagagaaaagcggcttatgaacgacaatgtcgtgaactacagagcgactggcgggtgctaactacggcactccctccatgggaagcccgtccaagatgcaggtgtggtgatcgttgtcaggttcttcattccataaatcctacaacattgggtcgaaggttctttgtttgtccaaatattcttgacgacgatttcatggaaccaccaaggagatgtcaatacagagaatggatagacaccagaagggttctaactccacctagccgtgttatgcagcttgaactaccagagcaatacagtgttactaaagcgcggtttgagaaagaagagggatcctcacgtaggggcgcggtttga

SEQ ID NO: 80904 - DNA, 2691 bp, Oryza sativa
  Clone ID: PAT_MRT4530_80483C.1
atgtcgaacaaacaaatattccaagtttaccatggaccaggaaacgtccgttacgggccaactggggtagatctgtcagattttattgtatcagaaaggggaattgatagaccggctgagaggagtgtaccttctataaaaggatggttaatgaggggcttgagagttgatccacagacaagtgacataacaatcaatgttatagtaagtcgggcaactgagggtttttattgggaactaatgccagttcaaaactctcgagtgtggagatggtatttggaaaatgcattgcaacgcgggtggcctctagctttggttccgtttgttcacccgaaggatccaggtgtgcagatgaacatggatgatggcgagggaccaagtgctaaagtaaacgagacttctgtggaggaggtcaacgcacgagaggacggggacgtagtagctccagtgggcattcaactaggtggagtggccgacgagggggagactgtcggtgccattgtggatgaaatggagagggaggattctgacaacgagcgtgtagaggaaggtgattcgtcagatgatgagacggatattaatccagcagaatgggctagtgaggatttttctgggctgatcgtctctgaagaggatagtgtgagatgggagtacaaagaaaatgaggttattcagggagcgatttatagtagagcagaagatatgaaggaggcggtaaaacattttgcagtgtcacttcatagagagtttagggttgccaagtcgaaccggtcgcaatatgaagttcggctacgtgaggccggcctcctaccgatgtgtcggctggtggaggctgcagccggcgacgcggacccggccagacgatggactgtggacaggtccctcctagcagctttggtcgatcgatggaggccagagacgcacacttttcacttgccgtgcggtgaggtagcccctaccctacaggacgtatcgtacttgttggggctaccgctcgcgggagacgctgttgggccagtgaccacggctgtggactgggaggacgatctgacggcacgtttcgcactagtacagcgcgcaccgcacctcccgctcgagccgttggcacaccaccgcaacaccggacctacgaagaggtggctgcttcagttcaccgttgagcagctacaggcgaaggccgacgagtactcgtacagccgatgtttggaggcgtacttgctctggctttttggctgggtgatgttctgtggcggtcacgggcacgccatcgacaagggactcgtgcactacgccaggagcatcgccgatgctgcagtaggcgaggtgcctcagtggagctggggttccgcgttgttggcggctctgtaccgtgcactttgtgagtcttgcacgaagacggatcccagcgcgacctttggtgggtgccctctctttctttctatctgggcagctgagaggattgcgatcggccgccctgaggtggaccagcacgcgtacgaggagtcactgtacgaggagcgaccagaggtcgactaccctacgatgggtactctgtggtgccgtcgtcagcgccgatgggctcacgtccaggttaggcggtcgtatcctgagtttgctatggagttcgaccgccttctgatgactgacgtcgtgtgggagccctacagtgccgcggctacccaggctcgtgcgccgttgggtctgtccacactctgcaccagggaccaggcgtactcgcgcaagggtcagcagtcagctggcgactggcccgccaagttggcgacttttgttcaggactggttgctcgcaaccgaggaggtcgtggaccacgagggagagccacacgctgaggagtcgtaccaggcctacctacgctggtaccagccacgcacccgtactagggtcaccttcgctcccttggagcagcagccccacgttgcgagcactagagacctctacgccaggcaccacgaccaggacttcgctcgtgttgtcgacgacatcaaccgggtcgtcgttgacggttcaatgacgatccaacgtttaggcgcggggattctggtacccgtagaggagcacctgacgacgtacacgcggatggtggagtcgatgcgctcgattctccgagtgctcacctgtcgtgcagacgacgttgctcgggcagacgcagctgtacagcggccacccgtaccgtctggttcccgtccagctgcgcacgttcctaggccgactccccctccgcacggagggtttcgtgcaccgttcagcaccccgccttcctcggctaggccttctgttgtgccccccacaggtttcgcccagttcgctatgacgcaggccgcccacttctcccaggctgcagggtcagcatcacaggcagccggcacgtcgagtcagggtccaccattggaccatgctgggacctcgtcggaccgcttcctgtcttccaccgtgctcttcgacatcactgacttcgacttcgcttcaggctcgacagaggacgtcatcggcccctcacagctgggaggcgcaccgccggtgcagacgcaggaccaggcgcaggccactcctccgcgggacactcgtctacccgtactgtgccaccggatcgtttcacctactcccaggaccatgtgcgagcacaggcccggaggaccaagcgtggtcgcggcgcggggcagggccagttga

SEQ ID NO: 80905 - DNA, 2329 bp, Oryza sativa
  Clone ID: PAT_MRT4530_80484C.1
aaaaaagaaccggcaatggggcaatatcacgcggggagaagcaagaaataatctatcggccaaaaaaattgcaaaaatagaccctgccgcccacctctggggcggcaagctgacgtggcaaacgggggagggacgggcggcggccccttgccgccctctggccgggcggaaggcctcgctgcctataaaaggcctgccgcccagcccccagccctcattcctcccctcaaatccagtgaaaaaaaacaagaagaaaggggaggagaagagaagaaggggtgaagccctgccggattcagacgccgatttcaggggaattgatagaccggctgagaggagtgtaccttctataaaaggatggttaatgaggggcttgagagttgatccacagacaagtgacataacaatcaatgttataatgaacatggatgatggcgagggaccaagtgctgaagtaaatgagacttctgtggaggaggtcaacgcacgagaggacgggggtgtagtagctccagtgggcattcaaccaggtgtagtggccgacgagggggagactgtcggtgccattgtggatgaaatggagagggaggattctgacaacgagcgtgtagaggaaggaaagtatcggggccagatactaacagcaataggggtagatgggaacaatcaggtattgcccttggcatttgcttttgttgagagtgagaataccgacagcaggtactggttcctgaaattggttaaaacaaaaattgttggtatgaggccaaatgtgtgccagatacatgataggcacgctggcattctgcgagcgatagaagagttgcagtttgggaatatggaacaaggataccctggtgagtgggaagatgtacagagcaggtggtgcatgcgtcatatgggagctaatttcttcaagcaattcaagaacaaggagctcatgaacatgtttaagaggctatgcgatcagaaccaggagaaaaaattcaatgagctttggaagagattagatgagttgacagccaaatgcaagactaacgatgaagtactcaatattcctgacacatcgaagctccgaggcaaggctggaaggaggaagactcgtcgcatccgcaacgatatggacgagtcggaggctggcagggactatcaggatcaacagcagatggagctcgccctacggatgaaggcactacctccactcgaccacgtcctaggcgtcgtcgtgccacctgagaggattgcgatcggccgccctgaggtggaccagcacgcgtacaaggagtcactgtacgcggagcgaccagaggtcgactaccctacgataggtactctgtggtgccgtcgtcagcgccgatgggctcacgtccaggttaggcggtcgtatcctgagtttgttatggagttcgaccgccttctgccgactgacgtcgtgtgggagccctacagtgccgcggctacccaggctcgtgcgccgttgggtctgtccacagtctgcaccagggaccaggcgtactggatgactacggttccgatggtcttcgacatctgcgttgagcctcatgcccctttccgcgtgatgcggcagttcggcttctgtcagccctttccacagtcagctggcgactggcccgccaagttggcgacttttgttgaggactggttgctcacaaccgaggaggtcgtggaccacgagggagagccacacactgaggaggcgtaccaggcctacctacgctggtaccagccacgtacccgtactagggtcaccttcgctcccttggagcagcagccccacgttgcgagcactagagacctctacgccaggcaccgcgaccaggacttcgctcgtgctatgacgttgctcgggcagacgcagctgtacagcggccacccgtaccgactggtccccgtccagctatgcacgttcctaggccgactccccctccgcacggagggtttcgtgcaccgttcagcaccccgccttcctcggctaggccctctgttgtgccccccacaggctgcccacttctcccaggctgcagcgtcagtgtctcaggcagctgcgtcgacctcgcactcagtgcagttctggcagtacaccgggacttcgtcacaggcagccggcacgtcgaaggatgtcatcggcccctcacagctgagaggggcaccgccggtgcagacgcaggaccaggcgcaggccactccgccgccagacactcgtgctacccgtgctgtgccaccggatcgtttcacctactcccaggaccacgtgcgagcacaggcccggaggaccaagcgtggtcgcggcgcggggcagggccagtag

SEQ ID NO: 80906 - DNA, 1149 bp, Oryza sativa
  Clone ID: PAT_MRT4530_80485C.1
atggatgatggtgagggaccaagtgctgaagtaaatgagacttctgtggaggaggtcaacgcacgagaggacaggggtgtagtagctccagtgggcattcaaccaggtggagtggccgacgagggggagactgtcggtgccattgtggatgaaatggagaggaaggattctgacaacgagcgtgtagaggaaggtgatttgtcagatgatgagacggatattaatccaacagaatgggctagtgaggatttttctgggctagtcgtctctgaagaggatagtgtgagatgggagtacaaagaaaatgaggttattcagggagcgatttatagtagagcagaagatatgaaggaggcggtaaaacattttgcagtgtcacttcatagagagttttgggttgccaagtccaaccggtcgcaatatgaagttcgctatgccaaggcctggagggccaaacagaaaataatagagatgagatttggaacttacgaagcctcgtatgacaatttgccacgcctgcttggtgttatcgaggaaagaaaccctgggagctcttacgaagtgaagaaattcccctcaattgaacatcctggcaagagtgtgctgcaaagggcgttcttagctctacatgcatgcaagatggcattcgtgaactatcgtcctgttctctgcattgatgggacattcatgacaggaaagtatcggggccagatactaacagcaataggggtagatgggaacaatcagagcaggtggtgcatgcgtcatatgggagctaatttcttcaagcaattcaagaacaaggagcttatgaacatgtttaagaggctatgcaatcagaaccaggagaaaaaattcaatgagctttggaagagattcgatgagttgacagccaaatgcagtgatcagcgtgcagcggctccatcgaccgccgatgctgaccctcctcaagctcttggacctctcccaacggatagtccaacattggttagaagaactggattggagattcggaaattttttcaatggattctgcatgaaccaaaagagaaatgggccaaggcgtatgacacaggtggtgctagatatggaataatgacaacaaatttggcagaagtttacaactgggtgtccgtggactgccactag

SEQ ID NO: 80907 - DNA, 2307 bp, Oryza sativa
  Clone ID: PAT_MRT4530_80486C.1
atgtccaacaaacatacatttcaagtttaccatggcctaggaaacgtccgttacgggccaactggggtagatctgtcaaaatttattgtaacaccaaggggaattgatagaccggctgagaggagtgtaccttctataaaaggatggttgatgaggggcttgagagttgatccacagacaagtgacataacaatcaatgttatagtaagtcgggcaactgagggtttttattgggaactaatgccagttcaaaactctcgtatgtggagatggtatgtggagaatgcattgcaacgcgggtggcctctagctatggttccgtttgttcacccgaaggatctaggtgtgcagatgaacatggatgatggcgagggaccaagtgctgaagtaaatgagacttttgtggaagaggtcaacgcaccagaggaagccaacgagggggagactgtcggtaccattgtggatgaaatggagagagaggattttgacaacgagcgtgtagaggaaggtggttcgtcagatgatgagacggatattaatccagccgaatgggctagtgaggatttttctggtctggtcgtctctgaagaggatagtgtgagatgggaatacaaagaaaatgaggttattcagggagcgatttatactagagcagaagaaatgaaggaggcggtaaagcattttgtagtgtcacttcatagagagttttgggttgccaagtccaatcggtcgcaatatgaagttcgataccctgggagctcttacgcagtgaagaaattcccctcaattgaacatcctggcaagagtgtgctgcaaagggtgttcttagctctacatgcatgcaagatggcattcgtgcactgttgtcctgttctctacattgatgggacattcttgactggaaagtatcggggccatatactaacagcaataggggtagatgggaacaatcaggtattgcccttggcatttgcttttgttgagagtgagaataccgacagctggtactggttcctgaaactggttaaaacagaagttgttggtatgaggcccaatgtgtgcctgatacatgacaggcacgccggcatgctgcgagcgatagaagagttgcagtttgggagtatggatcgaggataccctggtgaatgggaagatgtacagacgggaccatcgaccgccgttattgaccatcctcaagctcttggacctctcccaacagatagtccaacattggttagaagaactggagtagagatccggaaattttctcagtggattttgcatgaaccaaaagagaaatgggccaaggcttatgacacaggtggttctagatatgggataatgacaacaaattttgcagaagtttacaactgggtgatgcgcggtgtccgtggactcccactagttggcatagtagagttcattttacatgggacatgtaggggtatctaccgcaagagagtgaagcagggatgtgttctcaaagccgacggcacatgtcattgctcatgtgcaaagcctaagctgctccacgggccatgcacccatgtcattgctgccgcatcggagtgtggcataccagatgcagtatatgtgtcacagtacttcagtaagcaaacaatatatcatacatggagtggcgagatttatgggttcggcatagctggggagttcacagagactaatgatgaagtaatcaatattcctgacccatcgaagctccaaggcaaggctggaaggaggaagactcgtcacatccacaacgatatagacgagtcggaggcgggcagggtgaagcgctgtagcaaatgcgatgaacgtgggcacacctacaagcattgtcctaaagacaaggaaaaaccaagtgcagcggaggcaggactatcaggatcagtagcagatggagctcgccctacggggtcagcgtctcaggcagctgcgtcgacctcgcactcagcgcagttctggcagtacaccgggacttcgtcacaggcagtcggcacgtcgagtcagggtccaccactggacaatgctaggacctcgtcggactacggggtggcttccaccttgctcttctccatgagcgacttcgacttcgcttcagtctcgacagaggacgtcatcggcccctcacagctgggaggcgcaccgccggtgcagacgcaggaccagtcgccatccactccagcgccagacactcatgctacccgtgctgtgccaccgaatcgtttcacgtactcccaggaccacgtgcgagcacaggctcggaggaccaagcgtggtcgcggcgcggggcagggccagtag

SEQ ID NO: 80908 - DNA, 355 bp, Oryza sativa
  Clone ID: PAT_MRT4530_80487C.1
cggacgcgtgggagcaaaaaatgctgataatttccaagcaagaatgctgcactgggggggtggacttagagcatcgaaggtatgctacacgtacctgcagatgattggcttttttatatgctcatctatgttcacttctctggccggcgattgacaccgttgtgactgcaagacccctgcatggaccaatgtaaattgcctctgatgacacactactttagccacatttgcgcatggacgaataggtcgcaaccgatcggcttgtgcatcatgtgggcatgctgattggccaatgggacctacccttatccatgctattaagcgcatgggatatgaaacatactatcagtgagac

SEQ ID NO: 80909 - DNA, 2847 bp, Oryza sativa
  Clone ID: PAT_MRT4530_80488C.1
atggaggcaccagggatgtggggtgctgtggtgaaggatggtgatgagggtttcgtcaatgtgccacttgtgggcttcaacgtggtgaggggtccattgttggcaaataatctatcagccaaaaaaattacaaaaattgaccctgccgcccacctccagggcggcaagctgacgtggcaaacggggaagggacgggcggtgacggagggagatatgtcgaacaaacaaatatttcaagtttaccatggcccagaaaacgtccgttacaggccaactgggcgtagattagtatcaaaaggggaattgatactggctgagaggagtgtaccttctataaaaggatggttaatgaggggcttgagagttgatccacagacaagtgacataacaatcaatgttatagatccaggtgtgcagatgaacatggatgatggcgagggaccaagtgctgaagtaaatgagacttctgtggaagaggtcaacgcacgagaggacgggggcgtagtagctccagtgggcattcaactaggtggagtggccgacgagggggagactgtcggtgccattgtggatgaaatggagagggaggattctgacaacgagcgtgtagagaaaggtgattcgtcagatgatgagacggatattaatccagcagaatgggctagtgaggatttttctagtctggtcgtctctgaagaggatagtgtgagatgggagtacaaagaaaatgaggttattcagggagcgatttatactagagcagaagatatgaaggaggcggtaaaacattttgcagtgtcacttcatagagagttttgggttgccaagttcaaccggtcgcaatatgaagttcggaacattacatgtgcatttgttgcatctgagatgtatgcgcatgtcatcgataatctcacatatgaaccaaggtcaataatccaacaaatcgaagagacatacaagtatactattagctatgccaaggcgtatagggccaaacagaaaataatagagatgagatttgcaacttacgaagcctcgtatgacaatttgccacgcctgcttggtgttatcgaagaaagaaaccctgggagctcttacacagtgaagaaattcccctcaattgaacatcctagcaagagtgtgctgcaaagggcgttcttagctctacatgcatgcaagatggcactcgtgaactgtcgtcctgttctctgcattgatgggacattcttgactggaaaattagaaccacagctggactggttccgaaatggtcaaccaaagttgttggcacgcttgcattctgcgagcgatagaagagttgcagttttggagtatggaatgaggataacctggtattttagggatcggttccaagcagttcttccctctatgccgaacaacagcattttattcagaactttcatgcagaaaaagctagaggagttgcgtaaaaaggccatgaaacatcgagctctagtgcaaggtacccaacagcacaagtttgagatactatgtcaagataaggcaggcaggggtatctaccgcaagagagtgaagcaggagtgtgttctcaaagccgacggcacatgtcattgctcttgtgcaaagccgaagctgctccacaggccatgcacccatgtcattgctgccgcagcggagtgtggcataccagatgcagtatatgtgtcacggtacttcaagatggcacgtcaggatacacctgagttgttggacccggcgatagatcaccgacaccggtctcaccttactatggtgcagggggctcagcttgggacgttccgggcacggacgtgcggtgagctacatacagttcacgactcctttgtcgagagattgcgtgaggccggcctcctaccgatgtgtcggctggtggaggctgccgccggcgacgcagacccggccagacgctggaatgtggaccggtccctcctagcagctttggtcgaccgatggaggccagaggcgcacacttttcacttgccatgcggtgaggtagcccctaccctacaggacgtatcgtacttgttgaggctaccgctcgcgggagacgctattgggccagtgaccacgtgtgtggactggaaggacgatctgacggcacgtttcgcaccagtacagcgcgcaccacatctcccgctccagccgttggcacaccaccgcaacaccggacctacgaggaggtggctgcttcagttcaccctttttggctgggtgatgttctgtggcggtcacgggcacgcggtcgacaagggactcgtgcactacgccaggagcatcgccgacaccgcggtaggcgaggtgcctcagtggagctggggttccgcgttgttggcggctctgtaccgtggcctttgtgaggcttgcacgaagacggatcccagcgcgacctttggtgggtgccctctctttctttctatctgggtagctgagaggattgcgatcggctgccctgaggtggaccaacacgcatacggggagtcactgtacgtggagcgaccggaggtcgactaccctacgatgggtactctgtggtgccgtcgtcaggttaggcggtcgtatcctgagtttgttatggagttcgaccgccttctgccgactaacgtcgtgtgggagccctacagtgccgcggctacccaggctcgtgcgccgttgggtctgtccacactctgcacaagggaccaggcgtactggatgactacggttccgatggtcttcgacatctgcgttgagcctcacgcccctttccgtgtgatgtggcagtttggcttccgtcagctctttccagtaccgtttccgatgaccgtcccagctgctgttcaccggtaa

SEQ ID NO: 80910 - DNA, 329 bp, Oryza sativa
  Clone ID: PAT_MRT4530_80489C.1
gtctagtaacccaccctaccaggacggggcgatgagcttcacgagtgcaggtgcagctgcgacgatgacgacaacatcaccttaccagaccttgacatcctggagcagtgactaggcggaggcggtcgacgcggtaccagcggattacgctgcactgacacggagtgcgtccagatgggataggcaaaggtggctgattgtattaatgacgtcagcaacaatgacacggacgattaccagctaatgatgctcataaggaggaactgtcttgcggtttgtgtaggctctaagaaaaagctttgatataggccaggcaagcatctgtgtga

SEQ ID NO: 80911 - DNA, 810 bp, Oryza sativa
  Clone ID: PAT_MRT4530_8048C.1
tcatgttcgttgtgcttgtccctgagacaacgcagattggagcttgggcgcggaggagacaacaaaacaatgggcgacacatgtggatggaggtggcggcgacccgagctcgatggtgaaggagacgaaaagacggcagtcggtgcatgtggatggaggcagcggcgaccggacccccatgtctcccattcgcctgcctccccatctctgcctccgccctgagccaccgcatccacgcccacacccccggatgcctccccatttccggccccctctgcccgagccgagccgccggctccccatctcagacctgcgttgccgtggttgctgcctccacctccacgccgttgcctctgcctgcctccccatcttcggccccctctgcccgccgcctccccgtcttagatccgtgttatcgccgtccccgcctccgcctgccttcccatcttcatccccctttgccttgagccgagccgtcgttccccgtctcagatatgctccgccgccacctccagccgcacgtcgtcgcctcccgcctgccttcccatctccagcctctttcacccgagccaccgcctgcccatctcagatctgcgctgccgccgcctccacccccacgccatagcctccgcctacctccctatctccctctccccctccctagtgctgtagcctcagccccaactcccgctcacccgttggcgttgcctccatccccgctgactaactggcgtcacctccgcctccaccaacgcgcacccgccggtgagagggaggggagagaggggaggtcaagagacgggatggttt

SEQ ID NO: 80912 - DNA, 586 bp, Oryza sativa
  Clone ID: PAT_MRT4530_80490C.1
ggccgctttttttttttttttttttttttttttttagatcacagaaaatccacggatcccacaatgttctcattgattgatagcgatatcatagaagcagcgacacgaattaagatttataaccaacccccagaaggatcgcagatccaactccaccgaatcgatccaagaactccgcctaatccaaccaaaccatgggcgatctcatctcaccaacacgacacgaactcataaaaagactaacaccaccaccacctcctccttatttagggactcgacgactcaagacgactgatactggggaaaggcgaaggggaacagcacagatttaggagagctggccgcagtcggcgatgacgaccggcttggcggtgctcccgcgcggggatcccaccttctcgatggcctggaggacgtccatgccttcgacgacgcggccgaacacgacgtgcttcccgtccagccagctgcagggcacggtgcagatgaagaactgggacccgttagtgttgggcccggcgttcgccatggacaggatgcctttttttttttttttttttttttttttcccgggccggcctcgagg

SEQ ID NO: 80913 - DNA, 1824 bp, Oryza sativa
  Clone ID: PAT_MRT4530_80491C.1
atgtcgaacaaacaaatattccaagtttaccatggaccaggaaacgtccgttacgggccaactggggtagatctgtcagattttattgtatcagaaaggggaattgagagaccggctgagaggagtgtaccttctataaaaggatggttaatgaggggcttgagagttgatccacagacaagtgacataacaatcaatgttatagtaagtcgggcaactgagggtttttattgggaactaatgccagttcaaaactctcgagtgtggagatggtatttggaaaatgcattgcaacgcgggtggcctctagctttggttccgtttgttcacccgaaggatccaggtgtgcagacgaacatggatgatggcgagggaccaagtgctgaagtaaacgagacttctgtggaggaggtcaacgcacgagaggacgggggcgtagtagctccagtgggcattcaaccaggtggagtggctgacgagggggagactgtcggtgccattgtggatgaaatggagagggaggattctgacaacgagcgtgtagaggaagttgattcgtcagatgatgagacggatattaatccagcagaatgggctagtgaggatttttctaggctgatcgtctctgaagaggatagtgtgagatgggagtacaaagaaaatgaggttattcagggagcgatttatagtagagcagaagatatgaaggaggcggtaaaacattttgcagtgtcacttcatagagagttttgggttgccaagtcgaaccggtcgcaatatgaagttcggtgtgttaaggaaaaagatggttgtccctggagagtgcacgcgtataaggggaaatggaaggattattggacagtgtcagttgttaccaagcatacatgttttctacctagtgttcagaaataccacatgaacattacatgtgcatttgttgcatctgagatgtatgcgcatgtcatcgataatctcacatatgaaccaaggtcaataatccgacacattgaagagacatacaagtatactattagctatgccaaggcctggagggccaaacagaaaataatagagatgagatttggaacttacgaagcctcgtatgataatttgccacgcctgcttggtgttatcgaggaaagaaaccctgggagctcttacgaagtgaagaaattcccctcaattgaacatcctggcaagagtgtgctgcaaagggcgttcttagctctacatgcatgcaagatggcattcgtgaactgtcgtcctgttctctgcattgatgggacattcttgacaggaaagtatcggggccagatactaacagcaataggggtagatgggaacaatcagatccgcactacggcttgcgcatacatcgagtgggtcgatacagaaaatcccgttctcgacctaaccacttgtttacaagaaggtcgctggtatttcgcatccgaaagtactgagcaatacttacagagaaaagcggcttatgaacgacaatgtcgtgaacaacagagcgactggcgggtgctaactacggcactccctccatgggaagcccgtccaagatacaggtgtggtgatcgttgtcaggttcttcgttccataaatcctacaacattgggtcgaaggttctttgtttgtccaaatattcttgacgacgatttcatggaaccaccaaggagatgtcaatacagagaatggatagacaccagaagggttctaactccacctagccgtgttgtgcagcttgaactaccagagcaatacagggttactaaagcgcggtttgagagaggagagggatcctcacgtaggggttag

SEQ ID NO: 80914 - DNA, 284 bp, Oryza sativa
  Clone ID: PAT_MRT4530_80492C.1
gcttccggcctccagggcgcaaagctgcggctgcggcatcctctccaaccaggcggcagcgcgaccagccgccagggaccaggggggcctgcgagcaggggaggtctgcaccgagggctgcctcggcttggaggtctcttcttgccaagctgctgcaagctggcaagggcatagggaggtctgcggcctgctggccaggggagaggatctcaccggcatccagccctgctggagagagggacgagagaacttctggagtgggatgatggaaagagaggaagaag

SEQ ID NO: 80915 - DNA, 1968 bp, Oryza sativa
  Clone ID: PAT_MRT4530_80493C.1
atgtcgaacaaaccaatattccaagtttaccatggaccaggaaacgtccgttacgggccaactggggtagatctgtcagattttattgtaccagaaaggggaattgagagaccggctgagagaagtgtaccttctataaaaggatggttaatgaagggcttgagagttgatccacagacaagtgacataacaatcaatgttatagtaagtcgggcaactgagagtttttattgggaactaatgccagttcaaaactctcaagtgtggagatggtatgtggaaaatgcaatgcaacgtgggtggcctctagctttggttccgtttgtgcaaccgaaggatccaggtgtgcagataaacatggatgatggcgagggaccaagcgttgaaataaatgagacttctgtggaggaggtcaacgcaggagtggacggcggcgtagtagctccagtgggcattcaaccaggtggagtggccgacgagggggagactgtcgcagccattgtggatgaaatggagagagaggattctgacaacgagcgtgtggaggaaggtgattcgtcagatgaggagacggatattaatccagcagaatgggctagtcaggatttttctgggctgatcgtctctgaagaggatagtgtgagatgggagtacaaagaaaatgaggttattcagggagcgatttatagtagaacagaagatatgaaggaggcggtaaaacattttgcagtgtcacttcatagagagttttgggttgccaagtccaaccggtcgcaatatgaagttcggtgtgttaaggaaaaagatggttgtccctggagagtgcacgcgtataaggggaaatggaaggattattggacagtgtcagtcgttaccaagcatacatgttttctacctggtgttcagaaataccacaggaacattacatgtgcatttgtcgcatctgagatgtatgcgcatgtcatcgataatctcacatacgaaccaaggtcaataatccgacacatcgaggagacatacaagtatactattagctatgccaaggcctggagggccaaacagaaaataatagagatgagatttggaacatacgaagcctcgtatgacaatttgccacgcctgcttggtgttatcgaggaaagaaaccctgggagctcttacgaagtgaagaaattcccatcaattgaacatcctggcaagagtgtgctgcaaagggcgttcttagctctacatgcatgcaagatggcattcgtaaactgtcgtccagttctctgcattgatgggacattcttgacaggaaagtatcggggccagatactgacagcaataggggtagatgggaacaatcaggtattgcccttggcatttgcttttgttgagagtgagaatactgacagctggtactggttcctaggccgactccccctccgcacggagggtttcgtgcaccgttcagcaccccaccttcctcggctaggccttctggtgtgcccccaacagcttacaaggtcccgttgtcgatgtgtaggtttcgcccagttcgctatgacgcaggccgcctacttctcccacgctgcagggtcagcgtctcagccagctgcgtcgacctcgcactcagcgcagttccagcagtacaccggggcttcgtcacaggcagccggcacgtcgagtcagggtccaccactggaccatgctgggacctcgtcggactgcttgctgtcttccaccttgctcttcgacatcactgacttcgacttcgcttcaggctcggcagaggacgtcatcggcccctcacagctgggaggcgcaccatcggtgcagacgcaggaccaggcgcaggccactcctccgccagacactcgtgctacccgtgctgtgccaccggatcgtttcacctactcccaggaccacgtgcgagcacaggcccggaggaccaagcgtggtcgcggcgcggggcagggccagtag

SEQ ID NO: 80916 - DNA, 306 bp, Oryza sativa
  Clone ID: PAT_MRT4530_80494C.1
atgagcggcggcggcgacgttcggcagtgtgggacgggggccagcggcgggagggtggtagggcgggcgggcgagggcaagagcaagggccagatcttcggtgacggcggcggatgggcgctgaagaggcgatggccgtcatgggctcgtggcaggccataccagggtttctcataccgccggagccagggttatcgcgctccgatgggcgacgagggttgtgacaaagggatgaaggagggaggttcaaagctggtgctgggccactacctcaactcggtgagtgatcgatgtcgcaagtactga

SEQ ID NO: 80917 - DNA, 1169 bp, Oryza sativa
  Clone ID: PAT_MRT4530_80495C.1
atatgtcgaacaaacaaatattccaagtttaccatggcctaggaaacgtccgttacgggccaactgtggtagatctgtcagaatttattgtatcaaaaaggggaattgatagactggctgagaggagtgtaccttctataaaaggatggttaatgaggggcttgagagttgatccacagacaagtgacataacaatcaatgttatagtaagtcaggtaactgagggtttttattgggaactaatgccagttcaaaactctcgagtgtggagatggtatgtggaaaatgcattgcaacgcgggtggtctctagctatggttccgtttgttcacccgaaggatccaggtgtgcagatgaacatggatgatggtgagggaccaagtgctgaagtaaatgagacttctgtggaagaggtcaacgcacgagaggacgggggcgtagtagctccagtgggcattcaaccaggtggagtggccgacgagggggagattgtctgtgccattgtggatgaaatggagagggaggattctgacaacgagcgtgtagaggaaggtgattcgtcagatgatgagacggatattaatccagcagattgggctagtgaggatttttctggtttggtcgtctttgaagaggatagtgtgagatgggagtacaaagaaaatgaggttattcagggagcgatttatactagagcagaaaatatgaaggaggcggtaaaacattttgcagtgtcacttcatagagagttttgggttgccaagtccaaccggtcgcaatatgaagttcggtgtgttaaggaaaaagatggttgtccttggagagtgcacgcttataagggaaaatggaaggattattggacagtgtcatttgttaccaagcatacatgttttccgcacggagggtttcgtgcaccgttcagcaccccgccttcctcggctaggccttatgttgtgccccccacaggctcgacagaggacgtcatcggcccctcacagctgggaggcgcaccgccggtgcagacgcaggaccaggcgcaggccactccgccgccagacactcgtgctacccgtgctgtgccaccggatcgtttcacctactcccaagaccacgtgcgagcacaggcccggaggaccaagcgtggtcgcggcgcggggcagggccagtag

SEQ ID NO: 80918 - DNA, 2730 bp, Oryza sativa
  Clone ID: PAT_MRT4530_80496C.1
atggagagggaggattctgacaacgagcgtgtagaggaaggtgattcgtcagatgatgagacggatattaatccagcagaatgggctagtgaggatttttctgggctggtcgtctctgaaaaggatagtgtgagatgggagtacaaagaaaatgaggttattcaaggagcgatttatagtagagcagaagatatgaaggaggcggtaaaacattttgcagtgtcacttcatagagagttttgggttgccaagtccaatcggtcgcaatatgaagttcggaaagtatcggggccagatactaacagcaataggggtagatgggaacaatcagaagtttacaactgggtgatgcgcggtgtccgtggactgccactagttggcatagtggagttcattttacatgggacatgcaggtattttagggatcggttccaggcagttcttccctctatgccgaacaacagcattttgtttggaactttcatgcaaaaaaagctagaggagttgcgtaaaaaggccatgaaacatcgagctctagtgcaaggtacccaacagcacagcggcgagatttatgggttcggcatagctggggagttcacagagactaacgatgaagtactcaatattcctgacccatcgaagctccgagacaaggctggaaggaggaagactcgtcgcatccgcaacgatatggacgagtcggaggctggcagggtgaagcgttgcagcaaatgcgatgaacgtgggcacacctacaagcattgtcctaaagacaaggagaaaccaagtgcggcggaggcaggactatcaggatcagcagcagatggagctcgccctacggagatggcacgtcaggatacacctcagttgttggacccggcgatagatcaccgacaccggtctcaccttactgcggtgcagggggctcagcttgggacgttccgggcacggacgtgcggtgagctacttacggttcacgactcctttgtcgagaggctgcgtgaggccggcctcctaccgatgtgtcggctggtggaggctaccgccggcgacgcggacccggccagacgatggactgtggaccggtccctcctagcagctttggtcgaccgatggaggccagagacgcacacttttcacttgccgtgcggtgaggtcgagcagctacaggcggaggccgacgagtactcctacagccgctgtttggaggcatacttgctctggctttttggctgggtgatgttctgtggcggtcacgggcacgcggtcgacaagggactcgtgcactacgccaggagcatcgccgacgccgtggtaggcgaggtgcctcagtggagctggggttccgcgttgttggcggctctgtaccgtggcctttgtgaggtttgcacgaagacggatcccagcgcgacctttggtgggtgccctctctttctttctatctgggcagctgagaggattgcgatcggccgccctgaggtggaccagcacgcgtacgaggagtcactgtacgcggagcgaccagaggtcgactaccatatgatgggtactctgtggtgccgtcgtcagcgccgatgggctcacgtccaggttaggcggtcgtatcttgagtttgttatggagtttgaccgccttctgccgactgacgtcgtgtgggagccctacagtgccgcggctacccaggctcgtgcgccgttgggtctgtccacactctgcactagggaccaggcatactggatgactacggttctgatggtcttcgacatctgcgttgagcctcacgcccctttccgcgtgatgcagcagttcggcttccgtcagccctttccagtactgtttccgacgaccgtcccagctgctgttcaccggtactcgcgcaagggtcagcagtcagctggcgactggcccgccaagttgacgacttttattgaggactggttgttcgcaaccgaggaggtcgtggaccacgagagagagccacacactgaggaggcgtaccaggcctacctacgcgggtaccaaccatgcacccgtactagggtcaccttcgctcccttggagcagcagccccacgttgcgagcactagagacctctacaccaggcaccgtgaccaggacttcgctcgtgctgtcgacgacatcaaccgggtcgtcgttgacggttcaacgatgatccaacgtttaggcgcggggattccgggtttcgtgcaccgttcagcaccccgccttcctcggctaggccttctgttgtgccccccacagcttacaagggtcccgttgtcgatgtgtaggtttcgcccagttcgctatgatgcaggccgcccacttctcccaggctgcagggtcagcgtctcaggcagctgcatcgaccttgcactcagcgcagttctgcagtacaccgggacttcgtcacaggcagccggcacgtcgagtcagggtccaccactggaccatgctgggacctcgtcggaccgcttggtgccttccaccttgctcttcgacatcactgacttcgacttcgcttcaggctcaacagaggacgtcatcggccccttacagctgggaggcgcaccgccgaagcagacgcaggaccaggcgcaggccactccgccgccagacactcgtgctacctgtgctatgccaccggatcgtttcacctactcccaggaccacgtgcgagcacaggcccggaggactaagcgtggtcgcggcgtggggcagggccagtag

SEQ ID NO: 80919 - DNA, 1341 bp, Oryza sativa
  unsure (1)..(1341): unsure at all n locations
  Clone ID: PAT_MRT4530_80497C.1
cccacgcgtccgcccttctgttgcggcgagccacactcccaagccgaggagctctcgcttgcgacancaatggagctaggcctcgcgctgcggctcgtcgcgccgccgcctcgtctcccctgtagagctctccagccgccgccgatgccttgtttctctccgtgtgcggcccgaagaagccgcatccgctcctcgaggttggagcgcagggttggggttgttgtatccggtgggagtatggcttccttggcaatggaggaggaggaagaggaagagtgggaagaagcggaggaagaagcggaaggatggcaagaggaggaggctgcagtggtgacgacgaggccgcgtctggagctcatcgagaagccggaccggagcctgtgtctgctcgacgagtacgagtcggaggagctaggcacctctcattgtgccaaccaccgcagcggttatgttgctgtattaggaaagccaaatgttggaaagagcaccctaattaaccaaattgttggtcagaaactttcaattgtgacagacaaaccgcaaaccacacggcatcgcattcttggtatatgttctgaaccagaataccagataatactttatgacacgccaggtgtcatcaaaaaggaaatgcataagctagacacaatgatgatgaagaatgttaggagtgccgttggcagtgcagattgtgtgcttgttgttgttgatgcttgcaaaatgcctgaaaagattgatgaaatactggaagaaggtgtggggaacaaagatactgagcttccagtactgttggtattaaacaagaaagatctcataaagccaggagaaattgcaaagaaacttgagtggtatcaaaaattcactaatgctgatgacgtcatacctataagtgctaaatttgggcatggagtggatgatatcaaggagtggatattatcaaagctccctctggggcctgcttactatccaaaggacatagctagtgagcaccctgagagattttttgtgggggaaatagtgagagaaaagatttttcttcagtatcgtcaagaaattccatatgcttgtcaggttaatgtcataagttacaagagcagacctacagccaaggattttattcaagttgagatactcgttgagaaggaatcacaaagaagcattatacttgggaaggatggaaaagcaatcaagatgctagcaacagcatcaagacttgatatcgaggatttcctacaaaagaaggtctatcttgagataatggtcaaggtgaaggaaaactggcggcaggatgaacttcttttgaagcgttatggctatggaggggagattcaagcactatga

SEQ ID NO: 80920 - DNA, 461 bp, Oryza sativa
  Clone ID: PAT_MRT4530_80498C.1
cgggctgcaggttagtgataaatcagtcataacaaaataaatgataatattttttttttttgcaatagaatggtcaatatctcgaaaggtcaactgcgtcatctattaaaaaacggaggtagtaatataaatgtgttgcctggttgataaaattgcaatgtgatacataactactttctgaaaaggtagaccttaggtttctagataattttcccctcctagatgcttatgagtgttctccttaaagagaaaaaggaggctatattgtgcacatgctctgggatataccgcgttcaacaattaagcatgtgatccatggcttagagtgttttatttccttggctccatgcaaaatcttgtagtagagtatttgaaccccataaaaaaaattggtgggtggatctaccatgatcagggttttagaaactgcaacaacagtcaaaactggatcccgtctttcc

SEQ ID NO: 80921 - DNA, 368 bp, Oryza sativa
  Clone ID: PAT_MRT4530_80499C.1
cccacgcgtccgagctcactatcgcgtagcttaaggccatctgaagacatttgaatggatatggatctccttcattttaaatagcatttgggtactgtgctcaaactcatcatggcatcttcatatgtgacgaaatgaatgtaaccactcagctcaagcccatggcctactcatgacacgtgtggcgcaaccgacgaggctgccgccgagcgagagcttcaagagccccacctcgccgtcgttcagcttgaacggctagcgcatgcagcagcacaagctaccgcggagctcggcttcgacgcccggcaccccggcgccgtcgcgccaccacctcaggtcgctggccatcacctgcatgacgatcagga

SEQ ID NO: 80922 - DNA, 195 bp, Oryza sativa
  Clone ID: PAT_MRT4530_8049C.1
tttttggagtcagacatgcatttgcttttattgagctcacctactcagaggatgccactactataaaacatcaaataggtatcggcactctagatgccagaagtgctaaaaccggtacctataggcctttttcctacttccgccggttgaaatcgtaaaaaagatacctttaaagaactataggtgttggttcta

SEQ ID NO: 80923 - DNA, 437 bp, Oryza sativa
  Clone ID: PAT_MRT4530_80500C.1
gatggcgcatctgtttttgtccgagctgaaggaaatacttagcctgatggtgtcgcgccagcgcaggaaacacatcgctcctgggaggctcatcaacacagcttgaatgctgcataaagattggcattggtggtcggactagatgctgtacggccaacagactgcgttgatgagatcctgaccaaacaaaaagaaagggaatcttcattaagacctgacgaacgatggcgaataaagattatactaggttatctattgcccatagcgacatatctatgtatgtctgtcaccaggccgccatcgtggagagagattatagggttatggccgggaccggatctcttcatctagtctatttcaagataggggacatcggtacagagagatcgatcgtgacactgacattatgctctcgcacgaggcgccgaacgacaacc

SEQ ID NO: 80924 - DNA, 1079 bp, Oryza sativa
  Clone ID: PAT_MRT4530_80501C.1
cccgcgtccgggtcccgccacgcccacgttcctctcgtctcgccctgaatcgatctcctccgtcgatcgatcggaagagttgggagttgggaagctatagctacggtgattcctcgagctggaccagaccgaggcctgaaggttttccatcgaccgatcggtgaatcacccggtgctagtatacgtaccccggccgccatgtcgttcaccggcacgcaggacaagtgcaaggcgtgcgacaagaccgtccatttcatcgacctcctcaccgccgacggcgtctcctaccacaagacatgcttcaagtgcagccactgcaaggggaccctctcgatgtgtaactactcttcgatggatggtgtcctgtactgcaagacgcactttgagcagctcttcaaagagacggggagcttctcaaagaaattctcgcaaggtggtaaatcttcagagaagagcgaccagggaagagctcctagcaagctatcttcagcattctctggaactcaagataaatgtgcagcctgccaaaaaactgtgtacccattggagaagctaactctggagggtgagtcttaccacaagagttgcttcaagtgctcgcatgggggctgcatcctgacgacgtcttcctacgcggcgctcaacgggatcctctactgcaagatccatttctcgcagctgttcaaggagaagggcagctacaaccacttgatccagaccgcacaatcgaagcagaaagagtccgaggaggctgcaccggtggcggccacagaggccagcgagaaagaacaggaagtgcccccacaagacgcgacatagagcaaagattagggggaaaacagaaccgatatatatatatatatatatatatatatatagacataagaaaaatcctcaattatcagctagtaatttgatgtattatcctcccttgcttcctctttctttctttttgttccacctcttaaagaccgaaaacttgcttatcatttctttgacaaactgcaactgttgtacttatttctgtatgaggctatggagccatgacattggcacattggcaagaatctgttcattgc

SEQ ID NO: 80925 - DNA, 219 bp, Oryza sativa
  Clone ID: PAT_MRT4530_80502C.1
atgctgaactacatgatagaaacttacaattccagtacaggtgtacgaaacgtaggaaaaggtagtaaacaggctaacctgatcagaaaacagcagcggagattacactcggacaaaatccgtttgcagcggcaaccaagacagcatgtgcatgccctgtccgtccagtacgagtggatcaacaggtcaggcaccttgatgatgatactatggtggtag

SEQ ID NO: 80926 - DNA, 327 bp, Oryza sativa
  Clone ID: PAT_MRT4530_80503C.1
atgacgatgagaggtgattgttgcgctgacaaagctgtgttgggggaagagggcaggggtagggggcatccacaaagaagaggttcgctggcggtcattgactgcgatggatccaacagcgatatcaagatgaaacaaggttatatgtcgatgaaggcattagtcgatgacagaaccccaaaagactcatgcaagttcaccatcacacctggcccctgttttccaatgttgtgccttactgccacgcgcaagtcgctgcaatatctactggcaagtgcactcctgagggatgccaatgcacctactgtcttccgtctccacctctag

SEQ ID NO: 80927 - DNA, 477 bp, Oryza sativa
  Clone ID: PAT_MRT4530_80504C.1
atgcgtatgatgggagggagtgcggggaggggcggcaggcgcggggagggcggtcggcctaagggcgctgggacggcgcggcgcgcggagagcgaggcgacggtgacgcacggcgacgcgacggcgcggggctcggagcggcgacgcgacggcaggacggcgacaggcgagcggcgcgcggcggctccgggcgcgaggctgacggcgacggctcgcggcgcgcggcgatggcgacgtgacgggcgacgcgacggcggagtgactggcgcgcggcggcgcggcgcggcgcgcgcaggggcggcgcggggctcgagggggagcgcggggctcgagagcaccgcgacggtgagcggtgcggcaatgatggcgacgacgcggtgcggcgacgcgagggcgatgggacggcgcggcgcgacggtgacagtgcgcggcgcgggcggggctcgaggcggtgatggcgacgcgctggcgcggtag

SEQ ID NO: 80928 - DNA, 603 bp, Oryza sativa
  Clone ID: PAT_MRT4530_80505C.1
atgagccaatcgccgccggactcctcctccgcggcggcggtgcccctggcgccggggtttcgcttccaccccaccgacgaggagctcgtctcttactacctccgccgccgcatcctcggccgccgcctccggatcgacgccatcgccgaggtcgacctctaccgcctcgagccgtgggacctcccctccctctcccgcatccggagccgcgacgcgcagtggtacttcttcgcccgcctcgaccgcaaggtcaccggcgccggggccggcggccgcggcggccccgggaacaggaccaaccgcgccacgccgcgcggctactggaagaccaccgggaaggaccgcgatgtccaccaccgcggcaagctcgtcgggatgaagaagacgctcgtcttccactccggtagggcgcccaagggccagaggaccaactgggtcatgcacgagtaccgcctcctcgacgccgacggcacccaggtacctgtgaaatcatttgatccatctcaaatttcgcaggatctaccgtaccacgagatcacgagattagcggtagcaccaaaaaaattctgttcttttagcttgtctcctgctaggcttgtgtga

SEQ ID NO: 80929 - DNA, 2100 bp, Oryza sativa
  Clone ID: PAT_MRT4530_80506C.1
atggaggaggcagtcaacgcatctgccgctctggatcccaagcttgctcctctgctgctgttcggcggccacggcgacgccacgttcctgtacagcgtgccgaagagagcgctgctggcgccaatgccaacgccaacgagggtgggcgacggcggcgtcgacgacatgatgagaggccaccgctggtggaccacggcgcagggctggttgctcatggcgcgccgcggctcgccgtgcactttcctatgggaccctttcaccggccgccgtgtcaggctgccccccgaccacgacggcaccgtcctcaccgccgaaggcagccatcgccggaggtgcctcctgtcatgctgtggtcccatggacccgaccagctgcaccgatctcgtcatcgacctcgccgacccggagctctggtattgccgtcccggcgacaaccactgggtgaagctccatcagcaaccgtaccagtaccgcaaccctgcccaccgtgacgccatcatcagttttttacgcaagtttacggcgatcgacggcaagttctacaccgaactacacaccggcaatgtcggcgtcctcgagttctcgccggaggtggcgttcaccaagatcgctgtacacgacgacgataggagaccggcggtgtacaagaaacgtactacttgcttcgtggaatcaaacggggagctgcactccgttgtcttctctcacccgatcggatgtgaccggattgtcgcgcgtgtaggcgtttacaggttgagcattaatgcggcggcaacgcaggagcaaagatcagcagcatgggtgaaggtggattcgctaggtggcagagcgttcttcgttaagataggcagttttggagcgtcacttgatgcggagggaacaggcttgagagggaactgcgtctactactcggtgttcaatgggaaagtgttgtgtgtatacgacatggaacgaggaactacggctgtaatcgatcccggcacacatcttccgtatcaccagtcaccccaagtattgatgccaacatttcctagatatcatggcggagcaactcgaagtgttgaaagcatctatcaggttgggccaacaattcaggaaaatgcttatgaggtaaaagacactaagggaaccgattgtgcatgtgtcgctgctgctggtacagttgaggcagagaggttgctggacgtggacttggtctacggaccatttgagcacgtagggctggttgtactgtgctgcttgctgctgcatgtatctttttttttcccgatcagagatcgggtttgcgtcgtccaccgcctcgtcgatatctacgcgtctctgacatcggcatcgacttcgtcgtcctgccccgcgcatcttcggcttgatcacccgttcaagcgtccgactacaacgacttctgtaaccgatcgtcatcgagcatgcgtctacgccatcaagctctgggttgccgctgtgtcgcctccttgggccgcagtgccgctgcctatggtccacacctccattggctattgcaacgctgagaggcgcccttctcagcgtggcctcaccgccggtggacttctcgccgctgcatcgacatggagctgcagctgtgctgtcctctcggaccatagctttgccactttcgtcgtcttcatcgccgttcgcgcatcgacaacctcgtcgtccgcactggtcatagtcagccgctcggggtctccttcctctacttcaagcatcgccgccgcatctccaagctgccactgtcgccactctaggccggtggtgcagctacctctacatggctaccgatgtcgccgtccaggccgttggtcccgctatttcgccttctactttgtccagcatgactcatcgccagcgtcgccgtatcttcctcgactacacttcgctcttctccggcaactgcgtgctgctccggcaattctccctctacgccgttctcgcgctgcgactgtcccagaggccttctctgctagtctcctccgacattggcgtatgattcatggtggtctcctgtctcgcccgcgcggtattggcaacaccggcgcgcgcgtttgtcccgagttgtcccggggtctggcaagccctgtgtaa

SEQ ID NO: 80930 - DNA, 478 bp, Oryza sativa
  Clone ID: PAT_MRT4530_80507C.1
aaaaaaaaaaaaggggggtttaaaaaaaaaattttccccggaaaaccaagcccccaaatttttaggggtttttgggggttttacacttaaaagggggggcccattttccaaccccccttttttaaaaaaaaggggggggggaaaaggaccccttttttaacccgggaaaaaatttggttttaaaagggaacccttttcaccaatttaaaggggaaaaaatttgggggggggtttccccccccatttaaaaaacaggggggttttgaacccaaaggggcgcgcggcccccgtgtgcccggaaaaacttttttgggaaaggggttttccccccccccggggggacaccaaaaggaaaagggccccttggggggggggggggggccccttccccaaaggggccccccaaacacttttaggtgggccccccccgtggaaaaccgccccccggggggctcccttgggagaaaccccccccttt

SEQ ID NO: 80931 - DNA, 3093 bp, Oryza sativa
  Clone ID: PAT_MRT4530_80508C.1
atggcacggggttccgctctgctcgacggaagcgtacttccgccttctcgcatcgtgagcgagaggcacgccgggctgccgcgccgctttatgccggaatctgccaccggcagggagatagtgatgctgggcgagggacgcccggcaccagactacccggggcggtccgtcttcttcctccccttcgcaatggcagggctggttccgccattttcttctttctttatggatgttctggatttctacgatctccagatggcgcacctcacccccaatgcagtgatgacattggtcatcttcgcgcacctgtgcgagatgttcattggggtgcgcccatctcttcggctgttccggtggttcttcaccgtgcagtcggtgtcgccgccgtcggtggttggtggctgctacttccagccgctggggccggtgttgaaccgctacatcccctgcgccctccgcaagaagtgggacgactggaagagcgactggttctacacccccctcgccaacgaagcgcgcctccgacttccaagtcagcccccggcgcaggtctccagctggcgggcgccggtagatctgggggatgactatgacgccgtcctcgacagcctggcgggcctgcgatcccaggggctcacaggggccatggtgtacggcgactacctccgtcgccggattgcgccgctccaacggcgcgcccggggcacctgggagtacaccgggtccgaagactacatgcggacccaccagggagtcagatgggattgggctcccgaggacttcaagatcgtggtccaaagggtgctgaatctcagctccgtggaggcgtctctcattcctcaaggaatcctccccctctgcagcgatcccgaccgcgcctccattctgaccattatgatgggggtcggggcctcagaggaggaaactcctaagggccacgacggcgcgggcgagagccgccggggggaacaatctaccccaggagggggtcgtgcttctgggccccgcgtcgggggctcggggagcagccgccctgccgacgcccaggggaagaggaagctgggaggaacacctcccccatctcctccccgagggggcggggcggtgcgtgccagcagtcggcgcccggagggggccgcgctgacatcgcagcccgagggggagcgcaagaagaagcggccccgcaagatgggggagacggaaccatcccggggaaatctgatttcccctccaaggtggtcatttaaccgaccccctcgcagcgatgtcccgtcacgttcctcccgccatcccaagtctggccagtccgaggccgaagatccggcggccgcagaggaacggaggcgagaatctgaccggcgagaggccgcagatcgccttcgggaagctgaagaggccgcccgggaggccgctcgggctcgccatgcagaggataccgctcgggaggaggccgcccgggctcgccaagccgaagaagctgctaaggaggaggccgcccgggctcgtcaggctgaggcgatggcgtcttccgaggcagctcacgacgaagctgctggcgcgtcgcttgggcccacttccccaggcgacgcccaggaccaaacgggtctgggggacatccccgagcccagcgcgtcctccggcgggccgagccgcgtcgcattctctccaaggcggctcttcccctcgtcttctgtcgccccgctgagcgccgagccccttctgcaggccttggccgccgcaaacaccgcggtgctagatgggttcagcgcccaagtggaggccctgcgagcggaacgagcggagctcgaggccgcatgggcgcgtgtcgaggaggggcggcgctcggtggatgtcatggtggaggtgggccgtaaggctcaccgccgtcacgtctctgagcttgaagcccgcaaagcggcgctggcagagatcgcccgagaggtggaggaggagcgggaggccgccctcattgccaccaccgcgatgatcgaggcgcaggacaccctccgccttcaacacgggagctgggaggcggagctaaagaaaaagctcgacgccgcccaaggggtccttgacaccgccgctgcccgagagcggcaggcaacggagattgaagcggcgtcccagcggcgtgaagaggccctcgaggcgcgcgccatggcgctggaggagcgcgtctgcgtcgcggagaaagtcctggcggaccgcgaggccgccgtcacctcccgggaggcaacgctggcggcgcacgagtctgcctgcgccgaagaggagtccgcactccgcctccgcgaagacgcgcttgccgagtgggagcgagctctcgaagaggccgaggccgaagcgcaacggttggcggactccctgtccctccgtgaggcagcgctgacggagcaggcccgccgcaatttggaatccgtccgcgccgagagagccgcactggagcagcgggctgccgatctcgaggcgcgggaaaaagagctggacgcgagggcgtgcatcggcggggcggctgcgggcgaaagcgacttagccgcccgcctcgcagctgccgaactcaccatcgccgacatgcagtgcgcgctagactcatccgccggggaagccgaggccctccgcttggcgggcgaaatagggcccggcatgctttgggatgcggtctcccgcctggatcgcgccggacggcaagcgggcctctggaaaggccagacaaggacgcactccaccaacctggaaggcctcgcttcgcacctcacgaggatggcctgggctcttcaacaactccccgaggagctcgagaagaccatcaagtcatcctcgagggacctcgcccaaggagcggttgaactcgtactagcgagttaccaggccagggaccccaacttctctccatggatggcgctggaagagttccctcccgggaccgaggacgacgcgcgtgcgcgggtccgggatgccgccgaccacatcgtccacagtttcgaggggtcggcccctcggctcgcgttcgcccccaactccgacgaggagggcgatgccagcggtgcagacgatcgtgacgacgaggccggcgacccgggcgcatcggactga

SEQ ID NO: 80932 - DNA, 3213 bp, Oryza sativa
  Clone ID: PAT_MRT4530_80509C.1
atgggttccgtctccggcatcgacgacttcgtcttccctcccgggcaagcgttctggttcagcagcctcgacttcatcaccaacgacttcggcaagatttctctcctcgactcggattcaaatcagtcagggagagaccaggtcccagccccgttcggtattccgaactcggccgagatctaccccaagcttatctcgatcaagtcggctccaaaccacttggacgagatcccatctacttcaacaccaccagatcaagatgatggggcctacccgccaatcctgatgaaactccccgacgatctggctgtcgtcttcactacaaggacgtcttctccccgtaggcctaagcgggatccggctttagcatggatccggcctagctccagggaagtcggcgtcatactccagccactcggcacgatttcgacggatcaattggaaggctacttcagctcccccggcgtcgactcacgaccaacagagatcgtagaacggaagaacaacgccaagcccgagaagcagaagcacgacgcgtacaataggaggccgagcgacgccgactggaagaggagcgccaagcacaagagcaagaacagctgcagcaacgcggttgcggcgatcactctcctcgacaccctcctcaaggaagacgcactcaaccaagctgatcacgttatcaacatcttgaaccagaccaagaccatgattgccgcctcggtcccggttaactccgcaagcgtccgcacgccgactggtagccgagttccccatcttcggtctcaagattatcaccagccaagcctcagcattgctggcgcgggatacaattgcaggagcaggggccacaacgagcgatctgtccactcgcctcccgaacgacacagggagcgccgagttgaacggcctcgctccccacctcgtaggcgccccgtcaatcttcgtgatacaatcaatcagcgccgcgtagcacgaggctacgcgcaccgccattctccggatcgctatgacgacgacgtggatggagttgctgcctttactaacgacctgcgtcgagtggattggccagccggcttcaagccgactagaatcgagaagtatgacggcaccactaatccggagtcttggctcaccgtctatggtctcgcaatccgtgcagcaggaggagacagcaaagccatggcaaactacttgcctgtggccctagcggattctgctcggtcctggcttcatgggttaccccgtggcacgattggatcatgggcggagcttcgcgaccacttcatcgccaacttccagggcacctttgaacgcccttccacacagtttgatctctacaacgtcattcagaagtctggagaatcccttcgagattatatccggcgcttttctgaacaacgcaacaagatctccgacattaccgatgacgtcatcactgccgctttcaccaaggggattcgtcacgaagatctagtcggcaagttcgggcgcaagcctcccaggacggtcaagcagatgttcgagaaagccaacgagtatgccaaagccgaagatgccatcatcgcgtccaagcagtcgggtcccacttggaagccaaagaaagatacgccgactatgggagggggtggaagtaccaatcacaaggaccccaaagattgcttcgtctacaagcagtttgcagaacaatacgccaagaatgcatggaaggcctccgacggagatcaaagcacgtcaaaaaagaaggacgatgacgacgatgccccgacaggttttcaagaccatcgcaaggagctcaaccacatctttggcagacctctagcttatgaatctaaaagaaaacaaaagctgaccgaacgggagattaacgctgttcaacccgacatgccccaatatcttcggtggtcagagacaacaatcaagttcaaccgctcggatcatccagaccgagtggtccacccggggcggtaccccctagtactagacccagtgatcactcttccagtcaccttcggtactcgggagaacttctgcacagaaaacgtctgcttcgaagttactgatttcgagacagcgtatcacgccatactggggtgcccggcgttagccaaatttatggctgtcccgcactatacctacatgatgatgaagatgcctggtcctcgaggagtcatatccctgcggagcgacatcaaacaaaccgtcacatgcgacaaggaaagctacgagatggcccaaacccgagagatcgcgatcgcccgagaagacatccgactggctgcaaccacggaaagcgcactcaccacctttcttcaaaataataaagatatctttgcgtggaaaccatccgatatgcctgatattcctagagaggtgattgagcactctttacatgataaggaagacgctaaacccatcaaacaacgactccaccgctttgcacaagataggaaggacacgatcaaggaggaattgaccaagctgttagcagcgggcttcattaaagaagtccttcatcccgactggctggctaacccagtcttggttcagaagaagaccgggcaatggcgcatgtgcgtcgattacaccgacctcaacaagtcttgccccaaagaaccttttgggttgcctcgcattgaccaggtagttgactcgaccgccgactgcgagctactcagttttctagattgctactcaggatatcaccagatccgactgaaggaatccgactgcttgaagacttcattcatcacgccctttggggcctactgctatatcaccatgccttttggattgaagaatgcaggagcaacttaccaacgcatgatccagagatatttttcgactcagatcggccgcaacgtcgaagcttatgtggatgacgtagtcgtcaagaccaagcagaaggatgatttgattacagatctagaagaaacctttgcgagcatccgcgctttcaggatgaaactaaaccctgaaaagtgcatcttcggagtaccgtcagggaagctgcttagatttgtggtgtcccatagaggcatacaggccaacccggagaaaatcaacgccatcctcaacatgaaaccgccgagctcccagaaagatgtccaaaagctgactggttgcatggcggcgctcagctggttcgtttcacgactcggcgagcgggggatgccattcttcaagctgttaaagaaagcagacaatttccagtag

SEQ ID NO: 80933 - DNA, 220 bp, Oryza sativa
  Clone ID: PAT_MRT4530_8050C.1
atcgccttcctccacctccaccccccacccgccgatcgctttcctcgagctcgtgccgtttcaaagggcaaacgctctacccacccattcaccttcacctttctgcgcgataccccgagaggcgaggcgaggcgaggccgttatagatccgctccgttccctgaccaccacgacacggttggcggctggatcctccactccacccacttactccgatttc

SEQ ID NO: 80934 - DNA, 428 bp, Oryza sativa
  Clone ID: PAT_MRT4530_80510C.1
ggagagaactagtctcagttttttttttttttttttggtcagagaaataaaacagagctccatgttgtaaaatatttagtataggcctatggcgtacacaattaatccaggaacggattgatacacacagacagatccatgaaatggaaaaggccaccgcaaaattttgactattgaaatctagaaaataggttagtccttcaaggaagcaatccgagggcttggtaacaaaattggtaatgattggagataggttagtctttgagcgctgctgcaccatgacgtctttctttcttgtaacgagattgatctggatcaaagccaccttcctctgcacatagacagcccaggaaggtgtgagagccatgtaatcttggctcctaaaaggctttccggatgtcaccagttcatggaatcgatcataatct

SEQ ID NO: 80935 - DNA, 3102 bp, Oryza sativa
  Clone ID: PAT_MRT4530_80511C.1
atggcacggggctctgctctgctcgacggcagtgtactaccgccttcccgcatcgtgaacgagaggcacgccggactgccgcgccgcttcatgcctgagtccgccaccggtcgggagatagtgatgctgggcgaggggcgcccggcaccagactacccggggcggtccatcttcttcctccccttcgcaatggctgggctggtcccgccattttctcatttcttcatggatgtcctggagttctacgatctccagatggcgcacctcacccccaatgcggtgatgacattggccatcttcgcgcacctgtgcgagatgttcattggggtgcgcccctctcttcagctgttccggtggttcttcaccgtgcagtcggtgtcaccgccgtcggtggtcggcggctgctacttccagccgcgggggccggtgttgaaccgctacatcccctgcgtcctccgcaagaagtgggacgactggaagagcgactggttctacacccccctcgccaacgaaacgcgcctccgacttccaagccagcccccggcgcaggtctccagctggcgggcgccggtagatctgggggaggactacgacgccgtcctcgaccgcctggcgggcctgcgatcccaggggctcaccggggccatggtgtacggcgattacctccgccgccggattgcgccgctccaacggcgcgcccggagcgcctgggagtacactgggcctgaagactacatgcggacccatcagggagccagatgggattgggctcccgaggacttcaagatcgtggttcaaagggtgctgaatcttagctccgcggaggcgtctcgcattcctcaggagatcctccccctctacagcgatcccgaccgcgcctccattctaaccattatgatgggggtcggggcctcagaggagagagcccctaagggccacgacggcgcgggcgagcgccgccggggggaacaatctgccccaggagggggtcgtgcttctgggccccgcgtcgggggctcggggagcagccgccctgccgacgcccaggggaagaggaagctgggaggaacacctcccacatctcctccccgagggggcggggcggcgcgtgccagcagtcggcgcccggagggggccgcgccgacgtcgcagcccgagggggagcgcaagaagaagcggctccgcaagatgggggagacggaaccatcccggggaaacctgatttcccctccaaagtggtcatttaaccgaccccctcgcagcgatgccccgtcacattcctcccgccaccccaagtccggccagtccgaggccgaagatccggcggccgcagaggagcggaggcgagaagctgaccggcgtgaagccgcagatcgccttcgggaagctgaagaggccgcccgggaggccgcccgggctcgccaagccgaagaagctgcccgggaggaggccgcccgggctcgccaggctgaggcgacagctgctgctggcgcgtcacttgggcccactccctcgggcggccctcaggcgacatcctccgaggcggctcgcgacgaggccgctggcgcatcgcctgggcctacctcaccgggcgacgcccaggaccaaacgggcccgggggacatccccgagcccagcgcatcctccggggggccaagccgcgtcgcattttctccaaggcggctcttttcctcatcttctgtcgccccgctgagcgccgagccccttctgcaggccctggccgccgcaaacaccgcagtgctggatgggttcaacgcccaagtggaggccctgcgtgcggaacgagcggagctcgaggccgcatgggcgcgcgttgaggaggggcggcgctcggtggacgccatggtggaggtgggccgtaaggctcaccgccgccacatctcggagcttgaagcccgcaaggcggcgctggcggagatcgcccgagaggtggaggaggagcgagaggccgcccttatcgccaccaccgcgatgatcgaggcgcaagacaccctccgccttcaacacgcaatctgggaggcggagctgaagaaaaagctcgacgccgcccaaggggtccttgactccgccgctgcccgagagcggcgggtaacggagactgaagcgacgtctcggcggcgcgaggaggcccttgagtcccgtgccatggcgctggaagaacacgccggcaccgtggtgaggggcttgatggaccgcgaggccgccgctgctctccgggaggcgacgctggcggcgcacgaggccgcctgcgccgaggaggagtgcgcgctccgcctccgcgaggacgcactcgctgagcgggagcgggctctcgaggaggctgaggccacgaccaaacggctggcggacagcctgtcccttcgcgaggcggcgcaggaggagcaggcgcgccgcaatcttgaatgcgtccgcgccgagagagccgcactggaacagcgggctgctgacctcgaggcgcgggaaaaggagctggacgcgagggcgcctatcggcggggcggccgcgggcgaaagcgacttagccgcccgcctcgcagctgccgaacacaccgtcgcggaaatgcagcgagcgctggactcctccaccggggaggccgaggcccttcgcttggcgggcgagattgggcccgacatgctttgggatgcggtctcccgcatgaagcgcgccggtcggcaagcgggcctctggagaggccagacgtcggtgccccccaccaatctggaaggcctcgctccgcacctcaacaggatggcctgggttctcgaacaactccccgaggagcttgagaagaccatcaagtcatcctcgagggacctcgcgcagggagcggtcgaactcgtgctggcgagctaccaggcccgggaccccaacttctctccatggatggcgctggaggagttccctcccgggaccgaggacgacgcgcgcgcgcgcgtccgggatgccgccgaccacatcgtcaacggtttcgagggctcggcccctcggctcgcgttcgcccctagctccgacgaggagggcgatgccagtggtgaggacgacggtggcgacgaggccggcgacccgggcgcgtcggaatga

SEQ ID NO: 80936 - DNA, 489 bp, Oryza sativa
  Clone ID: PAT_MRT4530_80512C.1
tcagccgacgtgggagcttgcgtcgccatcgccgtcgccatggggtgtgcgccactctcgccagccgcccgccgccgcgactcctatcgcgcacttggtcgctgccgctgccactccgcttggccgacactgccgctccaccggccacgcgctcgtccaccgccgctgccaccccgctccactccgccagccgccatcctcgccatctttgccgtgaccgacgccaccccgtgcaagcgcgctccttgtagcagcacagtccatttcagatcttatcaagttcgccttggcctttctctggtccaactgcttcttggacattctgttctttttcatgacgtctgtaaaagccatacacaataactttgtcatataccgctgccgcgatgccgggcgttcgtgaagcgccagtgcgtcgcccccggcacggtggacgagcaggtccggcgaggctgctgccggcagctcgccgccatcttcagccgccat

SEQ ID NO: 80937 - DNA, 936 bp, Oryza sativa
  Clone ID: PAT_MRT4530_80513C.1
atggcgctggaggagcgcgcctgcgtcgcggagaaagtcctggcggaccgcgaggctgccgtcacctcccgggaggcaacgctggcggcgcacgagtctgcctgcgccgaagaggagtccgcactccgcctccgcgaagacgcgcttgccgagcgagagcgagctctcgaagaggccgaggccgaagcgcaacggttggcggactccctgtccctccgtgaggcagcactgacggagcaggcccgccgcaatttggaatccgtccgcgccgagagagccgcactggagcagcgggctgccgatctcgaggcgcgggaaaaagagctggacgcgagggcgtgcatcggcggggcggctgcgggcgaaagcgacttagccgcccgcctcgcagatgccgaacacaccgtcgcggacatgcagcgcgcgctagactcatccgccggggaagccgaggccctccgcttggtgggcgagatagggcccggcatgctccgggatgcagtctcccgtctggatcgcgctggtcggcaggcgggactctggaaagggcagacaataaagcctgccgccaacctgggaggccttgcccagcgcctgtcgaagatggccggggctctccagcagctccccgaggagctcgagaagaccatcaagtcatcctcgagagacctcgcccaaggagcagtggagctcgtcctggcgagctaccaggccagggaccccaacttctctccgtggatggcgctggacgagttcccacctgggactgaagacagcgcgcgcgcgcaggtccgggatgccgccgaccacatcgtccacagcttcgagggttcggcccctcggctcgcgttcgcccccaactccgacgaggagggcgatgtcagcggtgcagacgacgtggaagacgaggccggcgacccgggcgcatcggattga

SEQ ID NO: 80938 - DNA, 317 bp, Oryza sativa
  Clone ID: PAT_MRT4530_80514C.1
aaactactaaaaaaaggtatccattaagcctactcaagcagcataggtttgcattaacatgaacctgaggaccaatcaaagctagctccgaccgccctcgacctgcttcggcaactagagtcaaatcaatccatcaacataacccaaagagaaaatcacctactatacatgctacacttcagggcccaccccaaaagactacttacacttgattgaaggaacaggaatggaaacatacgcagctatttcaggtatgcaaaataaattgcctgaggaagctcccgtagtgtacacgattgacccggacgaacctcctg

SEQ ID NO: 80939 - DNA, 3093 bp, Oryza sativa
  Clone ID: PAT_MRT4530_80515C.1
atggcagggctggttccgccattttcttctttcttcatggatgttctggagttctacgatctccagatggcgcacctcacccccaacgcggtgatgtcattggccatcttcgcgcatctgtgcgagatgttcattggggtgcgcccatctcttcggctgttccggtggttcttcaccgtgcagccggtgtcgccgccatcggtagtcggcggctgctacttccagccacgggggccggcgctgaaccgctacatcccctgcgccctccgcaagaagtgggacgactggaagagcgactggttctacactcccctcgccgacgaagcgcgcctccgacttccgagccagcccccggcgcaggcctccagctggcgggcgccggtagatctgggggatggctatgacgccgtcctcgaccgcctggcgggcctgcgatcccaggggctcacagggaccatggtgtatggcgactacctccgccgtcggattgcgccgctccagcggcgcgctcggggcgcctgggagtacaccgggtccgaagacttcatgaggacccaccagggagtgagatgggactgggctcctgaggacttcaagatattggtccaacgggtgctgaatctcaactccgtggaggcggccctcattccccaaggaatcctccccctctgcagcgatccagaccgcgcctccatcttgaccattatgatggcggtcggggcctcagaggagcgagctccaaagggccacgacggcgcaggcgggagccgccggggggaacaatctaccccgagagggggtcgtgcttctgggtcccgtggcaggggcccggggagcagccgccctgccgacgcccgggggaagaggaagcagggaggaacacctcccccatctcctccccgagggggcggggcggcgcgtgccagcagcaagcgcccggagggggccgcgccagcatcgcagcccgagggggagcgcaagaagaagcggccccgcaagatggaggagacagaaccatctcggggaaacctcatttcccctccaaagtggtcgtttaaccgaccccctcgcagcgagatcccgtcgcgtccctcccgccattccaagtccggccagtctgaggccgaggatccggcggccgcagaggcccgtaggcgggaagctgaccggcgcgacgccgcggatcgcctacgggaagccgaggaggccgcccatgaggccgcccgggctcgccaggccgaggaaatcgctcgggagggagccgcccgggcccgccaggccgaggaaactgctcgggatgaggccgcccgagcccaccaggccgaggaagctgctcgggaggaagccggatttcgccaggacgagacgatggcgacttccgaggcagcccgcgacgaggccgcgggcgcgtcgctcgggcccactccctcgggcgacgctcaggcgacaactcccggggcagctggcgacgaggctgcgggcgcgtcgcttgggcccactccctcgggcgacgctcaggcgacaacttccggggcagctggcgacgaggcggcgggcgcgtcgcttgggcccactccctcgggcgacgctcaggaccaaacgggtccgggagacatccccgagtccggcacttccatcggcgggccgagccgcgtggcatcttctccgaggcggcttttccccacgccttctgctgccctactgagcgcagagccccttctgcaagccttggccgccgcaaacaccacggtgttggacgggttaagtgcccaggtggaggccctgcaggcagagcgggcggagctcgacgccgcgtgggcgcgtgtcgaagaggggcgacgctcggtggaggccatggtggaggtgggccgtaaggctcaccgccggcatgtctcggagcttgaaacccgcaagaaggtgctggcggagatcgccaaggaagtggagaaggagcggggggctgccctcatcgccaccaccgtgatgaacgaggcgcaggacaccctccgccttcaatacgggagctgggaggcggagctaaggaagaagctcgacgccgcccagggggtgcttgacgctgccgctgcccgagaacagcgggcggcggagaccgaagcgacgtcccggcggcgcgaagaggcccttgaggcgcgcgccatggcgctggaagagcgcgcctgcgtcgtggagagggatctggcggaccgcgaggccgccgttaccatccgggaagcaacgctggcggcgcacgacgctgcctgcgccgaagaagagctcgcgctccgcctccgcgaggacgcgctcatcgagcgggagcgagctctcgagggagccgaggccgcggcgcaacagctggcggacagcctgtccctccgcgaggcagcgcaggaggagcaggcgcgccgcaatctggagggtgcccgcgccgagagggccgcactgaaccaacgggccgctgagctcgaagcgcgggcgaaggagctggaagcgagggcgctcagcggcggggcggccgcgggcgaaagcgacttagccgcccgcctcgcagatgccgaacacaccatcgccgttctgcagggcgcgctggactcgtccgccggggaggttgaagccctccgcttggcaggcgaggtcgggcccggcatgctttgggacgccgtctcccgcctagatcgcgccggtcggcaagtgggcctctggagagggcggaccgtaaagtacgccgacaaccagggaggcctcgcccagcacctctcgaagatggccggggctctccaacggctccccgaggagctcgagaagacaattaagtcatcctcgagggacctcgcccaaggagcggtggagctcgtcctggcgagttaccaggccagggaccccaacttctctccatggatggcgctggatgagttccctcctgggactgagaaccgcgcgcgcgcgcaagtccgggacgccgccgactatatcgtcgacagcttcgagggctcggcccctcggcttgcgtttgcccccaactccgacgatgagggcaatgccggtggtgtagacgacagtgacgtcgaggccggcgatccgggcgcatcgggatga

SEQ ID NO: 80940 - DNA, 317 bp, Oryza sativa
  Clone ID: PAT_MRT4530_80516C.1
aagattttatgcatcatacatatggcttccaacatggtagggctctcagtgttgcttctcgccgtcgtctccgcgctcgttgctactgctaccatggcggactaccaccaccaagaccaggtgggctacaccccgggcccgctctgtctgccaggaatgggctagctgatgtacccgctgccgagttgacatacggtggtgaagcggcagtgcgtcggccgaggcacgggcgccttcgtcgagcaagtccggcgagactggtgacggaagctagtctgcgtacacgacaggctgtgcaggcgccaggcgatctatca

SEQ ID NO: 80941 - DNA, 3171 bp, Oryza sativa
  Clone ID: PAT_MRT4530_80517C.1
atggcacggggctccgctctgctcgatggtagcgtgctgccgccttcccgcatcgtgagcgagaggcaggccgggctgccgcgccgcttcatgccggaatctgccaccggccgggagatagtcacgctaggcgagggacgcccggcgccatgctacccggggcggtccgtcttcttcctcccttttgcaatggcggggctggttccgccattttcttctttcttcatggatgttctggagttttacgatctccagatggcgcacctcacccccaacgcggtaatgacattggccatcttcgcgcacctgtgcgagatgttcatcggggtgcgcccatcccttcggctgttccggtggttcttcaccgtacagtcggtgtcgccgccgtcggtggttggtggctgctacttccagccgcgggggccggtgctgaatcgctacatcccctgcgtcctccgcaagaagtgggatgactggaagagcgactggttctacacccccctcgccgacgaagtgcgcctccgacttccgagccagcccccggcgcaggcctccagctggcgggcgtcggtagatctgggagacggctatgacgccgtcctcgaccgcctggcgggcctgcgatcccaggggctcacaggggccatggtgtacggcgactaccttcgtcgtcggattgcgccgctccagcggcgcgcccggggcgcctgggagtacactgggtccgaagactacatgaggacccaccagggggtccgatgggactgggctcctgaggacttcaagatagtggtccaacgggtgctgaatctcagctccgtggaggcatccctcattcctcaaggagtcctccccctctgcagcgatccagatcgcgcctccatcctgaccatcatgcaggcggtcggggcgtcggaggagcgggctcctcgaggccacgatggcgcgggcgggagccgcaggggggaacaatctaccccgggagggggtcgtgcttctgggccccgcgacgggggcccggggagcagccgccctgccgacgcccgggggaagaggaagcaggaaggaacccctcccccatctcctccccgagggggcggggcggcgcgtgacagcagcaggcgcccggagggggccacgccgacgtcgcagcccgagggggagcggaagaagaaacggctccgcaagatgggggggacagaaccatcccggggaaaccttatttcccctccaaggtggtcgtttaaccgaccccctcgcagcgagatcccgtcgcgtccctcccgccattccaagtccggccagtctgaggccgaggatccggcggccgcagaggctcggaggcgggaatctgaccggcgagaagccgcggatcgcctacgggaagccgaggaggccgctcgggaggccgcccgggctcgccaggccgaggaagccgctcgggaggaggccggactccgccaggccgaggcgacgacatcctccgaggcgacccgtgaaactgaccagcaagaggccacggatcgccttcgggaagccgaggaagctgcccaggtggccgtccgagctcgccaagctgaagaagccgctcgggaggaggccagacttcgccaggccgaggcgacgacgacttccgaggcagctcgcgacgaggccgcgggcgcatcgcttgggcccactccctcgggcgacgctcaggacaagccaggtccgggggacatccccgagtccggcatgtccatcggtggcccgagccgtgcggcatcttctccgaggcggctcttccccacgccttccgttgccccactgaacgcagagccccttctgcaggccttggccgtcgcaaacaccacggtgttggacgggttaagtgcccaggtggaggccctgcaagcggagcgggcggagctcgacgccgcgtgggcgcgtgtcgaagaggggcgacgctcggtggaggccatggtggaggtgggccgcaaggcacaccgccagcacgtctcagagcttgaagcccgtcggaaggtgctggcggagatcgccaaggaggtggaggaggagcggggggctgccctcatcgccaccaccgtgatgaacgaggcgcaggacaccctccgccttcaatacgggagctgggaggcggagctagggaagaagctcgacgccacccggggggtccttgacgctgccgctgcccgagaacggcgggcggcggagactgaggtggcatcccggcggcgcgaagaagcccttgaggcccgtgccatggcgctggaagagcgtgcctgcgccgtggagagggacctggcggatcgcgaggccgccgttgccatccgggaggcaacgctggcggtgcacgaggccgcctgcgccgaagaggagtccgcactccgcctccgcgaggacgtgctcaccgagcgggagcgagctctcgaggaggccgaggccgcggcgcaacggctggcggacagcctgtccctccgcgaggcagcgcgggaggagcaggcgcgccgtaatctggaaagtgtccgcgccgagagggccgcactgaaccagcgggccgctgagctcgaggcgcgggagaaggatctggacgcgggcgaaagcgacttaaccgcccgcctcgcagctgccgaacacaccatcgccgatctgcagggcgcgctagactcgtccgccggggaggtcgaggccctccgcttggcaggcgaggtagggcccggcatgcttcgggacgctgtctcccgtctagaccgcgccggccggcaggcgggcctctggggcgggcggactgtgaagtacgccgccaaccaggggggcctcgcccagcgcctctcggagatagccgggactctccaacggctccccgaggagctcgagaggacgattaagtcatcctcgagggacctcgcccgaggagcggtggagctcgtactggcgagttaccaggccagggatcccgacttctccccatggacggcgctggacgagttccctcccgagaccgaggacgacgcgcgcgcgcaagtccgggacgccgccgaccacatcgtccacagcttcgagggttctgcccctcggctcgtgttcgccctcaactccgacgaggaggacgatgacggtggagtgggcggcagtggcgacgaggctggcgacccgggtgcatcggattga

SEQ ID NO: 80942 - DNA, 2421 bp, Oryza sativa
  Clone ID: PAT_MRT4530_80518C.1
atgggctgcgctccggcggcgcattacctcccggggggagggtggcggcggctgctggtggtggtcgtggcgctggtcgtgctcgaccgtgccggggcccgggtccgcgccgcggacgacgacacgggcgggctgagccgggccgcgttccccaaggggttcgtgttcgggacggcgacgtcggcattccaggtcgagggcatggcggcgtccggcggccgcgggccgtccatctgggaccccttcgtccacaccccagggaatattgcgggaaatgggaatgcagatgttactacagatgaatatcatcgctacaagttgatatccatatttgttttcaaccttaagcaagcacaaccttatagtgtatttatactttattgggctaagataattacttacattgtcttcttgctagcacaggaagatgttgatctcttgaaaagcctgaatttcgatgcatatcggttttcaatctcgtggtcaaggattttccctgatggagagggaaaagttaacacggaaggtgtggcatattacaataatctaatagattatgtaattaagcaagggcttattccttacgtcaatctgaaccactacgatctcccacttgcacttcagaaaaagtatgaaggctggttaagcccaaaaattgttggtgtattttcggactatgctgagttttgtttcaagacatatggcgatcgagtcaagaactggtttacgtttaatgagccaaggatagtagcagcacttggccatgatacagggacagacccacctaaccgatgcaccaagtgtgctgccggtgggaactcagcaacagagccatatattgttgctcataatatcatcttatctcatgctactgcagttgatagataccgtaacaagttccaggcaagtcagaaaggcaagatcggaatagttctcgattttaattggtatgaacctctaactaactcaactgaagaccaagcagcagctcaaagagccagagacttccatgttggttggtttcttgatccgttaataaatggacaatatccaaaaaatatgcgagatattgtgaaagaaagattacctactttcacgcctgaacaagctaagctagtcaagggctccgcagattattttgggatcaatcaatatactgctaactacatggcagaccaaccagcacctcagcaagcagcaactagctactcatctgattggcatgtttcatttatctatgatcaaggcaagaaccacaaggagattgggattgctagtgcagcagttgagatggatatcaagtatgatgcagctaacttgtcccgaagaattgatgaggcttgtgatcagaatcatggagagccaatgactcgttgctctgccatgggttcatcagtgactgctgtatctttatattcagggcctactattcaaagtaaaagtgctgctcagattgatcaatatgcttcaccagctcagatgccacaatgtggcagagaatcatctggtgtatcaggtcatggctctcaaaaactgcatggagtggcaatgaatcatgctgattgcaataccaacaaacagcaggttgataccaatggtgggatggacaaacctgtttctagtagtgcagtttgtttgccatcccaagggttatctgggaatgatcaatctttgtctgccaaggatgatggtgctcctagacgaagcaaggttgaaaaggagtgtcgcaaaaagaattatgatccggatgtattctttaaagtgaatggaaaactttatcagaagctaggtaaaatagggtctggaggcagcagtgaagttcacaaagttatatcagccgagtgtacaatatatgccctgaaaaaaataaaacttaaaggtcgggactaccctactgcctatggcttttgccaagaaattgagtacctaaacaagttgaaaggaaagagtaatatcatacagttgattgattatgaggtcactgataaaagtttgcttcaagatgattcgctgtcacccagagatgggagaattaaggatgatcactacatttatatggtccttgagtatggtgaaattgatttagctaatatggttgctcaggagtggaagaagaggaacacctcaaatatgaaaatagatgaaaattggctacgtttttattggcagatgctcggctccatggtggcgccgccgccgccgccgccgccgcgtaatccctccgggatccaagctcaattccgcagcagccaccgcctcgcctcgcctcgcctcgcgccgtgtgatttgtggggagattgggagctcgcctcggcttctcgcgggatgaagtggcgtgtccgcgtgtgggggcgtctctcgtcgtcgcggcaatcaaacctgccatataagaggccaacgcagacacccacaagtcaatga

SEQ ID NO: 80943 - DNA, 268 bp, Oryza sativa
  unsure (1)..(268): unsure at all n locations
  Clone ID: PAT_MRT4530_80519C.1
aatctcgcatatatataggctgcgtgtatagtncaatacgatattgcatacatgcnagcatacncacgttgtaacgcatagcagnatagttatgttatgcgnacctgagatntgtcccggaacaagtatttctaatgatgttttatttcaataataaatcatgtgttgtaggctatatatttataagctgtattgattcttaattagtatgctgctagtttggaatnaataaacatgtgtnnttaggtatgaaaaaaaaaaaaaaaaa

SEQ ID NO: 80944 - DNA, 339 bp, Oryza sativa
  Clone ID: PAT_MRT4530_8051C.1
atgttgagcgtcgcggcgaacagcgaaggagaagagaagggtatgatgatggctgttgcaagctcaattatttgtcactcagtcaatccacaacctgctctcgggtcatcgctattgggggagtgccggggggctgcctcctccgccaccagggatcgtgcctatcgcggccacccgctcgtcaccacctcagggagcttgtcgcccgtatggaacgaggcatcgctgggagagggtagaggttgtggcgcctgggagatagaggggagaggcagcaccgccaaggagcacatcgctggtgatgggttgatggaaggtgtagggatgccgacgaagtga

SEQ ID NO: 80945 - DNA, 570 bp, Oryza sativa
  Clone ID: PAT_MRT4530_80520C.1
atgaaactccccgacgatttggctgccgtcttcactacaagggcgtcttctccccgtaggcctaggcggaagtcggcttcaacaccgatcctgcctagctccagggaagtcagtgtcatactccagccactcggcacggcttcgacggatcaattggaaggctacttcagctctcccggcgtcgactcgcgaccaacaaagatcgtggagtacgacgaattcggctaccgctacgacaaccgcgacctcgacaacttcgacgaaagcttggaagacaattacacccctctctacttcggcgtcttcatggccgacaacgagacggaggaacaacgccaagcccaagaagcagaagcaagacgcatacagcgggaggccgagcgacgccgactggaggaggagcgccaagcgcaagagcaagaatggctgcggcgagagcaacaagaacgcgagcgggcagcaaaggaggccgaggaccgacgacaacgagccttggacgcagggcgacgagcgcgagatctcatcgggcagcaagacgttgaggggacagcggtcttccgcaccccttaa

SEQ ID NO: 80946 - DNA, 334 bp, Oryza sativa
  unsure (1)..(334): unsure at all n locations
  Clone ID: PAT_MRT4530_80521C.1
cccacgagtccgctttctctncctctctctctttctctcctttgcgtntggccaacgaggaggngccgagcagcgggcgnaaggngccgtcgagcagnnanngnagtgcgaantcnganngntttcnngntntngnngaccnacaacgncgacnnccttnatataancnnctacgtcgtgggnagctgnggctccacctnttcctttnaaagnaaaatctntggctgggnttttgtctngccattnattgtcataggcaggnntcnntatangtggggatatttaactnttgncgggttttngattattctgancttgagtcactgnttgagca

SEQ ID NO: 80947 - DNA, 3306 bp, Oryza sativa
  Clone ID: PAT_MRT4530_80522C.1
atggcacggggctccgctctgctcgacggtagcgtactaccgccttcccgcattgtgggcgagaggcaggctgggctgccgcgccgcttcatgccggaatccgctaccggccgggagatagtgatgctgggcgaggcgcgcccagcaccagattacccggggcggtccatcttcttcctccccttcgcaatggccgggttggttcctcctttttcttctttctttatggatgttctggagttctacgatctccagatggcgcacctcacccccaacgcagtgatgactttggccatcttcgcgcacctgtgcgagatgttcattggggtgcgcccatctcttcggctgttccggtggttcttcaccgtgcagtcggtgtcgccgccgtcggtggtcggtggttgctacttccagccgcgggggccagtgttgaaccgctacatcccctgcgccctccgcaagaagtgggacgattggaagagcgactggttctacaccccccttgccaacgaagcgcgcctccgactcccaagccagcccccggtgccggtctccagctggcgggcgccagtagatctgggggatgactatgacgccgtcctcgaccgcctggcgggcctgcgatctcaggggctcacaggggccatggtgtacggcgactacctccgacgccggattgcgccgcttcagcggcgcgcccggagcgcatgggagtacaccgggtccgaggactacatgaggacccaccggggagtcagatgggattgggctcccgatgacttcaagatcgtggtccaaagggtgctgaatctcagctccatggaggcgtctcttattcctcaaggactcctccccctctgctgcgatccagaccgcgcctccattctgaccatcatgatgggggtcggggcctcagaggaggtggctcctaagggccacgacggcgccggcgggagccgccaggaagaatcaaccccaggagggggccgtgcttctgggccccgcgacgggggctcggggagcaaccgccctgccgacgcccgggggaagaggaaacagggaggaacacctcccccatctcctccccgagggggcggggcggtgcgtgccagcagcaggcgcccggagggggccgcgccgacatcacagcccgagacggagcgcaagaagaagcggctccgcaagacgggggagacggaaccatcccggggaaacctgatttcccctccaaggtggtcgttcaaccgaccccctcgcaggttcgtttcacgcctttcacaaccatcttccctttatcccaatcagcaagttttctcttatccaccttgtttgtcttccggttttttcttctgcttcagcgatgtcccgtcgcgttcctcccgccatcccaagtccggccaatccgaggccgaagatccggcggccgcagaggaacggaggcgagaatctgaccggcgagaggccgcagatcgccttcgggaagctgaagaggccgcccgggaggccgctcgggttcggcaggcggaggataccgctcgggaggaggccgcccgagctcgccaagccgaagaagctgctcgggaggaggccgcccgagctcgtcaggctgaagaagccactcgggaggaaaccgcccgggctcgccaggctgaggcgatggcgtcttccgaggcggttcacgacaagaccgccagcgcgtcgctcgggcccactccctcgggtgacgctcaggcgacaacctccggggcggctcgcgacaaggccgcgggcgcatcgcctgggcccgctccctcgggcgacgcccaggaccaaacgggtccgggggacatccccgagctcagtgcgtcttctggcgggccgagccgcgtcgcattttctccaaggcggctcttcccctcgtcttctgccgccccgctgagtgccgagccccttctgcaagccttggccgccgcaaacaccgcggtgctagatggattcagcgcccaggtggaggccttgcgagcggaacgagcggagctcgaggccgcatgggcgcgcgtcgaggaggggcggcgctcggtggacgccatggtggaggtgggccgtaaggctcaccgccgccacatctcggagcttgaagcccgcaaggcggcgctggcggagatcgcccgagaggtggaggaggagcgagaggccgccctcatcgccaccaccgcgatgattgaggcgcaggactccctccgccttcaacacgggagctgggaggcggagctaaagaaaaagctcgacgccgcccagggggtccttgacgccgccgctgcccgagagcagcgagcaacggaggctgaagcggcatcccgacggcgcgaagaggccctcgaagcccgtgccatggcgctggaagatcatgccggcgccgtggagatcagcttggcggaccgcgaggccgccgccgctatccgggaggcgacgctggcggcgcacgaggccgcctgcgccgaagaggagtccgcgctccggctccgcgaggacgcgcttgctgagcgggagcgagctcttgaggaatccgaggccgcgacacaacggctggcggacagcctgtccctccgcaaggcagcgcaggaggagcaggcgcgccgcaatctggaatgcatccgcgccgagagagccgcgctggagcagcgggctgctaacctcgaggcgcgaggaaaggagctggacgcgagggagcgcagcggcggggcggctacgggcgaaagcgacttagtcgcccgcctcgcagctgccgaacacaccgtcgcggatatgcagcgcgccctggactcatccaccggggaagccgaggccctccgcttgtcgggtgagatagggcccggcatgctttgggatgcagtctcccggctggatcgcgccggtcgggaagcgggcctctggaaaggccagacaattccgcgttctaccaatctggaaggcctcgccccgcaccttaggaggatggcctgggctgtccaacaactccccgaggagctcgagaagaccatcaagtcatcctcgagggacctcgcccaaggagcggtggaactcgtgttagcgagttaccaggccagggaccccggcttctccccatggatggcgctggaggagttccctcccgggaccgagggcgatgcgcgcgcgcggatccgggatgccgccaaccatatcgtccaaagcttcgaggggtcggcccctcggctcgcgttcgcccccagccccgacgaggagggcgacgccagcggtgaggacgacggtggcgacgaggccggcgacccgggcgcattggaatga

SEQ ID NO: 80948 - DNA, 131 bp, Oryza sativa
  Clone ID: PAT_MRT4530_80523C.1
atggtccaaggaaacatatcctgtctcagctcagagaattggatagttctgtgtacagctacacgtgttgagccaagcagctcgtactcccggcttgatttggagcagattgattttgctcaccggagact

SEQ ID NO: 80949 - DNA, 2796 bp, Oryza sativa
  Clone ID: PAT_MRT4530_80524C.1
atggcacggggctccgcaccgctcgagggtagcgtgctgccgccttcccgcatcgtgagcgagaggcaggccgggctgccgcgccgattcatgccggaatctgccaccggccgggaggtggtcacgctgggcgagggacgcccggcgccgcactacccggggcggtccgtcttcttcctctctttcgcaatggcggggctggtcccgccattctctatttttttcatggatattctggagttttatgatctccagatggcgcacctcacccccaacgcgataatgacgttggccatcttcgcgcacctgtgcgagatgtttgtcggggtgcgcccatctctccggctgttccggtggttcttcaccgtacagccggtgtcgccgccgacggtagtcggtggctgctacttccagccgcgggggcaggtgctgaaccgctacattccctgcgtccttcgcaaaaagtgggacgattggaagagcgattggttctacacccccctcgccgacgaagcgcgcctccgacttccgaaccagcctccggcgcaggcctccagctggcgggcggcggtagatctgggagacggctacgacgccgttcttgaccgcctggcgggtctgcgatcccaggggctcacgggggccatggtgttcggcgactaccttcgtcgccggatcgcgccgctccagcggcgcgcccggggcgcctgggagtacaccgggcccgaggacatcatgaggacccaccaggggcgcaaatgggactgggaccctgaggatttcaggatggtggtccaacgggtgctgaatctcagctccgtggaggcatccctcatcccccaaggggtcctccccctctgctgcgatccagagcgcgccaacatcctgaccatcatgcaggaggtcggggcgtcgggggagcgggccccccgaggccacgatggcgcaggtgggagccgcaggggggaacaatctaccccgggagggggtcgtgcttctgggccccgcgacgggggcccggggggcagccaccctgccgacgcccgggggaagaggaagcaggagggtacccctcccccatctcctccccaagggggcggggcggtgcgtgccagcagcaggcgctcggagggtgccgcgccgacgccgcagcccgagggggagcgaaagaagaaacggctccgcaagatgggggggatcgtgccatgccgggggaacctcatctcgcccccgaggtggtcatttagccgacctccccgcaggcctgacccctcgggcgacgcttgggacgagccagcttcggggggcgcccccgagtccggcacgtcgatcggcgggccgagccgcgcggcgcccacaccgaggcgactctcccctctgtcttccgctgccccactgagtgcggagcccttcctgcaggccttggtcgccgcgaacagcacggtgctggacgggttaagtgcccagatggaggccctgcaggcggagcgggcggagctcgacgcggcgtgggcgcgcgtcgaggaggggcggcgctcggtggaggccatggtggaggcgggccgcaaggcgcaccgccggcacacctcacagctcgaggcccgtcgtagggagctggcggagatcgccagggaggtggaggaggagcgggagactgccctcatcgccaccgccgtgctcgacgaggcgcgggacgacctccgcctccaatacgggagccgggcggcggagctagaggagaagctcgacgccgcccggggagtccttgacgccgccgctgcccgggaacggcgggtggcggagaacgaggcggcgtcccggcagcgcgaagaggcccttgaggctcgcgccacggcgctggaggagcgcgcccgcgccctggacgcgaaggagagagacctggcggaccgcgaggccgccgtcgccacccgggaggcaacactggcggcgcacgaggccgcctgcgccgaagaggagtccgcactccgcttccgcgaggacgcgctcaccgagtgggggcgagctctcgaggaggccgaggccgtggcgcagcggctggcggacagcctgttcctccgcgaggcagtgcgggaggagcaggcgcgtcgcaatctggaaggcgtccgcgccgagagggcagcactggatcagcgggccgctgagctcgaggcgcgggcgaaggagctggacgtgagagcgcacagcggcggggcggccgcgggccacggcgacctagccgcccgcctcgcagccgccgaacacaccatcgccgagctgcagggcgcgctggactcgtccgccggggaggtcgaggccctccgtttggcgagcgaagtagggcccggcatgcttcgggacgccgtctcccgtctagaccgcgccgggcggcaggcgggcctctggggcgggcggcacgcgaagtacgccgccaaccaggggggcctcgcccagcgcctctcagagatgaccggggccctcgagcggctccccaaggagctcgaggagacgatcatgtcatcctcgagggacctcgcccggggggcggtggagctcgtactggcaagccaccaggccagggaccctgacttttccccgtgggcagcgctggaagagttccctccaggaaccgaggacggcgcgcgcgcgaaggtccgggacgccaccgaccatatcgtccacagcttcgagggtacggcccctcggctcgcgttcgcgctcgactccgacgaggagggcggtgacgacggtgcggacgacagcgacgacgaggccgacgtcccgggcgcgtcggagtga

SEQ ID NO: 80950 - DNA, 536 bp, Oryza sativa
  Clone ID: PAT_MRT4530_80525C.1
tccttaccgttaggtttcagaccaacccgaagtcgatgccctcatacatggggaaccggttcgagctccccatcgtgatcaccgcgccgttactgattgaccaacagtaagtaccgacgagcgcccatgccacgccgacgaggcgcgaagtatcgcgccgtctacgtcgccggcagctcgagttgagcttgaccgacgcccaccgcacattgatggacaccaattggtgcaccgagatcaagtttgctgatctctggatgtcgtcgcaaaagtacacaggtgagatagacgatcgcagactgtgccggaagttaaccaacatgcgtaacgtgctaggcgcgtctggcgccaaacgctgccgcgcgcgcgagaccaagagccatatctgtgcgcacagctactgaaaccacgatatcgcactgagcccttatgcattctttccatcgtgcgccatgttgccataaccgtcgttatgtagaacgccgatcggctgacggtttagtgattgcgatttagctcattaataacatccactc

SEQ ID NO: 80951 - DNA, 2752 bp, Oryza sativa
  Clone ID: PAT_MRT4530_80526C.1
ctgccgctgctgcggacccagagctgaattttatggatggcaatgctagttataatcaaatatttatgggtgaggaagaccttcataagactgcttttagatgtcctggtgcaatcggcttatatgagtgggttgtgatgacctttgggtcgaagagtgctggggctacatatcaaaaagtgatgaactatatatttcacgatctaatcagcttattggtggaggtctatattgatgatgtaatagttaaatccaaagtggtcaaagaccataaagccgatttaagaaatgttttcgaaagaacaaggagatatggtttgaagatgaatcgtacgaaatgtgccttcgatgtatcggctgggcagtttttgggtttccttgttcatgaaagggggatagaggtaactcacagtagcaataacgcgatcaaggagatccaacccccaaagaataagacacaactgcaatctctggtcggtaagataaatttcatcagccgattcatttctaatttatcaggaaagatagaatcttttacgcctttgctcaggttgaaagccgatcaggagtttgtctgggggcagagcagcaaaaagccttggataacatcaagggatgtttgagcaacccaccggttctgattcctccacaaaaggggatgcctttcaaattatacttatcagccgatgagaaggcaatcggtttggtcttagtccaggagtttgatggcaaagaaagggcaattttctatttaagtagaaaacttttggacgcggagacgatgtattctccagtggagagattgcgcttatgcctatatttttcttacacgaagttaaggcattacttattgtccaatgaatgcattgtgctgtgcaaagccgatgttgtcaagtacatgctatcggctctagtgttaaaaggaaggatcgggaaatggattttcgccttacggaatttgacctccgatatcaatcacctaaggcagtcaaggggcaggccatagccgatcttattgtcgaacaccaaaacggctcaatcggcctggtattcatagtaccctggacgctattcttcgatgggtccgtctgcactcacggatgtggcatcggcttagtgatcgtgtcacctaggggggcaagttttgagtttgcctataccatcaagccttatgcaaataacaatcaagccaaatacgaagcggtcctcaaggggttgcagctattgaaagaagttgaagccgatgacgttgagattataggcgattctctgttggtcattagccagctggtaggggaatatgagtgcaagaatgatacgttagtgatctagaatgagaggtgccgggaattgatggattgtttttggcttgtgacaatgagacatgtttctcgagcgcaaaatgctgaggctaatgatttagctcagggggcatcggggtacaagccgatggcaagggatgtcgggatagaagtcactacaattgcagccgatgactggaggcatgacatatttcagtacttaaagaatccctctcaatcggcttcgagaaaattgtgatataaagcattgagatatgttttattggaagatgagctatattatgggatgattgatggggtactgctcaagtgtttgagtgcacatcaaaccaaggtcatgatgggagaagtacacgagggcatatgtggcacccatcaatcggcccataagatgaagtggttattgcgacgtgctgggtatttttggccgacaatgttggaagattgcttcagatattacaagggctgtcaagactgtcagaagtttggagctattcaaagagcaccgacatcagctatgaatcctataatcaagccatggccgttcagaggttggggaatcgatatgattggccagatcaacccactatcaagcaaagggcataagtttatgttagttgccaccgactatttcactaaatgggttgaggtagttccattgaaaaatgttgattctggggacgcaatcgaatttgttaaggaacatatgatgtatagattcggtgtgccgcagaccattacgaccgatcaaggatctatcttcgtattggatgaatttgttcagtttgcagagaacatgggaatcaagtattgaattcctcatcatactatgcgcaggctaatgggcaagctgaggcatctaacaaaagcctaattaaattgatcaaaaggaagattttggattaccctaagcaatgtcataccaggttagcagaagcattgtggtcctatcggatggcttgccatgggtcgatacaacagttcctccttacaagttggtttacaggcatgaagcggtcctaccaagggagatcaacatcggctcaagaaggattgctttgcaagatgagttaacagccgatgaataccgtaacctcatggtagacgaatcggaagaattggttcaatccaggctacgcacattggaaaaagtgatgaaggataaagaaagagttgcccgtcattattacaagaaagttgtgcccaagtcttttacagatggtgagttagtttggaagttgattttgccgatagggacccgtgataataaattcgacaaatggtcaccaaattgggaaggacctttctgaatctacaagtcagtttataagggagcttacatgttacaagggctcgatggagaagtttatggaagagcactcaacggaaaatatttgaagaagtatttcctaagtatttgggtcaatgca

SEQ ID NO: 80952 - DNA, 3030 bp, Oryza sativa
  Clone ID: PAT_MRT4530_80527C.1
atggcacggggctccgcaccactcgacggtagcgtgctgccgtcttcccgcatcgtgagcgagaggcaggccgggctgccgcgccgattcatgccggcatctgccaccggccgggaggtggtcgagctaggcgagggacgcccggtaccacactacccggggcggtccgtcttcttcctccctttcgcaatggcagggctggtcccgccattctcttctttcttcatggatgttctggagttttatgacctccagatggcgcaccttacccccaacgcgataatgacgttggccatcttcgcgcacctgtgcgagatgtttatcggggtgcgcccatctcttcggcagtttcggtggttcttcaccgtacagccagtgtcgccgccgtcggtagttggtggctgctacttccagccgcgggggccggcgctgagccgctacattccctgcgtcctccgcaagaagtgggacgactggaagagtgactggttctacacccccctcgccgacgaagcgcgcctccaacttcggagccagcccccagcgcaggcctccagttggcgggcgccgctagatctgggagatggctacgacgccgttcttgaccgtctggcgggtctgcgatcccaggggctcacgggggccatgctgtacggcgactaccttcgtcgccggattgcgccgctccagcggcgcgcccggggcgcctgggagtacaccggctccgtggaggcgtccctcatcccccaaggagtcctccccctctgcagcgatccagatcgtgccaacatcctgaccatcatgatggcggtcggggcgtcggaggagcgggctcctcgaggccacgatggcgcgggcgggagccgcaggggagaacaatctaccccaggagggggtcgtgcttctgggccccgtgacaggggcccggggggcagccgccctgccgacgcccgagggaagaggaagcaagagggtaccccctccccatctcctccccgagggggcggggcggcgcgtgtcagcagcaggcgcccggagggggccgcgccgacgccgcagcccgagggggagcggaagaagaaacggctctgcaagatgggggggaccgaatcataccggggaaaccttatctcccccccaaggtggtcgttcaaccgacctcctcgcagcgagatcccgtcgcgcccctcccgccattccaagtccggccggtctgaggccgaggatacggcgaccgcggaggcccggagacgggaaactgaccggcgagaagccgcggatcgccttcgggaagccgaggaggctgcccaggaggccgtccgggctcgccgggctgaggaagccgctcgggaggaggccagactccgccgggccgaggagtccgcccgggaggcggaggcggcgcgcgcacgccaggcggcctgccaagcccccgacccgactccgcccgaggcgacgacgacttccgaggccacccacgacgaggccgcgggcgcaccgctcgggcccgacccctcgggcgacgctcaggacaagccaggtccgggggtcgtccctgagtccggtacgtcgatcggcgggccgagccgtgcggcatcctcaccgaggcggctctcccccatgccttccgctgccccactgagcgcagaggcccttctgcaggccttggccgccgcgaacacgacagtgttggacgggttaagtgcccagatggaggtcctgcaggcagagcgggcggagctcgacgctgcatgggcacgtgtcgaagaggggcgacgctcggtggaggccatggtggaggcgggccgcaaggcacaccgccggcacacctcggagctcgaggcccgtcggaaggagctggcggagatcgccagggaggtggaggaggagcgggaggctgccctcatcgccaccgcagtgatgaacgaggcgcaggacgacctccgccttcaatacgggagctgggcggcggagctaggaaagaagctcgacgccgcccggggggtccttgaagccgctgctgcccggaaacggcgggcggcggagaccgaggcggcgtcccggtggcgcgaagaagcccttgaggcccgtgccacggcgctggaagagcgcgcctgtgtgaaggagagggacctggcggaccgcgaggccgccgttgccatccgggaggctacactggcggcgcacgaagccgcctgtgctgaagaggagtccgcactccgcctccgcgaggatgcgctcaccgagcgggagcgagctctcgaggaggccgaggccgcggcgcaaaggctggcggacagcctgtcccttcgtgaggcagcgctggagaaacaaacgtgtcgcaatctggaaggtgcccgcgccgagagggccgcactggatcagcgggccgctgagctcgaggcacgggcaagggagctggatgcgagggcgcgtagcggcggggcggccacgggcgacggcgatctagccgcccgcctcgcagctgccgaacacaccatcgccgagctgcagggcgcgctggactcgtccgccggggaggtcgaggccctccgcttggcaggcgaggtagggcccggcatgcttcgggacgccgtctcccgtctagaccgcgctgggcggcaggcgggcctctggggcgggcggatcgcgaaatatgccgccaaccatggggtcctcgcccagcgcctctcagagatggccgggactctccagcggctcctcgaggagctcgaggagacgatcaagtcatcctcgagagacctcgcccggggggcagtggagcttgtactggcaagctaccaggccagggacccggacttctccccgtgggcggcgctggacgagttccctcccggaaccgaggacgacgcgcgcgcgcaggtccgggacgccgccgatcacatcgtccacagcttcgagggtacggcccctcggctcgcgttcgccctcgactccgacgtggagggcggcgacggtggtgtggacgacagcgacgacgaggccggcgacccgggagcctcgaagtga

SEQ ID NO: 80953 - DNA, 3489 bp, Oryza sativa
  Clone ID: PAT_MRT4530_80528C.1
atgccgatttcagatatgtcgaacaaacaaatattccaagtttaccatggcccaggaaacgtccgttacgggccaactggggtagatctgtcagaatttattgtatcagaaaggggaattgatagaccggctgagaggagtgtaccttctataaaaggatggttaatgaggggcttgagagttgatccacagacaagtgacataacaatcaatgttatagatccaggtgtgcagatgaacatggatgatggcgagggaccaagtgctgaagtaaatgagacttctgtggaagaggtcaacgcacgagaggacgggggcatagtagctccaatgggcattcaaccaggtggagtggccgacgagggggaaactgtcggtgccattgtggatgaaatggagagggaggattctgacaacgagcgtgtagaggaaggtgattcgtcagatgatgagacggatattaatccagcggaatgggctagtgaggatttttctggtttggtcgtctctgaagaggatagtgtgagatgggagtacaaagaaaatgaggttattcagggagcgatttatactagagcagaagatatgaaggaggagatactaacagcaataggggtagatgggaacaatcaagtattgcccttggcatttgcttttgttgagagtgagaataccgacaactggtactggttcctgaaattggttaaaacaaaagttgttggtatgaggccaaatgtgtgcctgatacatgacaggcacgctggcattctgcgagcgatagaagagttgcagtttgggagtatggaacaaggataccctggtgagtgggaagatgtacagagtaggtggtgcatgcgtcatatgggaactaacttcttcaagcaattcaagaacaaggagctcatgaacatgttcaagaggctatgcaatcagaaccaggagaaaaaattcaatgagcttcggaagagattagatgagttgacagccaaatgcagtgatcagcgtgcagcggctccatcgaccgccgttgctgaccctcctcaagctcttggacctctcccaacgaataatccaacattggttagaagaactggagtggagattcggaaattttctcggtggattctgcatgaaccaaaagagaaatgggccaaggcgtatgacatgggtggtgctagatatggaataatgacaacaaatttggcagaagtttacaactggatgatgcacggtgtccatggactcccactagttggcatagtggagttcattttacatgggacatgcaggtattttgaggatcggttccaggcagttcttccctctatgccgaacaacagcattttattcggaactttcatgcagaaaaagctagaggagttgcgtaaaaaggccatgaaacatcgagctctagtgcaagatacccaacagcacaggtttgagatactatgtcaagataaggcatgcaggggtatctaccgcaagagagtgaagcaggagtgtgttctcaaagccgacgacacatgtcattgctcttgtacaaagccgaagctgctccacagaccatgcacccatgtcattgctaccgcagcggagtgtggcataccagatgcagtatatgtgtcacagtacttcagtaagcaagcagtatatcatacatggagcggcgagatttatgggttcggcatagctggggagttcacagagactaacgatgaagtactcaatattcctgacccatcgaagctccgaggcaaggctggaaggaggaagactcgtcgcatccgcaatgatatggacaagtcggaggctggcagggtgaagcgttgcagcaaatgcgatgaacgtgggcacacctacaagcattgtcctaaagacaaggagaaaccaagtgcggcggaggcaggactatcaggatcagcagcagatggagctcgccctacggagatggcacatcaggatacacctgagttgttggacccgacgatagatcaccgacaccagtctcaccttactgcggtgcaggggactcagcttgggacgttccgggcacggacgtgcggtgagctacttacggccggcctcctaccgatgtgtcggctggtggaggctacagccggcgacgcggacccggccagacgctggaatgtggaccggtccctcctagcaactttggtcgaccgatggaggccagagacgcacacttttcacttgccgtgcggtgaggtagcccataccctacaggacgtttcgtacttgttggggctaccgctcgtgggtgacgctgttgggcctgtgaccacgggtgtggactggaaggacgatctgacggcacgtttcgcaccagtacagagcgcaccacatctcccgctccagctgttggcacaccaccgcaacaccggacctacgaagaggtggctgcttcagttcagcgcagctgagaggattgcgatcggccgccatgaggtggaccagcacgcgtacgaggagtcactgtacgcggagcgaccggaggtcgactaccctacgatgggtactctgtggtgccgtcgtcagtgccgatgggctcacgtccaggttaggcggtcgtatcctgagtttgtaatggagttcgaccgccttctgccgactgacgtcgtgtgggagccctacagtgccgcagctacccaggctcgtgcgtcgttgggtctgtccacactctgcacaagggaccaggcgtactggatgactacagttccgatggtctttgacatctgcgttgagcctcatgcccctttccgcgtgatgcggcagttcggcttccgtcagccctttccattgctcgcaactgaggaggtcgtggaccacgagggagagccacacactgaggaggcgtaccaggcctaccgacgctggtaccagccacgcacccgtactagggtcaccttcgctcccttggagcagcaggcccacgttgcgagcactagagacctctacgccaggcaccgcgaccaggacttcgctcgtgctacgacgttgctcgggcagacgcagctgtacagcggccgcccgtaccgacttgtccccatccagctgcgcacgttcctaggccgactccccctccgcacggagggtttcgtgcaccgttcagcaccccgccttcctcggctaggccttctgttgtgccccccacaggcagccggcacgtcgagtcagggtccaccactggaccatgctgggacctcgtcggaccacttggtggcttccgccttgctcttcgacatcactgacttcgacttcgcttcaggctcgacagaggacgtcatcggcccctcacagctgggaggcgcaccgccggtgcagacgcaggaccaggcacaggccactccgtcgccagacactcgtgctacccgtgctgtgccactggatcgtttcacctactcccaggaccacgtgcgagcacaggcccggagggccaagcgtggtcgcggcgcggggcagggccagtag

SEQ ID NO: 80954 - DNA, 4203 bp, Oryza sativa
  Clone ID: PAT_MRT4530_80529C.1
atgtcgaacaaacaaatattccaagtttaccatggaccaggaaacgtccgttacgggccaactagggtagatctgtcagattttattgtatcagaaaggggaattgatagaccggctgagaggagtgtaccttctataaaaggatggttaatgaggggtttgagagttgatccacagacaagtgacataacaatcaatgttatagtaagtcgggcaactgagggtttttattgggaactaatgccagttcaaaactctcgagtatggagatggtatttggaaaatgcattgcaacgcgggtggcctctagctttggttccgtttgttcacccgaaggatccaggtgtgcagatgaacatggatgatggcgagggaccaagtgctgaagtaaacgagacttctgtggaggaggtcaacgcacgagaggacgggggcgtagtagctccagtgggcattcaaccaggtggagtggccgacgagggggagactgtcggtgccattgtggatgaaatggagaaggaggattctgacaacgagcgtgtagaggaaggtgattcgtcagatgatgagacggatattaatccagcagaatgggctagtgaggatttttctgggctgatcgtctctgaagaggatagtgtgagatgggagtacaaagaaaatgagaaataccacaggaacattacttgtgcatttgttgcatctgagatgtatgcgcatgtcatcgataatctcacatatgaaccaaggtcaataatccgacacatcgaagagacatacaagtatactattagctatgccaaggcctggagggccaaacagaaaataatagagatgagatttggaacttacgaagcctcgtatgacaatttgccacgcctgcttggtgttatcgaagaaagaaaccctgggagctcttacgaagtgaagaaattcccctcaattgaacatcctagcaagagtgtgctgcaaagggcgttcttagctctacatgcatgcaagatggcattcgtgaactgtcgtcctattctctgtattgatgggacattcttgacaggaaagtatcggggccagatactaacagcaataggggtagatgggaacaatcaggtattgcccttggcatttgcttttgttgagagtgagaataccgacagctggtactggttcctgaaattggttaaaacaaaagttgttggtatgaggccaaatgtgtgcctgatacatgataggcacactggcattctgcgagcgatagaagagttgcagtttgggagtatggaacgaggataccccggtgtttgggaagatgcacagagtaggtggtgcatgcgtcatatgggagctaatttcttcaaaagtttacaactgggtgatgcgcggtgtccgtggactgccactagttggcatagtggagttcattttacatgggacatgcagaaaaagctagaggagttgcgtaaaaaggccatgaaacatcgagctctagtgcaaggtatccaacagcacaggtttgagatactatgtcaagataaggcagacaagggtatctaccgcaagagagtgaagcaggagtgtgttctcaaagccgacggcacatgtcattgctcttgtgcaaagccgaagctgctccacaggccatgcacccatgtcattgctgccgcagcggagtgtggcataccagatgcagtatatgtgtcacagtacttcagtaagcaagcaatatatcatacatggagcagcgagatttatgggttcggcatagctggggagttcacagagactaacgatgaaatactcaatattcctgacccatcgaagctccgaggcaaggctggaaggaggaggactcatcgcatccgcaacgatatggacgagtcggaggctggcatggtgaagcgttgcagcaaatgcgatgaacatgggcacacctacaagcattgtcctaaagacaaggagaaaccaagtgcggcggaggcaggactatcaggatcagcagcagatggagctcgccctacggagatggcacgtcaggatacacctcagttgttggacccggcgatagatcaccgacaccggtctcaccttactgcggtgcagggggctcagcttgggacgttccgggcacggacgtgcggtgagctactcacggttcacgactcttttgtcgagaggctacgtgaggccggcctcctatcgatgtgttggctagtggaggctgcggccggcgacgcggacccggccagacgatggactgtggacaggtccctcctagcagctttggtcgatcgatggaggccagagacgcacacttttcacttgccgtgcggtgaggtagcccctaccctacaggacgtatcgtacttgttggggctaccgctcgcgggagacgctgttgggccagtgaccacggctgtggactggcaggacgatctgacagcacgtttcgcactagtacagcgcgcaccgcacctcccgctcgagccgttggcacaccactgcaacaccggacctacgaagaggtggctgcttcagttcaccgttgagcagctacaggcggaggccgacgagtactcctacagccgatgtttggaggcgtacttgctctggctttttggctgggtgatgttctgtggcggtcacgggcacgcggtcgacaagggactcgtgcactacgccaggagcatcgccgacgccgcggtaggcgaggtgcctcaatggagctggggttccgcgttattggcggctctgtaccgtgcactttctgagaggattgcgatcggccgccctgaggtggaccagcacgcgtacgaggagtcactgtacgaggagcaaccagaggtcgactaccctacgatgggtactctgtggtgccatcgtcaacgccgatgggctcacgtccaggttaggcggtcatatcctgagtttgttatggagttcgaccgccttctgccgactgacgtcgtgtgggagccctacagtgccgcggctacccaggctcgtgcgccgttgggtctgttcacactctgcaccagggaccaggcgtactggatgactacggttccgatggtcttcgacatctgcgttgagcctcacgcccctttccgcgtaatgcggcagttcggcttccgtcagccctttccagtaccgtttccgactaccgtcccagctgctgttcaccggtactcgtgcaagggtcagcagtcagctggcgactggcccgccaagttggcgacttttgttgaggactggttgctcgcaaccgaggaggtcgtggaccacgaggaagagccacacactgaggagtcgtaccaggcctacctacactggtaccagccacgcacccatactagggtcaccttcgctcccttggagcagcagccccacgttgcgagcactagagacctctatgccatgcaccgcgaccaggacttcgctcgtgctgtcgacgacatcaaccgagtcgtcgttcacggttcaacgacgatccaacgtttaggcgcggggattccggtacccgtagaggagcacctgacgacgtacacgcggatggtggagtcgatgcgctcgattctccgagtgctcacctatcgtgcagacgacgttgctcgggcagacgcagctgtacagcggccacccgtaccgactggtccccatccagctgcgcacgttcctaggccgactccccctccgcacggagggtttcgtgcaccgttcagcaccccgccttcctcggctaggccttctgttgtgccccccacaggtttcgcccagttcgctatgacgcaggccgcccacttctcccaggctgcagggtcagcgtctcaggcagctgtgtcgacctcgcactcagcgcagttctggcagtacaccgggacttcgtcacaggcagccggcacgtcgagtcagggtccaccactggaccatgctgggacctcgtcggaccgcttgctgccttccaccttgctcttcgacatcactgacttcgacttcgcttcaggctcgatagaggacgtcatcggcccctcacagctgggaggcgcaccgccggtgcagacgcaagaccaggcacaggccactcctccgcgggacactcgtgctacccgtgctgtgccaccggatcgtttcacctactcccaggaccacgtgcgagcacaggcccggaggaccaagcgtggtcgcggcgcggggcagggccagtag

SEQ ID NO: 80955 - DNA, 515 bp, Oryza sativa
  unsure (1)..(515): unsure at all n locations
  Clone ID: PAT_MRT4530_8052C.1
cctcttttatgatttgagggttggatccatcgtcgtcgtaagtagggcctcatgtacacttgcttgatcacaaggcgacaggtcttctgttgccaaaggaaaggacgacgtacctaagccttgatgaatgatgatcgatgatgatgctagctgcttgtccagcttcatgcncagttttcactacctggattttagcacatgtttccttttgtcggataccagcatgcatgtatggaccagctgggtgctgccaattggatgatggattgatggttattggttcaggtattcaggagcacggctggtgccccgtgggccagtttgatacttgtaggtggacccaaggagctttgaaggaattttcagcagacgaattctgggaacttttttttcgattatgatatnccttttgggctgcaccaatgggaatagaagaaaatcttgtagaaatcactttctttcctatgcttttgtagtgatttcagacttgggtttaaaaaaaaaaaaaaaaaaaa

SEQ ID NO: 80956 - DNA, 3708 bp, Oryza sativa
  Clone ID: PAT_MRT4530_80530C.1
atgtcgaacaaacaaatattccaagtttaccatggaccaggaaacgtccattacgggccaactggggtagatctgtcagattttattgtatcagaaaggggaattgatagaccggctgagaggagtgtaccttctataaaaggatggttaatgaggggcttgagaattgatccacagacaagcgacataacaatcaatgttatagtaagtcggacaaccgagggtttttattgggaactaatgccagttcaaaactctcgagtgtggagatggtatttggaaaatgcattgcaacgcgggtggcctctagctttggttccgtttgttcacccgaaggatccaagtgtgcagatgaacatggatgatggcgagggaccaagtgctgaagtaaatgagaattctgtggaggaggtcaacgcacgagaggacgggggcgtagtagctccagtgggcattcaaccaggtggagtggccgacgagggggagactgtcggtgccattgtggatgaaatggagagggaggattctgacaacgagcgtgtagaggaaggtgattcgtcagatgatgagacggatattaatccagcagaatgggctagtgaggatttttctgggctaatcgtctctgaagaggatagtgtgagatgggagtacaaagaaaatgaggttattcagggagcgatttatagtagagcagaagatatgaaggaggcggtaaaatattttgcagtgtcacttcatagagagttttgggttgccaagtcgaaccggtcgcaatatgaagttcggtgtgttaaggaaaaagatggttgtccctggagagtgcacgcgtataaggggaaatggaaggattattggacagtgtcagtcgttaccaagcatacatgttttctacctggtgttcagaaataccacaggaacattacatgtgcatttgttgcatctgagatgtatgtgcatgtcatcgataatctcacatatgaaccaaggtcaataatccgacacatcaaagagacatacaagtatactattagctatgccaaggcctggtgggccaaacagaaaataatagatatgagatttggaacttacgaagcctcgtatgacaatttgctacgcctgcttggtgttatcgaggaaagaaaccctgggagctcttacgaagtgaagaaattcccctcaattgaacatcctggcaagagtgtgctgcaaagggcgttcttagctctacatgcatgcaagatggcattcatgaaatgtcgtcctgttctctgcattgatgggacattcttgacaggaaagtatcggggccagatactaacagcaataggggtagatgggaacaatcaggtattgcccttggcatttgcttttgttgagagtgagaataccgacagctggtactggttcctgaaattggttaaaacaaaagttgttggtatgaggccaaatgtgtgcctgatacatgataggcacgctggcattctgcgagcgatagaagagttgcagtttgggagtatggaacgaggataccatggtgtttgggaagatgtacagagtaggtggtgcatgtgtcatatgggagctaatttcttcaagcaattcaagaacaaggagctcatgaacatgttcaagaggctgtgcaatcagaaccaggagaaaaaatttaatgagctttggaagagattagatgagttgacagccaaatgtagtgatcagcgtgcagcggctccatcgaccgccgttgctgaccctcctcaagctcttggacctctcccaacggatagtccaacattggttagaagaactggattggagattcggaaattttctcagtggattctgcatgaaccaaaagagaaatgggccaaggcgtatgacacaggtggtgctagatatggaataatgataacaaatttggcagaagtttacaactgggtgatgcgcggtgtccgtggactgccactagttggcatagtggagttcattttacatgggacatgcaggtattttagggatcagttccaggcagttcttccctctatgccgaacaacagcattttgtttggaactttcatgcagaaaaagctagaggagttgcgtaaaaaggccatgaaacatcgagctctagtgcaaagtacccaacagcacaggtttgagatactatgtcaagataaggcaggcaggggtatctaccgcaagagagtgaagcaggagtgtgttctcaaagccgacggcatatgtcattgctcttgtgcaaagccgaagctgctccacaggccatgcacccatgtcattgctgccgcagcggagtgtggcataccagatgcagtatatgtgttacagtacttcagtaagcaagcaatatatcatacatggagcggcgagatttatgggttcggcatagctggggagttcacagagactaacgatgaagtactcaatattcctgacccatcgaagctccgaggcaaggctagaaggaggaggactcgtcgcatccgcaacgatatggacgagtcggaggctggcagggtgaagcgttgtagcaaatacgatgaacatgggcacacctacaagcattgtcctaaagacaaggagaaaccaagtgcggcggaggcaggactatcaggatcagcagcagatagagctcgccctacggagatggcacgtcaggatacacctcagttgttggacccggcgatagatcaccgacaccggtctcaccttactgcggtgcagggggctcagcttgggacgttccgagcacggacgtgcggtgagttactcacggttcacgactcctttgtcgagaggttgcgtgaggccggcctcctaccgatgtgtcggctggtggaggctaccgccggcgacgcggacccggccagacgatggactgtggacaggtccctccttgcagctttggtcgaccgatggaggccagagacgcacacttttcacttgtcgtgcggtgaggtagcccctaccctacaggacgtatcgtacttgttggggctaccgctcgcgggagacgctgttgggccagtgaccacggctgtggactggcaggatgatctgacggcacatttcgcactagtacagcgcacactgcacctcccgctcgagccgttggctcaccaccgcaacactggacctacgaagaggtggctgcttcagttcaccctttttggctgggtgatgttctgtggcggtcacgggcacgcggtcgacaagggactcgtgcactacgccaggagcatcgccgatgccgcggtaggcgaggtgcctcagtggagctggggttccgcgttgttggcggctctgtaccgtgcactttgtgaggcttgcacgaagacggatcccagtgcgacctttggtgggtgccctctctttctttctatctgggcaactgagaggattgcgatcggccgccctgaggtggaccagcacgtgtacgaggagtcactgtacgaggagcgaccagaggtcgactaccctacgataggctcgacagaggacgtcatcggcccctcacagctgggagacgcaccgctagtgcagacgcaagaccaggcgcaggccactcctccgccagacactcgtgctacccgtgctgtgccaccggatcgtttcacctacttccaggaccacgtgcgagcacaggcccggaggaccaagcgtggtcgcggcgcagggcagggccagtag

SEQ ID NO: 80957 - DNA, 668 bp, Oryza sativa
  Clone ID: PAT_MRT4530_80531C.1
gggagatcaagaacctggtggcgaccaagaatggcggcgagctcgagcttggatttggtgaagaccatggcggcgtccgggttcctcctccgctgccctgcggcgcccagcgctgtcccactctggggaaggagcgggaggggcggcggcggcggcctcgccttctccgcttcgtcctccaatggtgcagctgttccatcctccctaagtgactcagagaagaagggccctgtggtgatggaaattccactggacaagattaggaggccactgatgcggacgcgtgccaatgatccagccaaggtgcaagaactcatggacagtatccgtgtcattggcctccaagtacctattgacgtactggaggttgatggagtctactatggtttttctggatgtcaccgctatgaggctcaccagcgcctaggtctcccgactatccgctgcaaagtccgtcgcgggacgaaagaaacactaaggcaccatatgcgatgaaattggaatggacatactacttcagtcagaaagtgataatctgtgtacctttgtgttcatatgctatactcctgtaattgtaatcctccatacttgtaaatgttactcgaacagactggtccattactgaatagtaccttttttaactgtctcagtaaatggaaattttaatc

SEQ ID NO: 80958 - DNA, 2390 bp, Oryza sativa
  Clone ID: PAT_MRT4530_80532C.1
ggcccggccggccggcctcgcgccgctcgcctggttccccgtgcccccccaccaccaccaccccccccccggcccgccgcgcctcgccgccccccccgctctcttctccccgccggtctcggccgcagccggtcaccaccgtgcccgccatcatctccaagcccaccgtcactggcccctcccaaagtggaggcaggtgacgggatgcagttgaaggggcacggcgacagtgtcgaggaattaagaggaggccaaaggtgctctggcgattaacaatgacgatgatgggcgggcagccgcagcagacaccgccgccgccgcaggtggtgcaggtgcagcagccggcggcggcgttcggtgacacgacactgaccaaggtgttcgtgggaggactggcgtgggagacgcacaaggacacgctccgcgagcacttcgagcgcttcggcgacatcctcgaggccgtcatcatctccgacaagctcaccggccgctccaagggctacggattcgtcagttccaccactccacgctctcattctcgctttcgtgtcgcgacgtgcgcgaggttcggttttcttacggtggtgtggctgcaggtgacgttcaaggaggcggacgcggccaagaaggcgtgcgaggacgccacaccggtcatcaacggccgccgcgccaactgcaacctcgcgtccctcggcgccaagccgcgcgcccagccgccgcacctcctccgcccctcgccgccggcaaccccggggccgcacgcccccgcgcttccctcccctcaccaccaccagcccgcgccagccatcgcggtggggtccaggggcgtgtcgccggtgccgtggtactaccacccctccacgacgccgcctccgccgccgccgccggccgcgcactacgccgcccatggcggccaccaccagcaataccacggcgttctccccttctaccccgccgccaccacctacgggggggcacgcgacgcgacaaggagcgcgcaggcacaggctggacatggaccggaccagctgcctcgtcgtgctctcacgtactccccgaactacgtcgctgacctgagctacaacgcgaagctaggccaggcggcagcggcgcatggcacgaacggggcctacctgcaggggcacttctcgtacccggcggcggcgcagggaggcatgctcgcggcgaacgggatgatgcccgtgtacccgtactaccagtaccactaccatggcgcgcagggcctgggcgtccccgccgcccacttcttcccgccggtctcggccgcagccgtcaccaccgtgcccgccatcatctccaagcccaccgtcatggcccctcccaaaggtgacgggatgcagttgaaggggcacggcgacactcggtacttagtgcctatcgtcagagaaaacagagcttttgatggattccgcgagagtctaaatgcgcaactacccctccacatggacagtggaggtgataaggaagatggaaaagaggaagatggaagtaacgtgcatggcaagggtaagggtgaagacatatccaatcttaaggatggttctataatggacaatggtggccagaacagtggttctattttcagagaaaggggcttcttctactccatctacccaggcaccaaggaggcagagtcgcagagaagtgtaaagcagagcagagatggtgagcaacaaaaatcagggattgggagggaggcagagcaaagcagattgggggagctctacagcagagccaagcaaactgggcacaagatgaggaatcctgacaggcacttagatagattggagtctcagagggagcacgatagaggggggcttggccagtggcaggcagaggagtaaagcaccattgagaggtaagcctctgcagcatcctacctggattgcctagatgccaacgcgtagcctagagacctagacagtgccgtaataacaatactagatagtaaacactatctatatcactatcttaatagggcaatagttgttggcgggtcaattaagttgcattctccttttgtattatcaaatgggcttcagtcctccacaagattgtcaatgatagcagtgcaacagacaatcttctcatcaggtttgatagataacttgaacaatgtgtcaagctgtatgctagttactgaagactaatgctactatttgcgaattacttgtccacatcccaatattattaaaatagaacttatttactcaactgagcagtgggacaaatagaaccaaaatatgctaacaatcttaaggtaacccaatggaattacggaaattttaagagggaactaagctaagcacttttagttgaaatcaatggacatagtaaacatacctcgtgccgaattcctgcagcccggg

SEQ ID NO: 80959 - DNA, 2774 bp, Oryza sativa
  Clone ID: PAT_MRT4530_80533C.1
atatgtcgaataaacaaatattccaagtttaccatggaccaggaaacgtccgttacgggccaactggggtagatctgtcatattttattgtatcagaaaggggaattgatagaccggctgagaggagtgtaccttctataaaaggatggttaatgaggggtttgagagttgatccacagacaagtgacataacaatcaatgttatagtaagtcgggcaactgagggtttttattgggaactaatgccagttcaaaactctcgagtgtggagatggtatttggaaaatgcattgcaacgcgggtggcctctagctttggttccgtttgttcacccgaaggatccaggtgggcagatgaacatggatgatggcgagggaccaagtgctaaagtaaatgagacttctgtggaggagactgagccacaaactaagccttacccactagacatgtggaagtacggtagtgctttgcaacagaggcccgaagaccggtccttatgtggccgaggtggagtggccgacgagggggagactgtcggtgccattgtggatgaaatggagagggaggattctgacaacgagcgtgtagaggaaggtgattcgtcagatgatgagacggatattaatcctgcagaatgggctagtgaggatttttctgggctgatcgtctctgaagaggatagtgtgagatgggagtacaaagaaaatgaggttattcagggagcgatttatagtagagcagaagatatgaaggaggcggtaaaacattttgcagtgtcacttcatagagagttttgggttgccaagtcgaatcggtcgcaatatgaagttcggtgtgttaaggaaaaagatggttgtccctggagagtgcacgcgtataaggggaaatggaaggattattggacagtgtcagtcgttaccaagcatacatgttttctacctggtgttcagaaataccacaggaacattacatgtgcatttgttgcatctgagatgtatgcgcatgtcatcgataatctcacatatgaaccaaggtcaataatccgacacatcaaagagacatacaagtatactattagctatgccaaggcctggagggccaaacagaaaataatagagatgagatttagaacttacgaagcctcgtatgacaatttgccacgcctgtttggtgttatcgaggaaagaaaccctgggagctcttacgaagtgaagaaattcccctcaattgaacatcctggcaagagtgtgctgcaaagggcgttcttagctctacatgcatgcaagatggcattcgtgaattgtcgtcctgttctctgcattgatgggacattcttgacaggaaagtatcggggccagatactaacagcaataggggtagataggaacaatcaggtattgcccttggcatttgcttttgttgagagtgagaataccgacagctggtactggttcctgaaattggttaaaacaaaagttgttggtatgaggccaaatgtgtgcctgatacatgataggcacgctggcattctgcgagtgatagaagagttgcagtttgggagtatggaacgaggataccctggtgtttgggaagatgtacagagtaggtggtgcatgcgtcatatgggagctaatttcttcaagcaattcaagaacaaggagctcatgaacatgttcaagaggctgtgcaatcagaaccaggagaaaaaattcaatgagctttggaagagattagatgagttgacagccaaatgcagtgatcagtgtgcagcggctccatcgaccgccgttgctgaccctcctcaagctcttggacctctcccaacggatagtccaacattggttagaagaactggattggagattcggaaattttctaagtggattctgcatgaaccaaaagagaaatgggccaaggcgtatgacacgggtggtgctagatatggaataatgacaacaaatttggcagaagtttacaactgggtgatgcgcggtgtccgtggactgccactagttggcatagtggagttcattttacatgggacatgcgggtattttagggatcggttccaggcagttcttccctctatgccgaacaacagcattttgtttggaactttcatgcaaaaaaagctagaggagttgcgtaaaaaggccatgaaacatcgagctctagtgcaaggtacccaacagcacaggtttgagatactatgtcaagataaggtaggcaggggtatctaccgcaagagagtgaagcaggagtgtgttctcaaagccgacggcacatgtcattgctcttgtgcaaagccgaagctgctccacaggccatgcacccatgtcattgctgccgcagcggagtgtggcataccagatgcagtatatgtgtcacagtacttcagtaagcaagcaatatatcatacatggagcggcgagatttatgggttcggcatagctggggagttcacagagactaacaatgaagtactcaatattcctgacccatcgaagctccgaggcaaggctggaaggaggaggactcgtcgcatccgcaacgatatggacgagtcggaggctggcagggtgaagcattgcagcaaatgcgatgaacatgggcacacctacaagcattgtcctaaagacaaggagaaaccaggtgcggcggaggcaggactatcaggatcagcagcagatggagctcgccctacgggtgaaggcactacctccactcgaccacgtcctaggcgtcgtcgtgccacgtctggctacgtggtgtag

SEQ ID NO: 80960 - DNA, 5519 bp, Oryza sativa
  Clone ID: PAT_MRT4530_80534C.1
atgtcgaacaaacaaatattccaagtttaccatagaccaggaaacgtccgttacgggccaactggggtagatctgtcagattttattgtatcagaaaggggaattgatagaccggctgagaggagtgtaccttctataaaaggatggttaatgaggggcttgagagttgatccacagacaagtgacataacaatcaatgttatagtaagtcgggcaaatgagggtttttattgggaactaatgccagttcaaaactctcgagtgtggagatggtatttggaaaatgcattgcaacgcgggtggcctctagctttggttccgtttgttcacccgaaggatccaggtgtgcagatgaacatggatgatggcgagggaccaagtgctgaagtaaatgagacttctgtggaggaggtcaacgcacgagaggacgggggcgtagtagctccagtgggcattcaaccaggtggagtggccgacgagggggagactgtcggtgccattgtggatgaaatggagagggaggattctgacaacgagcatgtagaggaaggtgattcgttagatgatgagacggatattaatccagcagaatgggctagtgaggatttttctgggctgatcgtctctgaagaggatagtgtgagatgggagtacaaagaaaatgaggttattcagggagcgatttatagtagagcagaagatatgaaggaggcggtaaaacattttgcagtgtcacttcatagagagttttgggttgccaagtcgaaccggtcgcaatatgaagttcggtgtgttaaggaaaaagatggttgtccctggagagtgcacacgtataaggggaaatggaaggattattggacggtgtcagttgttaccaagcatacatgttttctacctggtgttcagaaataccacaggaacattacatgtgcatttgttgcatctgagatgtatgcgcatgtcatcgataatctcacatatgaaccaaggtcaataatccgacacattgaagagacatacaagtatactattagctatgccaaggcctggagggacaaacagaaaataatagagatgagatttggaacttacgaagcctcgtatgacaatttgccacgcctgcttggtgttatcgaggaaagaaaccctgggagctcttacgaagtgaagaaattcccctcaattgaacatcctggcaagagtgtgctgcaaagggcgttcttagctctacatgcatgcaagatggcattcgtgaactgtcgtcctgttctctgcattgatgggacattcttgacaggaaagtatcggggccagatactaacagcaataggggtagatgggaacaatcaggtattgcccttggcatttgcttttgttgagagtgagaataccgacagctggtactggttcctgaaattggttaaaacaaaagttgttggtatgaggccaaatgtatgcctgatacatgataggcacgctggcattctgcgagcgataggagagttgcagtttgggagtatggaacgaggataccccggtgtttgggaagatgtacagagtaggtggtgcatgcgtcatatgggagctaatttcttcaagcaattcaagaacaaggagctcatgaacatgttcaagaggctgtgcaatcagaaccaggagaaaaaattcaatgagctttggaagagattagatgagttgacagccaaatgcagtgatcagcgtgcagcggctccatcgaccgccgttgctgaccctcctcaagctcttggacctctcccaacggatagtccaacattggttagaagaactggattggagattcgggaattttctcagtggattctgcatgaaccaaaagagaaatgggccaaggcgtatgacacaggtggtgctagatatggaataatgacaacaaatttggcagaagtttacaactgggtgatgcgcggtgtccgtggagacgacgttgctcgggcagacgcagctgtacagcggccacccgtaccgactggtccctgtccagctgcgcacgttcctaggccgactccccctccgcacggagggtttcgtgcaccgttcagcaccccgccttcctcggctaggccttctgttgtgccccccacaggtttcgcccacttcgctatgacgcaggccgcccacttctcccaggctgcagggtcagcgtcacaggcagccggcacgtcgagtcagggtccaccactggaccatgctgggacctcgtcggaccccttcctgtcttccaccgtgctcttcgacatcactgacttcgacttcgcttcaggctcgacagaggacgtcatcggcccctcacagctgggaggcgcaccgccggtgcagacgcaggaccaggcgcaggccactcctccgcgggacactcgtgctacccgtgctgtgccaccggatcgtttcacctactcccaggactacgtgcgagcacaggcccagaggaccaagcgtggtcgcggctgcggggcagggccagtagagcagtcttctttttatttacttgcttcactttccagtactacccgcactacggcttgcgcatacatcgagtgggtcgatacagaaaatcccgttctcgacctaaccacttgtttacaaggtcgctggaaccaccaaggagatgtcaatacagagaatggatagacaccagaagggttctaactccacctagccgtgttgtgcagtttgaactaccagaacaatacagggttactaaagcgcggtttgagagaggagagggatcctcacgtaggggattaaacccgcaaaaggatagccaaggttccagacttccagttataggtttaaagctaaaatttgaacatgaagaaggatcgaagatacttgcttctaagttgaagaagcaagcacctgaccttcttgaagtaaccaataaaatgagactacttcaaagcgacttctcaatgttgcaagcattcatagctcaagtggctgtggacaggtccaatgatatggtacttgaggcctggatggaacaggtaaggctagcagcgcatgaagctgaggacattgtcgatgaatacacttatcttgttggccaaacggaagggactggcagtttcctaaagaaagcattcaaccaagcaatcgaagttaagaaatggcgcaagctttcagctcaggcaaaactagtagaggatcgtctacaaaagatttctgaagcgaaaaatagatttgatatctcatttgcaagcagtggaagagagaatacagcgagttatccaagtaggcaccatcatttatctgaatattcatacttgaatgatgatgatgatttagttggtaatgcagaagagatgaagcgattaatagaatggttatgtgatgcaaaaaaagatcgcagtgtaatctccatatgtggaatgggagggttgggcaagacaactcttgctagtagcatttacaagaaggaagaaattaaaagaacatttatttgccgtgcatggatcactgtctcacaaaatcacggtgttaaaaatctcctgaaaaagatcttagtccaactcatgagcaaaactgaaaatattatggatggggctgataccatggattgtgtgagtcttgtggaacaacttcaaagatatctaaaagggaggagatacttaattgttctggatgatgtatggagtagggaggcctggcctttactagataatgcatttgttaagaacaacaatggcagccgagtagttatcacaactcgaatcgaaacggtagcatctctagcagatgcaaactatgaactgaagcttacacttctaccaaagcaggaagcctggactcttttctgtcaaaaggctttctcaagattagatgacagaagttgcccccataatctgaagaccgtcgctgaaagaatcgtggagaaatgccaaggtttgccactggctcttgtagctatagggagccttttatcgtacaaagaaatggatgagcatgagtgggagttgttctataatcaacttaggtggcagctcagtaacaatccagagctgagctgggtcgctagtgttctgaatctcagttacaatgatctccctagttatctaaagaattgctttctttactgcggcctgttccctgaagattatcgaattgagagaaaacggttaatcagattgtggatagccgaaggatttgttcaggatagaggacctgagacaacattgacagatgtagctgcatgttacctgaaggaacttgctagtcgatcattgcttcaggttgtgaataggaatgaatatggaaggccaaagagattccagatgcatgatcttgttagggaaatatccctaaccatatctaagaaggaaaaatttgctactacatgggactgtcctaactcagatggagttaccgatggatcacggcgtgtttctttacaaaaggatggcaatttagtccaagcagcaaaatgttcatctcagcttcggtccatgctcatgtttacagaggaaatatcgttgtcttggttcacagattgctaccaaagctttagattgctaagggtcttgtgcctgagaaattgcaatgttcacaaggtaccagattctgtttctcagctgtttaacttgcactacctagacttgggatacacaaaactgaaagagataccgagttcgatagggaagcttagcaatctgcaaacgctttatctcaatggttctgtgctggagttacccagtgagaccacaatgttaactaagcttcaccatctacttatagatgtcgggcggtttgggaagtcagcgagtagcaaaataagttgcctggaacatctacagactctgagaagcatagaagccaatagctacatagtgaaaaaccttggatgcttgacaaggatgagaagtgtcggtatcatgaaggtgctggagtcccacaacactgatctatggacctcaatcagcaagatgacatctctgaattcattgtctgttctcgcagaagatcgtgatcgatacgcccttgatctcggcaacttaaaacctttatctcacctggagaagctgatgataagtggcaggctacacaaaggagcaattcctcccgtttttgccagcttcaccaaactgagaagcttgagcctctgcttctctggtcttcatgaagatccgctcgcttcttttgctgccatgttccagaatctaggccatcttaacctttaccggtgcttcgacggggcgaaactgacatttcgcgctggatggttccctaacctgaaacacctgtacctgagctccatgaatgagctcagggaggttgaggttgaggatggcgccatgagaagcttgtggagacttgagctttggagcttgaaaagcttaacatctgtgccacagggctttgtgcatcttaggtcactccagcagctgtgcattggatcattgatgcctgaagagttccacaggaggttagagggaatcgatcggtggattgttcggcacatcccctacatcggagacccgtga

SEQ ID NO: 80961 - DNA, 3200 bp, Oryza sativa
  unsure (1)..(3200): unsure at all n locations
  Clone ID: PAT_MRT4530_80535C.1
atgaggggcttgagagttgatccacagacaagtgacataacaatcaatgttatagtaagtcgggcaactgagggtttttattgggaactaatgccagttcaaaactctcgaatgtggagatggtatttggaaaatgcattgcaacgcgggtggcctctagctttggttccgtttgttcacccgaaggatccaggtgtgcagatgaaaatggatgatggcgagggaccaagtgctgaagtaaatgagacttctgtggaagaggtcaacgcacgagaggacgggggcgtagtagctccagtgggcattcaaccaggtggagtggccgacgagggggagactgtcggtgccattgtggatgaaatggagagggaggattctgacaacgagcgtgtagaggaaggtgattcgtcagatgatgagacggatattaatccagcagaatgggctagtgaggatttttctgggcttatcgtctctgaagaggatagtgtgagatgggagtacaaagaaaatgaggttattcagggagcgatttatagtagagcagaagatatgaaggaggcggtaaaacattttgcagtgtcacttcatagagagttttgggttgccaagtcgaaccggtctcaatataaagttcggtgtgttaaggaaaaagatggttgtccctggagagtgcacgtgtataaggggaaatggaagaattattggacagtgtcagtcgttaccaagcatacatgttttctacctggtgttcagaaataccacaggaacattacatgtgcatttgttgcatctgagatatatgcgcatgtcgtcgataatctcacatatgaaccaaggtcaataatccgacacatcgaagagacatacaagtatactattagctatgccaaggcctggagggccaaacagaaaataatagagatgagatttggaacttacgaagcctcgtatgacaatttgccacgcctgcttggtgttatcgaggaaagaaaccctgggagctcttacgaagtgaagaaattcccctcaattgaacatcctggcaagagtgtgctgcaaagggcgttcttagctctacatgcatgcaagatggcatttgtgaactgttgtcctgttctctgcattgatgggacattcatgacaggaaagtatcggggccagatactaacagcaataggggtagatgggaacaatcaggtattgcccttggcatttgcttttgttgagagtgagaataccgacagctggtactggttcctgaaattggttgaaacaaaagttgttggtatgaggccaaatgtgtgcctgatacatgataggtacgctggcattctgcgagcgatagaaaagttgcagtttgggagtatggaacgaggataccccggtgtttgggaagatgtacagagtaggtggtgcatgcgtcatatgggagctaatttcttcaagcaattcaagaacaaggagctcatgaacatgttcaagaggctgtgcaaccagaaccaggagaaaaaattcaatgagctttggaagagattagatgagttgacagccaaatgcagtgatcagcgtgcagcggctccatcgaccgccgttgctgaccctcctcaagctcttggacctctcccaacggatagtccaacattggttagaagaactggattggagattcggaaattttctcaatggattctgcatgaaccaaaagagaaatgggccaaggcgtatgacacaggtggtgctagatatggaataatgacaacaaatttggtagaagtttacaattgggtgatgcgcggtgtccgtggactgccactagttggcatagtggagttcattttacatgggacatgcaggtattttagggatcggttccaggcagttcttccctctatgccgaacaacagcattttgtttggaactttcatgcagaaaaagctagaggagttgcgtaaaaaggccatgaaacatcgtgcactagtgccaggtacccaacagcacaggtttgagatactatgtcaagataaggcaggcaggggtatctaccgcaagagagtgaagcagaagtgtgttctcaaagccgacggcacatgtcattgctcttgtgcaaagccaaagctgctccacaggccatgcacccatgtcattgctgccgcagcggagtgtggcataccagatgcagtatatgtgtcacagtacttcagtaagcaagcaatatatcatacatggagcggcgagatttatgggttcggcatagctggggaggtcacagagactaacgatgaagtactcaatattcctgacccatcgaagctccgaagcaaggctggaaggaggaggactcgtcgcatccacaacgatatggacgagttggaggctggcaaggtgaagcgttgcagcaaatgcgatgaacatgggcacacctacaagcattgtcctaaagacaaggagaaaccaagtgcggcggaggcaggactatcaggatcagcagcagatggagctcgccctacggagatggcacgtcaggatacacctcagttgttggacccggcgatagatcaccgacaccggtctcaccttcctgcggtgcagggggctcagcttgggacgttccgggcacggacgtgcggtgagctactcacggttcacgactcctttatcgagaggctgtgtgaggccggcctcctaccgatgtgtcggctggtggaggctgctgccggcgacgcggacccggccagacgatggattgacaggtttcgcctagttcgctatgacgcaggccgcgcacttctcccaggctgcagggtcagcgtctcaggcagctgcgtcgacctcgcactcagcgcagttctagcagtacaccgggacttcgtcacaggctcgacagaggacgtcatcggcccctcacagttgggaggcgcaccgccggtgcagacgcaggaccaggcgcaggccactcctccgcgggacactcgtgctacccatgctgtgccaccggatcgtttcacctactcccaggaccatgtgcgagcacaggcccggaggaccaagcgtggtcgcggcgcggggcagggccagtagagcagtcttctctttgtttatttgcttcactttccagtactgtatgcttgtgtaatgactncgttgttgttatatgtgcacgatacctttcggcgcatgcaaaaaaaaaaaaataaaaa

SEQ ID NO: 80962 - DNA, 1224 bp, Oryza sativa
  Clone ID: PAT_MRT4530_80536C.1
atggatgatggcgaggaaccaagtgttgaagtaaacgagacttctgtggaggaggtcaatgcacgagaggacgggggcgtagtagctccagtgggcattcaaccaggtggagtggccgacgagggggagactgtcggtgccattgtggatgaaatggagagggaggattctgacaacgagcgtgtaaaggaaggtgattcgtcagatgatgagacggatattaatccagcagaatgggctagtgaggatttttctgggctgatcgtctctgaagaggatagtgtgagatgggagttcaaagaaaatgaggttatccagggagcgatttatagtagagcagaagatatgaaggaggcgtggattctgcatgaaccaaaagagaaatgggccaaggcttatgacacaggtggtgctagatatggaataatgacaacaaatttggcagaagtttacaactgggtgatgcgcggtgtccgtggactgccactagttggcatagtggagttcattttacatgggacatgcaggtattttagggatcggttccaggcagttcttccctctatgccgaacaacagcattttgtttggagctttcatgcagaaaaagctagaggagttgcgtaaaaaggccatgaaacatcgagctctagtgcaaggtacccaacagcacaggtttgagatactatgtcaagataaggcaggcaggggtatctaccgcaagagagtgaagcaggagtgtgttcttaaagccgacggcacatgtcattgctcttgtgcaaagccgaagctgctccacaggccatgcacccatgtcattgctgtcgcagcggagtgtggcataccagatgcagtatatgtgtcacagtacttcagtaagcaagcaatatatcatacatggagcggcgagatttatgggttcggcatagctggggagttcacagagactaacgatgaagtactcaatattcctgacccatcgaagctccgaggcaaggctggaaggaggaggactcgtcgcatccgcaacgatatggacgagtcggaggctggcagggactatcaggatcagcagcagatggagctcgccctacgggtgaaggcactacctccactcgaccaccttgggacgttccgggcacggacgtgcggtgagctactcacggttcacgactcctttgtcgagaggaaccaccaaggagatgtcaatacagagaatggatag

SEQ ID NO: 80963 - DNA, 641 bp, Oryza sativa
  unsure (1)..(641): unsure at all n locations
  Clone ID: PAT_MRT4530_80537C.1
caggcaaagccaaattccgttctctctataaacgaactcaacacaaaaaaggttaaaagcaaaatcatagaactacctttgcaagagttcgacagtacaaatgtctcctgatctacattctaacacaaaaacatgtgttcccctggtgtccatccacacttacacgtccaatcagctacttattaagtccacacttacactgcccagattactcacaacatgagaccacgaaatcagtagtccaggcactgagaaaacaagaatggaaatgctcctcaaacatgattgaggaagcttacacacaagaaaatgacatgaagacaaacgatcagctcagtccatctcaaccacgttgatgccagcctgaacgccgatgagtgagcctgctgcgccattggagacatcgcagcagcattgcatgtagaactggtggtaagattggcaaggatggtgaaagatgtgctattggtgtaccctgcatacgagcacgccgtgctttcgcaagatgatgtcggcgatgtggtcgtgttcccgaggaacatatctccacattttgaagctgggcagaacgatgagcttattcctttgngttggttgacaatccagctgccaagtgtaggagctgcagccacacatgatgc

SEQ ID NO: 80964 - DNA, 1929 bp, Oryza sativa
  Clone ID: PAT_MRT4530_80538C.1
atgaacatggatgatggcgagggaccaagtgctaaggtaaacgagacttctgtggaggaggtcaacgcacgagaggacgggggcgtagtagctccagttggcaatcaaccaggtggagtgtccgacgagggggagactgtcggtgccattgtggatgaaatggagagggaggattctgataacgagcgtgtagaggaaggtgattcgtcagatgatgagacggatattaatccagcagaatgggctagtgaggatttttctgggctgatcgtctctgaagaggatagtgtattgcccttggcatttgcttttgttgagagtgagaataccgacagctggtactggttcctgaaattggttaaaacaaaagttgttgaagtttacaactgggtgatgcgcggtgtccgtggactgccactagttggcatagtggagttcattttacatgggacatgcaggggtatctaccgcaagagagtgaagcaggagtgtgttctcaaagccgacggcacatgtcattgctcttgtgcaaagccgaagctgctccacaggccatgcacccatgtcattgctgccgcagcggagtgtggcataccagatgcagtatatgtgtcacagtacttcagtaagcaagcaatatatcatacatggagcggcgagatttatgggttcggcatagctggggagttcacagagactaacgatgaagtactcaatattcctgacccatcgaagctccgaggcaaggctggaaggaggaggactcgtcgcatccgcaacgatatggacgagtcggaggctggcaggcgccgatgggctcacgtccaggttaggcggtcgtatcctgagtttgttatggagttcgaccgccttctgccgactgacatcgtgtgggagccctacagtgcagcggctacccaggctcgtgcgccgttgggtctgtccacactctgcaccagggaccaggtgtactggatgactacggttccgatggtcttcgacatctgcgttgagcctcacgcccctttccgcgtgatgcggcagttcggcttccgtcagccctttccagtaccgtttccgaccaccatcccagctgctgttcaccggtactcgcgcaagggtcagcactcagctggcgactggcccgccaagttggcgacttttgttgaggactggttgctcgcaaccgaggaggtcgtggaccacgagggagagccacacactgaggagtcgtaccaggcctacctacgctggcaccgcgaccaggacttcgctcgtgctgtcgacgacatcaaccgggtcgtcgttgacggttcaacgacgatccaacgtttaggcgcggggattccgacgacgttgctcgagcagacgcagctgtacagcggccaaccataccgactggtccccgtccagctgcgcacgttcctaggccgactccccctccacacggagggtttcgtacaccgttcagcaccccgccttcctcggctaggccttctgttgtgccccccacaggccgcccacttctcccaggctgcagggtcagcgtctcaggtagctgtgtcgacctcgcactcagcgcagttctggcagtacaccgggacttcgtcacaggcagccggcacgtcgagtcagggtccaccactggactatgctaggacctcgtcgaaccgcttgctgccttccaccttgctctttgacatcactgacttcgacttcgcttcaggctcgacagaggacgtcattggcccctcacagctgggaggcgcaccgccggtgcagacgcaggaccaggcgcaggccactcctccgcgggacactcgtgctacccgtgctatgccaccggatcgtttcacctactcccaggaccacgtgcgagcacaggcccggaggaccaagcgtggtcgcggcgcggggcagggccagtag

SEQ ID NO: 80965 - DNA, 267 bp, Oryza sativa
  Clone ID: PAT_MRT4530_80539C.1
gctccacactgcctcgccttctcaatttccgctacacacgaggcggtgcgtggccggtgagcgagaaaaggctacgtacccatcgatagcgagaaattaagttgccggagaggaggaggatgacgatgaggttgtcggcagcggtggtggtgatggtggtggcagtcgtcggtctctttgcctggatgggaacccctctctgatgcataccacaggcagatttttgccatgatggccaatatgttgaagctcaatgtggtcatggct

SEQ ID NO: 80966 - DNA, 600 bp, Oryza sativa
  Clone ID: PAT_MRT4530_8053C.1
atggcaacgcgcgcgccggcgaccgggtccgcgaccgtgacggtggaccccaccccgtcctcctccgcgccggcctcgtcggcgcccccgccggcggcggagacggtggtgctgcggctgaagcggcgggcgaagaagaaggtgacgtggaaggaggggacggtggacaacgagtccctcggccgcaagagctccaagaagtgctgcatcttccacaaggacgtccccttcgacgaggattgcagcgacgacgaccccgacggcggccgccggagcccgcccggggacgccggcgaggggacaagcggcggcggcgtcaacttatcgtggagctccgtagcaatgcgcgaagttgtaatttcaagggaagaattgcttcttctgtactgccaactgccaaaacaatagtgctcctcgtcctcccatggtcacggccacggccacgaccattgatctttttgattgaattggcaccttttcgcggctcttcgcggaactacgcatcaatgtgtgaagttataacttgaaggggaaaattgcttctctgtgccgaaacagtaggtgaaatgatactgctttgttttgtgttgcgattgtgga

SEQ ID NO: 80967 - DNA, 1203 bp, Oryza sativa
  Clone ID: PAT_MRT4530_80540C.1
atggcacgtcaggatacacctgagttgttggacccggcgatagatcaccgacacctgtctcaccttattgcggtgcagggggctcagcttgggacattccgggcacggacgtgcggtaagctacttacggttcacgactcctttgtcgagaggttgcgtgaggccggcctcctaccaatgtgtcggttggtggaggttgtcgccggccacgcggacccggccagacgctggaatgtggaccggtccctcctagcagctttggtcgaccgatggaggccagagacgcacacttttcacttgccgtgcggtgaagtagcccctatcctacaggacgtatcgtacttgttggggctaccgctcgcgggagacgctgttgggccagtgaccacgggtgtggactggaaggacgatctaacagcatgtttcgcaccagtacagcgcgcaccacatctcccgctccagccgttggcacaccaccgcaacaccggacctacgaagaggtggctgcttcagttcacctacaccgggacttcgtcacaggcagccggcacgtcgagtcagggtccaccattggaccatgttgggacctcgtcggaccacttggtggcttccgccttactcttcgacatcactgacttcgacttcgcttcaggctcgacagaggacgtcatcggcccctcacagctgggaggcgcaccgccggtgcagacgcaggaccaggcgcaggccactccaccgccagacactcgtgctacccgtgctgtgccaccggatcatttcacctactcccaggaccacgtgaatcctgatattcgaggaaggcgcttttttaggtgccctaactatgaccgtgagagaaaagcggcttacgaacgacaatgtcgtgaacaacagtgcgactggcgagtgctaactatggcactccctccatgggaagcccgtctaagatgcaagtgtggtgatcgttgtcaggttcttcgttccataaagcctacaacattgggtcgaaggttatttgtttgtccaaatattcttgacgacgatttcatggaaccaccaaggagatgtcaatacagagaatggatagacaccagaagggttctaactccacctagccgtgttgtgcagcttgaactaccagagcaatacagggttactaaagcgcggtttgagagagaagagggatcctcacgtaggggttag

SEQ ID NO: 80968 - DNA, 2877 bp, Oryza sativa
  Clone ID: PAT_MRT4530_80541C.1
atgtcgaacaaacaaatattccaagtttaccatggaccaggaaacgtccgttacgggccaactggggtagatctgtcagattttattgtatcagaaaggggaattgatagaccagctgagaggagtgtaccttctataaaaggatggttaatgaggggcttgagagttgatccacagacaagtgacataacaatcaatgttatagtaagtcggacaactaagggtttttattgggaactaatgccagttcaaaactctcgagtgtggagatggtatttggaaaatgcattgcaacgcaagtggcctctagctttggttccgtttgttcacccgaaggatccaggtgtgcagatgaacatggatgatggcgagggaccaagtgctgaagtaaacgagacttctgtggaggaggtcaacgcacgagaggacgggggcgtagtagctccagtgggcattcaaccaggtggagtggccgacgagggggagactgtcggtgccattgtggatgaaatggagagggaggattctgacaacgagcgtgtagaggaaggtgattcgtcagatgatgagacggatattaatccagcagaatgggctagtgaggatttttctgggctgatcgtctctgaagaggatagtgtgagatgggagtacaaagaaaatgatgttattcagggagcgatttatagtagagcagaagatatgaaggaggcggtaaaacattttgcagtgtcacttcatagagagtttagggttgccaagtcgaaccggtcgcaatatgaagttcggtgtgttaaggaaaaagatggttgtccctggagagtgcacgcgtataaggggaaatggaaggattattggacagtgtcagtcgttaccaagcatacatgttttctacctgagatggcacatcaggatacacctcagttgttggacccggcgatagatcaccgacaccagtctcaccttactgcggtgcagggggctcagcttgggacgttccgggcacggacgtgcggtgagctactcacggttcacgactcctttgtcgagaggctacgtgaggccggcctcctaccgatgtgtcggctggtggaggctgcggccggcgacgcggacccggccagacgatggactgtggacaggccagagacgcacacttttcacttgctgtgcggtgaggtagcccctaccctacaggacgtatcgtacttgttggggctaccgctcgcgggagacgctgttgggccagggaccacggctatggactggaaggatgatctgacggcacgtttcgcactagtacagcgcgcaccgcacctcccgctcgagccgttggcacaccaccgcaacaccggacctacgaagaggtggctgcttcagttcaccgttgagcagctacaggcggaggccgacgagtactcctacagccgatgtttggaggcgtacttgctctggctttttggctgggtgatgttctgtggcggtcacgggcacgcggtcgacaagggactcgtgcactacgccaggagcatcgctgacgccgcggtaggcgaggtgcctcagtggagctggggttccgcgttgttggcggctctgtaccgtgcactttgtgagtcttgcacgaagacggatcccagcgcgacctttggtgggtgccctctctttctttctatctgggcagctgagaggattgcgatcggccgccctgaggtggaccagcacgcgtacgaggagtcactgtacgaggagcaaccagaggtcgactaccctacgatgggtactctgtggtgccgtcgtcagcgccgatgggctcacgtccaggttaggcggtcgtatcttgagtttgttatggagttcgaccgccttctgccgactgacgtcgtgtgggagccctacagtgccgcggctacccaggctcgtgcgctgttgggtctgtccacactctgcaccagggaccaggcgtactggatgactacggttccgatgttcggcttccgtcagccctttccagtaccgtttccgaccaccgtcccagctgctgttcaccggtactcgcgcaagggtcagcagtcagctggcgactggcccgccaagttggcgacttttgttgaggactggttgctcgcaaccgaggaggtcgtggaccacgagggagagccacacactgaggagtcgtaccaggcctacctacgctggtaccagccacgcacccgtactagggtcaccttcgctcccttggagcagcagccccaagttgcgagcactagagacctctatgccaggcaccgcgaccaggacttcgctcgtgctgtcgacgacatcaaccgggtcgtcgttgatggttcaacgacgatccaacgtttaggcgcggggattccgactggtccccgtccagctgcgcacgttcctaggccgactccccctccgcacggagggtttcgtgcaccgttcagcaccccgccttcctcggctaggccttctgttgtgccccccacaggtttcgcccagttcgctatgacgcaggccgcccacttctcccaggctgcagggtcagcgtcacaggcagccggcacgtcgagtcagggtccaccactggaccatgttgggacctcatcggaccgcttgctgccttccaccgtgctcttcgacatcactgacttcgacttcgcttcaggctcgtcagaggacgtcattggcccctcacagctgggaggcgcaccgccggtgcagacgcaggaccaggcgcaggccactcctccgcgggacactcgtgctacccgtgctgtgccaccggatcgtttcacctactcccaggaccacgtgcgagcacaggcccggaggaccaagcgtggtcgcagcgcggggcagggccagtag

SEQ ID NO: 80969 - DNA, 404 bp, Oryza sativa
  Clone ID: PAT_MRT4530_80542C.1
aataatgaattatttttgaaaaggaaaagaggattattgcgtcagcggctcgggttcacggtggaccgggtgcacggcggcggtctacgaaaacgaacggtctagattaaccctatccaaaacggacggccgagatcaatctaatccatcgcgggtctacggctagcgtcagcgctaacgtcagcaatgacgttatcaccggctgcggctcggctgcagctcggcaacgcacgctcgccggcaaacgacggcgcggcggcgcaaacggagggcaccaacgggttgcgggcgacgcggcgatccttaccgaggcacgaacggcagcggacggcgaccggatgtcacgcccagaaattcactagtaatttccgaattgatggtcaagctaatcaagaagctccatt

SEQ ID NO: 80970 - DNA, 366 bp, Oryza sativa
  Clone ID: PAT_MRT4530_80543C.1
ccaccttcttggccaccatcctttttaggggtcttttttgctggggcaggctccgtcttttgatgtttcctttttttcaaagcaccttcaggtttttttggagttttttcaggggattgtccaagtcccaaatcagccgcaggattgtttgttttaccaggagtgattaaagccccagccccctttttccggtccttttaatacacttttattttgggctttcttttaggggaacctgcaaacctgccaagttttttaccctcaaaaacacaaagccgggtttaaagcttgactcgactttttaaaccaagggagttgttttcaccatcaccaagggctttataccgaatggcaaaagcatttttt

SEQ ID NO: 80971 - DNA, 169 bp, Oryza sativa
  Clone ID: PAT_MRT4530_80544C.1
atgacccaacccccgtggaccaacccggtgtggaaaggatcccggcctatgaaaaaatttgtgttcgtggcggtggtaagcgatgagctggtgaggcagcttgcggtgccgtacagcatgcggcggtgccgcaagcggccgggacaggtcgactctagaggatccccgg

SEQ ID NO: 80972 - DNA, 163 bp, Oryza sativa
  Clone ID: PAT_MRT4530_80545C.1
ctagatggcgcaggtggaactggaggcgacggccggcagtgcaggcgcggcaggaggtaggcagccagcgacgcaattggggcaggcggcggctaccgtcacggattggaggacagctgattcttcagagttttagccccgtaagcctggtggttttccccat

SEQ ID NO: 80973 - DNA, 1461 bp, Oryza sativa
  Clone ID: PAT_MRT4530_80546C.1
atggcgagctcagcagcgacggtggtgctgatcccgttctgcgtctccggccacctcacgcccatgctggaagtcggcaagcggatgctgcgcagccgctgctgcggcgacgacgacgacggccgccccgccatgtcgctcaccgtgctcctcgcgcagctgccggagtcccaccgcgcgcccgagatcgacgagatcatccgccgtgaagcggccggcgcgtcggagcactccggcttcgacgtccggttccactgcctccccgccgaggagctcccggacttccgcggcggcgaggacttcatctcccggttcatgcagcagcacgcgtcgcacgccagggaggccatcgccggcctcgagtcccgcgtcgccgccgtggtcttggactggttctgcaccacgctcctcgacgtcacccgcgacctcggcctccccgggtacgtgttcttcacgtccgccgcctccatgctctcgctcctgctgcggttgccggcgctggacaaggaggtggccgtggatttcgaggagatgggaggcgccgtcgacttaccggggttgccgcctgtgccggcggctctgttgccgacgcctgtgatgaagaagggttgcaactacgagtggctcgtgtaccacgggagccgcttcatggaggctgcggggatcatcgtcaacacggtggccgagctcgagccggccgtcctcgaggccatcgccgacggccggtgcgtgccgggacgccgcgtcccggccatctacacggtcggccccgtgctgtcgttcaagacgccgcccgagaagccgcacgagtgcgtgcggtggctcgacgcgcagccgcgagcgtcggtcgtgttcctctgcttcgggagcatgggcagcttcgcgccgccgcaggtgctcgagatagccgccggcctcgagcgcagcgggcaccgcttcctgtgggtgctgcgcggccgtccacccgccggctcgccgtacccgacggacgccgacgccgacgagctcctcccggaggggttcctggagaggaccaaggggaggggcatggtgtggccgacgtgggcgccgcagaaggacatcctcgcccacgccgccgtgggaggcttcgtgacgcacggcgggtggaactcgacgctggagagcctgtggcacggcgtgccgatggcgccgtggccgctgtacgcggagcagcacctgaacgcgttcgagctcgtgcgcgacatgggcgtcgccgtggagatggaggtggacaggaagcggggcaacttggtggaggcggcggagctggagcgcgcggtgcggtgcctgatggacgagggatcggaggaggggaggatggcgagggagaaggcggcggcggcgaaggcggcgtgccggaacgccgtggacggaggcgggtcgtcgatagcggcgttgcggaagctcacgcaagaaatggcccacatgtcatccatatag

SEQ ID NO: 80974 - DNA, 226 bp, Oryza sativa
  Clone ID: PAT_MRT4530_80547C.1
catgggattcctgggaggaggggacggcgacgtgaagacttggcgtcatgcactggtggcgattcgacggcgacgcgacacgaaagaagaacaacagaggaggccaccagccaaaccatgggctagttgggccagccccaggttcggccgaaccagggccctcgtcgccgttggatgcagggcttcttctggacggtgtggattagctcccaatgacggttggagg

SEQ ID NO: 80975 - DNA, 994 bp, Oryza sativa
  Clone ID: PAT_MRT4530_80548C.1
gggcgtctagcgctcacgactcatctgccgctgccgctgctgaagaaaaacgcacatccttccttcctagcaccaactcgccacccaattaggccattaccttccaaaattctcccatccaatggcgctacgcctctccgtctcctcctcgcacgggccggcttcctcgccggccatctccacatgccgccccgccgcctgcgggcgcttccccgccttgctcggcggcggtgtggcttctcagaggaggagcctgacggtggtgtctggccctgagacaagggcggtgatccccgtgaggtcgagcggctcggacaccgccactgttggggccgaggcggaggcggtggccgtgaccgggcaggtgacggaggtgaacaaggataccttctggccaattgtcaagtcggcagggcccaaggtcgtcgtcctcgacatgtacacccaatggtgcggcccttgcaaggtgatggcaccgaaattccaggagatgtccgagaaggaccaggacgttgtgttcctcaaactcgactgcaatcaagacaacaagtctcttgcaaaggagctgggcataaaggttgtgccaacattcaagattctcaaggacgggaaggtcgtcaaggaggtcacaggtgccaaactagatgaattaatccaagcgatcgagacggtgaagtcaagctgaggaatgccctgaaaatttgcatcagttagcttgttgtcactagtgtacgttatgggtgaaccaccagttattgaagtgggtattcgacatggagacaaacagttaatctagttcttctgcctatgatgatttatcaagcatccagaacaatatacggccatttatatggaatgcaccatgtaaataactatttccaacgtcatgatgatctgttttctaatcttactgatttgcaagtgaacattgtattcatggttagcaaaatttcaaaatatatcaacaaatttccagctgaaaaaaaaaaaaaaa

SEQ ID NO: 80976 - DNA, 228 bp, Oryza sativa
  Clone ID: PAT_MRT4530_80549C.1
atggacatttttatcatcaccgctggtctacctgcgtcgctgccgaccggtgtctctgccttcacggtttcaactctgggagtcattatcttcgtcttcgctttagagcttgtgttctacttcagcaactctaattatttcaccggcaattttagcttctccaagtttctcaagtatcaacacctctacttcattggccctgacatctccaccgttgctaagggatga

SEQ ID NO: 80977 - DNA, 517 bp, Oryza sativa
  Clone ID: PAT_MRT4530_8054C.1
tttttttttttttttttttttttttttttttttttttttttttttttactttttatttttttttttgtaacggacgggtggaccaacctcggaaaatcgggaccggaaccggagggcgaacaaactttgccaaaagggggtccaattagaaattggcaaaaccatggaaatacctcataccagagagaaagggggatccagtgaaaaacccagacaacctaagggcgggaagaaaaaaaaataaaggcgggggggccaaaggagggatctaaatcaaataaagtggggggccctcacggcccaataaacaggcaaaaaaccgggcggggcagtttaataaattaatcccccaacccgcggggagaggcacaatgcgaatgggcaccaagggatttttttttaccaacgagccggacgggaaacaaatgaggggccccaaccggctggcccaaagagagagaaaacaggccggaaaggctgttaacccccagaaaaaaaaaaacctgtttgagggaag

SEQ ID NO: 80978 - DNA, 1078 bp, Oryza sativa
  Clone ID: PAT_MRT4530_80550C.1
cggacgcgtgggcgcgcttcccaccgagcaggcggagcatacaaagcagcaggagcagttgattgggtagatcgaagcagcagggtgaggtaggcctgaaggattccgccatggcagcagcagcagtagcagcagggagaggaggggttaggggaagaggagagggggaggaaggcgcttttttttttttttttcaaaggcaggccaagctcatccatagatatcaaatcatactttgggttcatcataagtcataaccggtgtcaacagaatacctttgttaacaatctcgcatttgctgacaaacaaacccaactaaacaccagataaatactcgaaatcccaaaccactcgtaacaatttgttgctaactgcatattgcgtagcactcagcatccttgttctttagtcagtaagaatcaagttggagaggtgctgcaattttttcctactaaattctctacgactgcttcaaagacatggcccttgcacgaaggttaagaaatatcccccagcaacatgcaacaaagctgtggaaaatcacccggaactgcaacggcatgtacatatgatttatccaaccaactattggccaaaacatccaagcagacaattgcaccgagggatattgtttcttaaccctggtcttcacctccttaaaaggcctcctctcaacaacatatccataatagaacaagaagagcagattattccagggagaagaagtgatctgctccagtaacaccttcttggctatagttttggtatccttcttccctttgaagatataatctaacactttatggaggaaatggccaaaagggccaccataagcaaacccaaagagcatcttgagcaggaggcggcgcttctcgatcctctggtagccggagagcttctgcgccacggagtcgctgacgccggcgaggcaccccgccgtgatcatcttggtccggagagggtggagctggagctggcgcaggtactgccgccacgcccgccgagccagcgacccctcctccccctctcctcttcccctaacccctcctctccctgctgctactgctgctgctgccat

SEQ ID NO: 80979 - DNA, 3066 bp, Oryza sativa
  Clone ID: PAT_MRT4530_80551C.1
atggcacggggctccgctcttcttgacggtagcgtacttccgccttcccgcatcgtgagcgagaggcatgccgggctgccgcgccgcttcatgccggaatctgccaccggccgggagatagtgatgctgggcgagggacgcccggcaccagactacccggggcggtttgtcttcttcctccccttcgcaatggcggggctggttccgccattttcttcttttttcatggacattctggagttctacgatctccagatggcgcacctcacccccaatgctgtgatgacattggccatcttcgcgcacctgtgcgagatgttcattggggtgcgcccatctctccaactgttccggtggttcttcaccgtgcagtcggtgtcgccgccgtcggtggttggtggctgctacttccagccgcgggggccggtgttgaaccgctacatcccctgcgccctccgcaagaagtgggacgactggaagagcgactggttctacacccccctcgccaacgaagcgcgcctccgacttccaagtcagcccccggcgcaggtctccagctggcgggcgccggtagatctgggggatgactatgacgccgtcctcgaccgcctggcgggcctgcgatcccaggggctcaccggggccatgggagtcagatgggattgggcccccgagaacttcaagatactagtccaacgggttctaaatctcaactccgtggaggcgtccctcatcccccacggtatcctccccctctgcagcgacccagatcgcgcctccatcttgaccattatgacggcggtcggggcctcagaggagcaggctcctaagggccatgacggcgcaggtgggagccgccggggggatcaatctacccccggagggggtcgtgcttctgggccccgcgtcgggggctcggggagcagccgccctaccgacgcccgggggaagaggaaactgggaggaacacctcccccatctcctccccgagggggcggggcggtgcgtgccagcagcaggcgcccggagggggccacgccaacatcgcagcccgagggggagcgcaagaagaagcggctgcgcaagatgggggagacagaaccatcccggggaaacctaatttcccctccaaggtggtcatttaaccgaccccctcgcagtgatatcccatcgcgttcctcccaccatcccaagtccggccagtccgaggccaaagatccggcggccgcagaggaacggaggcgagaatctgaccggcgagaggccgcagatcgccttcgggaagctgaagaggccgcccgggaggccgctcgggctcgccatgcagaggataccgctcgggaggaggccgcccgggctcgccaagccgaagaagctgctaaggaggaggccgcccaggctcgtcgggctgaggcgatggcgtcttccgaggcagctcacgacacagctgctggcgcgtcgcttgggcctactccctcgggcaacgctcaggcgacagcctccggggtggctcgcgacgaggccgcgggcggatcgcctgggcccacttccccaggcgatgcccaggaccaaacaggtccgggggacatccccgagcccagtgcgtcctccggcgggccgagccgcgtcgcattctctccaaggcggctcttctcctcgtcttctgtcgccccgctgagcgccgagccccttctgcaggccttggccgccgcaaacaccgcggtgctagatgggttcagcgcccaagtggaggccctgcgagcggaacgagcggagctcgaggccgcatgggcgcgtgtcgaggaggggcggcgctcggtggatgtcatggtggaggtgggccgtaaggctcaccgccgtcacgtctcggagcttgaagcccgcaaagcggcgctggcagaggtcgcccgggaggtggaggaggagcggggggctgccctcatcgccaccactgtgatgatcgaggcgcaggactccctccgccttcagcacgggaactgggaggcggagctgaagaaaaagctcgacgccgcccagggggttcttgatgccgccgctgcccgagagcagcgagcgacggagactgaagcggcgctccggcggcgtgaagaggccctcgaggcgcgcgccatggcgctggaggagcgcgcctgcgtcgcggagaaagtcctggcggaccgcgaggccgccgtcacctcccgggaggcaacgctggcggcgcacgagtctgcctgcgccgaagaggagtccgcactccgcctccgcgaagacgcgcttgccgagcgggagcgagctctcgaagaggccgaggccgaagcgcaacggttggcagactccctgtccctccgtgaggcagcgctgacggagcaggcccgccgcaatttggaatccgtccgcgccgagagagccgcactggagcagcgggctgccgatctcgaggcgcgggaaaaagagctggacgcgagggcgtgcagcggcggggcggctgcgggcgaaagcgacttagccgcccgcctcgcagctgccgaacacaccgtcgccgacatgcagcgcgcgctagactcatccgccggggaagccgaggccctccgcttagcaggcgagatagggcccggcacactttgggatgcagtctcccgcctggatcgcgccggacggcaggtgggcctctggaaaggccagacgacgacgcactcctccaatctggaaggcctcgctccgcacctcacgaagatggcctgggctctccaacaactccccgaggagctcgagaagaccatcaagtcatcctcgagggacctcgcccagggagcggtggaactcgtactagcgagttaccaggctagggatcccaacttctccccatggatggcgctggaggagttccctcccgggaccgaagacgacgcgcgcacgcgggttcgggatgctgccgaccacatcgtccacagtttcgaggggtcggcccctcggctcgcgttcgcccccaactccgacgaggagggcgacgccagcagtgcagacgatggtgacgatgaggccggcgacccgggcgcatcggaatga

SEQ ID NO: 80980 - DNA, 2224 bp, Oryza sativa
  Clone ID: PAT_MRT4530_80552C.1
ccccgggctccgccctcctcctcctctcctctctcccgtcacgggcgcatctctctctctctctctctctctctctctctctccccgcacagccgcgccgcgccgccgtcgccttctcgggcgagggcgaagagcgagggctcctgctcgccgccgcccctccccctcgtccgcggcgcgccggaggtcaggtagaagatggagggagctggcagagatgggaaccctcttggcggttaccggattggcaaaaccctagggattgggtcatttggcaaagtgaagatcgcggagcatatattgactggtcacaaggtggcaatcaagatcctcaatcgccgtaagatcaagagcatggagatggaagagaaagttaaaagagaaatcaagatacttagattatttatgcacccacatatcattcgcctttatgaggtgatagacaccccagctgatatttatgttgttatggagtatgtcaaatctggagagttgtttgattacatcgttgagaagggaagactgcaagaggaagaagctcgacgctttttccagcagatcatatctggtgttgaatattgccatagaaacatggtggttcatcgtgatcttaagccagagaaccttcttttggactccaaatgcaatgttaagattgcagactttggcttgagtaatgttatgcgtgatggtcactttctgaagacaagttgtggtagcccaaattatgcagcacctgaggtgatatctggtaaactatatgctggccctgaagttgatgtgtggagttgtggtgttattctttatgctcttctttgtggtacccttccatttgatgacgagaatattcccaacctttttaagaaaataaagggtggcatatatacccttcccagtcatttgtcacctttggcaagggatttgattcccagaatgcttgttgttgatcccatgaagaggatcaccatacgtgaaatccgtgaacatcagtggttcacagttggtcttccgcgttatttagctgtgccacctcctgacactgcacaacaggttaaaaagctcgacgatgaaactctgaatgatgttatcaatatggggtttgacaagaatcagctaatcgaatcacttcacaagagactgcaaaacgaggcgacagttgcctactatttactattggacaataggctgcgcacaaccagtggctaccttggagctgagttccatgaatctatggaatcttctctcgctcaagtaactccagctgagacaccaaactcagccactgatcatcggcagcatgggcatatggaatctcctgggtttggcttgaggcatcatttcgcagctgacaggaaatgggcccttggtcttcagtctcgagcacatccacgagaaataataactgaagttcttaaagctctgcaagagctaaatgtttgctggaagaagattggacattataacatgaaatgcagatggagtcctagttttcccagtcatgagagtatgatgcataacaaccatggctttggtgcagaatctgctataattgaaactgatgacagtgagaaatcaacccacactgtgaaatttgaaattcagctttacaaaacaagggatgaaaaataccttcttgacttgcaaagggtcagtggaccacagcttctctttctggacctgtgctctgcctttctaactcagctgagagtcctttaattatgccgttgtctgcttcccaactgaacttcctgcagcataccgtggattgtcacgtttcatttaagatatgtacataatgaccataatcctccagtagataatatttcctggagtgtgtagacgttagaggctgccagtgatgtattttgacggtaattggccaaaccagaggtaacaggcaggaggcaaacctttctctgtttttttatttgccgttgttgttgttatatgacggtttagacttatctagagtccttgaaccactttgcttgtttacggtgatctttactagcctgattgcccagcctgagaatcacctctgtcgttatgaaagttgagcagttggcatactattgttgatcctgcattccttgacagatgaccgttggatacatgcagagctgttatctttttttttttcacatcataattactcagattggttacccatttgcttctgtatgtgttgactggaatgttaaataagaatagttccctcttgatt

SEQ ID NO: 80981 - DNA, 1533 bp, Oryza sativa
  Clone ID: PAT_MRT4530_80553C.1
atggcacggggctccacaccgctcgacggtagcgtgctgccgccttcccgcatcgtgagcgagaggcaggccgggctgccgcgccgattcatgccggaatctgccaccggccgggaggtggtcgagctgggcgagggacgcccggcgccacactacccggggcggtccgtcttcttcctctctttcgcaatggcagggctggtcccgccattctcttcttttttcatggatattctggagttttatgatctccagatggcgcacctcacccctaacgcaataatgacgttggccatcttcgcgcacctgtgcgagatgtttatcggggtgcgcccatctctccggctgttccagtggttcttcaccgtacagccggtgtcgccgccgacggtagttggtggttgctacttccagccgcgggggcaggtgctacaccgctacattccctgcgttctccgcaagaagtgggacgactggaagagcgattggctcgacgccgcccggggagtccttgacgccgccgctgcacgggaacggcgggcggcggagaacgaggcggcgtcccggcagcgcgaagaggcccttgaggctcgcgccatggcgctggaggagcgcgcccgcgcgaaggagagggacctggcggaccgcgaggccgccgtcgccatccgggaggcaacactggcggcacacgaggccgcctgcgctgaagaggagtccgcactccgcctccgcgaggatgcgctcgccgagcgggaacgagctcttgaggaggccgaggccgcggcgcagcggctggcggacagcctgttcctccgcaaggcagcacgggaggagcaggcgcgccgcaatctggaaggcgcccgcgccgagagggccgcactggatcagcgggccgctgagctcgaggcgcgggcgaaggagctagacgcaagagcgcatagcggcggggcggccgcgggcgacggcgacctagccgcccgcctcgcagccgccgaacacaccatcgccgagctgcagggcgcgctggactcgtccgccggggaggtcgaggccctccgcttggcgggcgaggtagggcccggcatgcttcgggacgccgtctcccgtctagaccgcgccgggcggcaggcgggcctctggggcgggcggtgcgcgaagtacgccgccaaccaggggggcctcgcccagctcctctcagagatggccgggaccctccagcgactccccgaggagctcgaggagacgatcaagtcatcctcgagagaactcgcccggggggcggtggagctcgtactggcaagttaccaggccagggaccctgacttctccccgtgggcagcgctggacgagttccctcccggaaccgaggacggcgcgcgcgcgcaggtccgggacgccgccgaccacatcgtccacagcttcgagggtacggcccctcggctcgcgttcgccctcgactccgacaaggagggcggtgacggtggtgcggacgacagcgacgacgaggctggcgacccgggcgcgtcgaagtga

SEQ ID NO: 80982 - DNA, 474 bp, Oryza sativa
  Clone ID: PAT_MRT4530_80554C.1
ccaaagccagaaaaacagcatcattcaccccccgggttacgggatatctaagcgcgttacatttccaccaaaaagagctagttttggctatcaaaattccaaattaccctagggaaacaaaattggctaggacctgaaaataaaccactaaattccccctacaaaaagaggggggggggctaattcacccaacagggttgctgaacccatcatcgaatgtgttcttttggaacctgacctgacaaataataaatgcccacaaccagtttaagaagtttgggacaaccttcggccaccactagtcaaaaggatttcatgggcaaggccatttgaaactaacagggtcccttgttgcattgtataacggaacaaaacttcggcactttctcactaattggaaacgggtcttttctaaagcaaggatcccaaaaatgcaggacataactttgggagaggcggaaaaacatgagtgga

SEQ ID NO: 80983 - DNA, 3291 bp, Oryza sativa
  Clone ID: PAT_MRT4530_80555C.1
atggcacggggctccgctccgcttgacggtagcgtactgccgccttcccgcatcgtgagcgagagacaggccgggctgccgcgccgcttcatgccggaatctgccaccggccgggagatagtctcgctgggcgagggatgcccggcgccacgctacccggggcggtccgtcttcttcctcccttttgctgcagggctggttccgccattttcttctttcttcatggatgttctggagttttacgatctccagatggcgcacctcacccccaacgcggtaatgacattggccatcttcgcgcacctgtgcgagatgttcatcggggtgtgcccatcccttcggctgttccggtggttcttcaccgtacagccggtgtcgccgccgtcggtggttggtggttgctacttccagccgcgggggccggtgctgaaccgctacattccctgcgtcctccgcaagaagtgggatgactggaagagcgactggttctacacccccctcgctgacgaagcgcgcctccgacttccgagccagcctccagcgcaggcctccagctggcgggcgccggtagatctgggagatggctatgacgccgtcctcgaccgcttggcgggcctgcgatcccaggggctcacaggggccatggtgttcggcgactaccttcgtcgccggattgcgccgctccagcggcgcgcccggggcgcctgggagtacaccgggtccgaagactacatgaggacccaccagggggtcagatgggactgggctcctgaggacttcaagatagtggtccaacgggtgctgaatctcagctccgtggaggcatccctcattcctcaaggagtcctccccctctgcagcgatccagaccgcgcctccatcctgaccatcatgcaggcggtcggggcgtcggaggagcgggctcctcgaggccacgatggcgcgggcgggagccgcaggggggaacaatctaccccgggagggggtcgtgcttctgggccccgcgacgggggcccggggagcggccgccctgccgacgcccgggggaagaggaagcaggaaggaacccctcccccatctcctccccgagggggcggggcggcgcgtgccagcagcaggcgcccggagggggccacgccgacgtcgcagcccgagggggagcggaagaagaaacggctccgcaagatgggggggggacagaaccatcccggggaaacctcatttcccctccaaggtggtcgtttaaccgaccccctcgcaggttcgtcccactcccatcgtggccgtattcattctctcaacgcgagttttcactcatccatcttgtttgtcttctggtctttcttctgtttcagcgagatcccgtcgcgtccctcccgccattccaagtccggccagtctgaggccgaggacccggcgaccacagaggcccggaggcgggaatctgaccggcgagaagccgcggatcgccttcgggaagccgaggaggccgctcgggaggccgcccgggctcgccagaccgaggaagccgctcgggaggaggccggactccgccaggccgaggcgacgacatcctccgaggcgacccgtgaaactgaccggcaagaggccgcggatcgccttcgagaagccgaggaagctgcccaggtggccgtccgagctcgccaagctaaagaagccgctcgggaggaggccagacttcgccaggccgaggcgacgacgacttccgaggcaactcgcgacgaggccgcgggcgcatcgcttgggcccactccctcgtgcgacgctcaggacaaaccaggtccgggggacatcctcgagtccggcacgtccatcggcgggccaagccacgcggcatcctcttcgaggcagctcttccccatgccttccgttgctccactgagcgcagaaccccttctgcaggccttggccgtcgcaaacaccacggtgttggacgggttaagtgcccaggtggaggccctgcaagcagagcgggcggagctcgacgccgcatgggcgcgtgtcgaagaggggcgacgctcggtggaggccatggtggaggtgggccgcaaggcacaccgccggcacgtctcagagctcgaagcccgtcggaaggtgctgggggagatcgccaaggaggtggaggaggagcggggggctgccctcatcgccaccaccgtgatgaacgaggcgcaggacaccctccgccttcaatacgggagctgggaggcggagctagggaagaagctcgacgccgcccggggggtccttgacgctgccgctgcccgagaacggcgggcggcggaaaccgaggtggcatcccggcggcgcgaagaagcccttgaggcccgtgccatggcgctggaagagcgtgcctgcgccgtggagagggacctggcggatcgcgaggccgccgttgccatccgggaggcaacgctgactgcgcacgaggccgcctgtgccgaagaggagtccgcgctccgcctccgcgaggacgcgctcaccgagcgggagcgagctctcgaggaggccgaggccgcggcgcaacggctggcggacggcctgtccctccgcgaggcagcgcgggaggagcaggcacgccgtaatctggaaggtgcccgcgccgagagggccacgctgaaccagcgggccactgagctcgaggcgcgggagaaggagctggacgcgagggcgcgcagcggtggggcggccgcgggcgaaagcgacttaaccgcccgcctcacagctgccgaacacaccatcgccgatctgcagggcgcgctagactcgtccgccggggaggtcgaggccctccgcttggcaggcgaggtagggcccggcatgcttcgggacgccgtctcccgtctagaccgcgccggccggcaggcgggcctctggggcgggcggactgcgaagtacgccgccaaccaggggggcctcgcccagcgcctctcggagatagccgggactctccaacggctccccgaggagctcgagaggacgattaagtcatcctcgagggacctcgcccgaggagcggtggagctcgtactggcgagttaccaagccagggatcccgacttctccccatggacggcgctggacgagttccctcccgggaccgaggacggtgcgcgcgcgcaggtccgggacgccgccgaccatatcgtccacagcttcgagggttcggcccctcggctcgcgttagccctcaactccgacgaggaggacgatgacggcggagtgggcgacagtggcgacgaggctggcgacccgggtgcattggagtga

SEQ ID NO: 80984 - DNA, 680 bp, Oryza sativa
  Clone ID: PAT_MRT4530_80556C.1
gcttcgcgtctcgtatttggatcttccttctgtcctggtgaatcttccatcggttcttgccttgtctgatctgtttttccattttttgtgttgtttcagtcagtcaggcaacttgtttatgtgatttctttcgtttgccattgagccgaaacgagttgctgatctgggtagattttggatgtgttgggtttcttgtagtatttggaattggttggtccgagttggggttgtaggaatcatcaggaagaaagccaatttgcagagcaaaggggccagatgcagtggctatctttgcattgaaggttggcgacaacgaacaaacgcagttctccgtgccgctcagattttctctgttttgtgacggcctcgaacaagctgctacatccactttcttgattgtatcttttgttttgattgggtcttgattttgggctcagatttatggccagagcaatcttttgttttgattgggtcttgattttgggctcagatttatggccagagcaattttgtctttttttttttgctgatttaggcttttggattgtttgagattggatctcacttgcaagaaccgccgctatatctctatgaagtacttcctttgtttttttgttcgcattttcaaatcgacaactgttaatttatagggagaaataaatttatatcggtttgaaaac

SEQ ID NO: 80985 - DNA, 2604 bp, Oryza sativa
  Clone ID: PAT_MRT4530_80557C.1
atggcacggggctccgcaccgctcgatggtagcgtgctgccgccttcccacatcgtgagcgagaggcaggccgggctgccgcgccgattcatgccggaatctgccaccggccgggaggtggtcgcgctgggcgagggacgcccggcgccagactacccggggcggtccgtcttcttcctctctttcgcaatggcggggctggtcccgccattctctatttttttcatggatattctggagttttatgatctccagatggcgcacctcacccccaacgcgataatgacgctggccatcttcgcgcacctgtgcgagatgtttattggggtgcgcccatctctccggctgttccggtggttcttcaccgtacagccggtgtcgccgccgacggtagtcggtggctgctacttccagccgcgggggcaggtgctgaaccgctacattccctgcgtcctccgcaaaaagtgggacgactggaagagcgattggttctacactcccctcgccgacgaagcgcgccttcgacttccgagccagcccctggcgcaggcctccagctggcgggcgacggggctcacgggggccatggtgttcggcgactacctgaggacccaccaggggcgcaaatgggactgggaccctgaggacttcaggatggtggtccaacgggtgctgaatctcagctccgtggaggcatccctcatcccccaaggggtcctccccctctgctgcgatccagagcgcgccaacatcctgaccatcatgcaggaggtcggggcgtcgggggagcgggccccccgaggccacgacggcgcgggcgggagccgcaggggggaacaatctaccccgggagggggtcgtgcttctgggccccgcgacgggggcccggggggcagccgccctgccgacgcccgggggaagaggaagcaggagggtacccctcccccatctcctccccgagggggcggggcggtgcgtgccagcagctggcgcccggagggtgccgtgccgacgccgcagcccgagggggagcgaaagaagaaacggctccgcaagatgggggggaccgagccatgccgggggaacctcatctcgcccccgaggtggtcgtttagccgacctccctgcagcgagatcccgtcgcgcccccccccccccgccattctaagtccggccggtctgaggtcgaggagacggcgaccgcggaggcccggaggcgggaagctgaccggcgagaagccgcggaccgcctccgggaagccgaggaggctgcccaggaggccgtccgggctcgccaggctgaggaggccactcgggaggaggccagactccgccgggccggggagtccatccgggaggcagaggcggcgcgcgcacgcgaggcggccgaggcggctttcccctctgtcttccgctgccccaccgagcgcggagcccctcctgcaggccttggccgccgcgaacgtcacggtgctggacgggttaagtgcccagatggaggccctgcaggcggagcgggcggagctcgacgcggcgtgggcgcgcgtcgaggaggggcggcgctcggtggaggccatggtggaggcgggccgcaaggcacaccgccggcacgcctcacaactcgaggcccgtcgtagggacctggcggagatcgccagggaggtggaggaggagcgggagagtgccctcatcgccgcccggggagtcctcgacgccgccgctgcccgggaacggcgggcggcggagaacgaggcggcgtcccggcagcgcgaagaggcccttgaggctcgcgccacggagctggaggagcgcgcccgcgccctggacgcgaaggagagagacctggcggaccgcgaggccgctgtcgccacccgcctgttcctccgcgaggcagcgcgggaggagcaggcgcgccgcaatctggaaggcgcccgcgccgagagggccgcactggatcagcgggccgcagagctcgaggcgcgggcgaaggagctggacgcgagagcgcacagcggcggggcggccgcgggcgacggcgacctagccgcccgcctcgcagccgctgaacacaccatcgccgagctgccgggcgcgctggactcgtccgccggggaggtcgaggccctccgattggcgagcgaggtagggcccggcatgcttcgggacgccgtctcccgtctagactgcgccgggcggcaggcgggcctctggggcgggcggtacgcgaagtacgccgccaaccaggggggcctcgcccagcgcctctcagagatggccgggaccctcaagcggctccctgaggagctcgaggagacgatcaagtcatcctcgagagacctcgcccggggggcggtggagctcgtactggcaagttaccaggccagggaccctgacttctccccgtgggcagcgctggaagagttccctcccggaaccgaggacggcgcgcgcgcgcaggtccgggacgccgccgaccacatcgtccacagcttcgagggtacggcccctcagctcgcgttcgcgctcgactccgacgaggagggcggtgacgacagtgcggacgacagcgacgacgaggccggcgacccgggcgcgtcggagtga

SEQ ID NO: 80986 - DNA, 319 bp, Oryza sativa
  Clone ID: PAT_MRT4530_80558C.1
gcacgaggcgactgatcatctgaaatggctcgcaagaatctccttctgcttggtgttctcctatctgctctgcttttcttcttcctggatgtagctcacgcaagagagctcgctgaagccagtgaatctgaggggaagaatgtgaagccaacaggtgggtcaggggtcgaggatcagaagtggggcggtgctcatggtggaggatatggatatggcggcgggtatggtggaggaggacatggtggtggttggccttaataggtattcgagtcatctaagtacaactgttaaataagtcagttatgacaaacttgtttga

SEQ ID NO: 80987 - DNA, 2685 bp, Oryza sativa
  Clone ID: PAT_MRT4530_80559C.1
atggcacggggctccgctttgcttgatggtagcgtgctgccgccttcccgcatcgtgagcgagaggcaggccgggctgccgcgccgcttcatgccggaatctgccaccggccgggagatagttacgctgggtgagggacgcccggcgccatgctacccggggcggtccgtcttcttcctcccttttgcaatggcagggctggttccgccattttcttctttcttcatggatgttctggagttttacgatctccagatggcgcacctcacccccaacgcggtaatgacattggccatcttcgcgcacctgtgcgagatgttcatcggggtgcgcccatcccttcggctgttccggtggttcttcaccgtacagtcggtgtcgccgccgtcggtggttggtggctgctacttccagccgcgggggccggtgttgatccgctacattccctgcatcctccgcaagaagtgggatgactggaagagcgactggttctacacccccctcgccgacgaagcgcgcctccgacttctgagccagcccccggcgcaggcctccagctggcgggcgccggtagatctgggagatggctatgacgccgtcctcgaccgcctggcgggcctgcgatccctggggctcacaggggccatggtgtacggcgactatcttcgtcgccggatcgcgccactccaacggcgcgcccggggtgcctgggagtacaccgggtccgaggactgtatgaggatccaccgggggggtcaaatgggactgggtccccgaagacttcaagcgagatcccgtcgcgtccctcccgccattccaagtccggccagtctgaggccgaggacccggcgaccacagaggcccggaggcgggaatctgaccggcgagaagccgcggatcgtcttcgggaagccgaggaggccgctcgggaggcctcccgggcttgccagaccgaggaagtcgctcgggaggaggccggactccgccaggccgaggcgacgacatcctccgaggcgacccgtgaaactgaccggcaagaggccgtggatcgccttcgagaagccgaggaagctgcctaggtggccgtccgagctcgccaaactgaagaagccgctcgggaggaggctagacttcgccaggccgaggcgacaacgacttccgaggcaactcgcggcgaggccgcgggacaaaccaggtccgggggacatccccgagtccggcacgtccatcggccggctaagccgcgcggcatcctcttcgaggcggctcttccccacgccttccgttgctccactgagcgcagaaccccttctgcaggccttggccgtcgcaaacaccacggtgttggacgggttaagtgcccaggtggaggccctgcaagcagagcaggcggagctcgacgccgcatgggcacgtgtcgaagaggggcgacgctcggtggaggccatggtggaggtgggccgcaaggcacaccgccggcacgtctcagagctcgaagcccgtcagaaggtgctgggggagatcgccaaggaggtggaggaggagcggggggctgccctcatcgccaccatcgtgatgaacgaggcgcaggacaccctccgccttcaatacgggagctgggaggcggagctagggaagaagctcgacgccgcccagggggtccttgacgctgccgctgcccgagaacggcgggcggcggagaccgaggtggcatcccggcggcgcgaagaagcccttgaggcccgtgccatggcgctggaagagcgtgcctgtgccgtggagagggacctggcggatcgcgaggccgccgttgccatccgggaggcaacgctgactgcgcacgaggccgcctgcgccgaagaggagtccgcgctccgcctccgcgaggacgcgctcaccgagcgggagcgagctctcgaggaggccgaggccgcggcgcaacggctggcggacagcctgtccctccgcgaggcagtgtgggaggagaaggcgcgccgtaatctagaaggtgcccgcgccgagagggccgcgctgaatcagcgggccgctgagctcgaggcgcgggagagggagctggacgcgagggcgcgcagcggcggggcggccgcgggcgaaagcgacttaaccgcccgcctcgcagctgccgaacacaccatcgccgatctgcagggcgcgctagactcgtccgccggggaggtcgaggccctccgcttggcaggcgaggtagggcccggcatgtttcgggacgccgtctcccgtctagaccgcgccggccggcaggcgggcctctggggcgggcggactgcgaagtacgccgccaaccaggggggcctcacccagcgcctctcggagatagccgggactctccaacggcttcccgaggagctcgagaggacgattaagtcatcctcgagggacctcgcccgaggagcggtggagctcgtactggcgagttaccaagccagggatcccgacttctccccatggacggcgctggacgagttccctcccgggaccgaggacggcgcgcgcgcgcaggtccgggacgccgccgaccatatcgtccacagcttcgagggttcggcccctcggctcgcgttcgccctcaactccgacgaggaggacgatgacggcggagtgggcgacagtggcgacgaggctggcgacccgggtgcatcggagtga

SEQ ID NO: 80988 - DNA, 405 bp, Oryza sativa
  Clone ID: PAT_MRT4530_8055C.1
atggcatcgagtgagacgcatctgggtcggtcaggcagggacaatgccgacccacatgcattacacgcatcgtccatgactaatcagatcatgagaagctctggtatatcgattatggagtatatcagtttaccgagtacaggatccgcctgggataatactgctgccctcacatataggacgcaaaatacgaacgcatttacacccataaacagagagtctacgaatagtacggctactactacttctctgttgcgtggcgacactgtccgtgaccggatcagccacgcttctagttctactactggtgggcaacagcgtcgttcacagttcgacccgtatggagttgatgccgactttgaccggtatcccgaggcttcttcctatacgtcgtcgcttggataa

SEQ ID NO: 80989 - DNA, 459 bp, Oryza sativa
  Clone ID: PAT_MRT4530_80560C.1
ctgcaggttgactctagaggatcgccgtaaagcaaattggttcgccagcaggacgactaatgggcacttttgtttgtgagggagccggcggcaaaaccaccttggggggacaatgtggggccagtgccaatgcgggtaatggtacgctcaatccgttgggactctgcttgaaaaacaaactgattttcccccatcttgagagggattacaggggcaaaattgccttgggcactgcgttcaatgggctggccattgagggtaacggtcacatttggagcggcagaaccaatgaaaaaaatcgtcgggctactggtttggtgattttggggtggataggccaaaaataagggctgactttgggctacagccggcatagtgaaaaccaccgctgcccccacaccaatcattgttcccaaccaagatttcattgccatcattgcaaaaaattccccgtttaaa

SEQ ID NO: 80990 - DNA, 1662 bp, Oryza sativa
  Clone ID: PAT_MRT4530_80561C.1
atgtcccgtcacgttcctcccgccatcccaagtccggccaatccgaggccgaagatccggcggccgcagaggaacggaggcgagaatctgaccggcgagaggccgcagatcgccttcgggaagctgaagaggccgcccgggaagccgcccgggctcgccaggctgaggataccgctcgggaggaggccgcccgggcccgccaagccgaggaagccgctcgggaggaggccgcccgggcccgccaagccgaggaagccgctcgggaggaagccgcccgggttcgccaggctgagacgatggcgtcttccgaggcagctcacgacaaagctgctggcgcgtcgcttgggcctactccctcgggcgacgctcaggcgacagcctccggggcggctcgcgacgaggccgcgggcggatcgcctgggcccacttccccaggcgacgcccaggaccaaacgggtccgggggacatccccgagcccagccttggccgccgcaaacaccgcggtgctagatgggttcagcgcccaggtggaggccctgcgagcggaacgagcggagctcgaggccgcatgggcgcgtgtcgaggaggggcggcgctcggtggatgtcatggtggaggtgggccgtaaggctcaccgccgtcacgtctcggagcttgaagcccgcaaagcggcgctggcagagatcgcccgagaggtggaggaggagcggggggctgccctcatcgccactactatgatgatcgaggcgcaggactccctccgccttcagcacgggaactgggaggcggagctgaagaaaaagctcgacgccgcccagggggttcttgatgccgccgctgcccgagagcagcgagcgacggagactgaagcggcgctccggcggcgtgaagaggccctcgaggcgcgcgccatggcgctggaggagcgcgcctgcgtcgcggagaaagcagcgctgacggagcaggcccgccgcaactcggaatccgtccgcgccgagagagccgcactggagcagcgggctgccgatctcgaggcgcgggaaaaagatctggacgcgagggcgtgcatcggcggggcggctgcgggcgaaagcgacttagccgcccgcctcgcagatgccgaacacatcgtcgcagacatgcagcgcgcgctagactcatccgccggggaagccgaggccctccgcttggcgggcgagatagggcccggcatgctctgggatgcggtctcccgcctggatcgcgccggtcggcaagcgggcctctggaaaggccagtcaatgacacatcccaccaacctggaaggcctcgctccgcacctcacgaagatggcctgggctctccaacaactccccgaggagctcgagaagaccatcaagtcatcctcgagggacctcgcccaaggagcggttgaactcgtactagcgagttaccaggccagggaccccaacttctctccatgggtggcgctggaagagttccctcccgggactgaggacgacgcgcgcgcgcgggtccgggatgccgccgaccacatcgtccacggtttcgaggggtcggcccctcggctcgcgttcgcccccaactccgacgaggagggcgatgccagcggtgcagacgacgtggaagacgaggccggcgacccgggcgcatcggattga

SEQ ID NO: 80991 - DNA, 3105 bp, Oryza sativa
  Clone ID: PAT_MRT4530_80562C.1
atggcacggggctccgcaccgctcgatggtagcgtgctgccgccttcccgcatcgtgagcgagaggcaggctgggctaccgcgccgcttcatgccggaatctgccaccggccgggagatggtcgcgctgggcgagggacgcccggcgccacgttacccggggcggtccgtcttcttcctctcttttgcaatggcagggctagtcccgccattctcttctttcttcatggatgttctggagcattatgatctccagatggcgcacctcacccccaacgcggtaatgacgttggccatcttcgcacacctgtgcgagatgtttatcggggtgcgcccatctcttcggctgttccggtggttcttcaccgtacagccagtgtcgccgccgtcggtggtcggtggctgctacttccagccgcgggggccggtgctgagccgctacattccctgcgtcctgcgcaagaagtgggacgactggaagagcgactggttctacacccccctcgccgacgaagcgcgcctccgacttccgagccagcccccggcgcaggcctccagctggcgcgtgccggtagatctgggagacggctacgacaccgtccttgaccgcctggcgggcctgcgatcctaggggctcacgggggccatggtgtacgacgactaccttcgtcgccggatcgcgccgctccagcggcgcgcccggggcgcctgggagtacaccgggtcgaaggactacatgaggacccaccaggggggcagatgggactgggcccctgaggatttcaagatggtggtccaacgggtgctgaatctcagctccgtggaggcgtccctcatcccccaaggagtcctccccctctgcagcgatccagatcgcgccaacatcttgaccatcatgatggcggtcggggcgtcggaggagcgggctcctcgaggccacgatggcgcgggcgggagccgcaggggggaacaatctaccccaggagggggtcgtgcttctgggccccgcgacgggggcccggggggcagccgccctgccgacgcccgggggaagaggaagcaggagggtaccccttccccatctcctccccgagggggcggggcggtgcgtgctagcagcaggcgctcggaaggtgccgcgccaacgccgcagcccgagggggagcggaaaaagaaacggctccgcaagatgggggggaccgagccaagccggggaaacctcatctcccccccaaggtggtcgtttaaccgacctcctcgcagcgagatcccgtcgcgcccctcccgccattccaagtccggccggtctgaggccgaggatacggcgaccgcggaggcccggaggcgggaagctgaccggcgagaagccgcggaccgccttcgggaagccgaggaggctgcccaggaggccgtccgggctcgccaggctgaggaagccgctcgggaggaggccaggctccgccgggccgaggagtccgcccgggaggcggaggtggcacgcgcacgccaggcggcctgccaagcccccgacccgactccgcccgaggcgacgatgacttccgaggccacccacgactaggccgcaggcgcaccgctcgggcccgactcctcgggcgacgctcaggacgagccaggttcgggggacgtccccgagtccggcacgtcgatcggcgggccgagccgtgcggcattctcaccgaggcggctctctcccatgccttccgctgccccactgagcgcggagccccttctgcaagccttggccactgcgaacaccacggtgttggatgggttaaatgcccagatggaggtcctgcaggcagagcgggcggagctcgacgcggcgtgagcgcgtgtcgaagaggggcaatgctcggtggaggccatggtggaggcgggccgcaaggcacaccgccggcacacctgagagctcgaggcccgtcggaaggagctggcggagattgccagggaggtggaggagaagcgagaggctgccctcattgccaccgccgtgctgaacgaggcgcgggacgatctccgcctccaatacgggagctaggcggcggagctaggaaagaagctcgacgccgcccggggggtccttgacgccgccgctgcccgggaacggcgggcggcgaagaccgaggcggcgtcccggcggcgcgaagaagcccttgaggcccgcgccatggtgctggaagagcgcgcccgcgcgaaggagagggacctggcggaccgcgaggccgccgtcgccatccgggagacaacactggcggcgcacgaggccggctgtgccgaagaggagtccacactccgcctccgcgaggatgcgctcaccgagcgggagagagctctcgaggaggccgaggccgcggcgcaaaggctggcggacagcctgtccctccgcgaggcggcgcgggaggaacaagcgcgccgcaatctggaaggtgcccgcgccgagagggccgcactggatcagcggaccgctgagctcgaggcgcgggcaagggagctggatgcgagggcacgcagcggcggggcggccgcgggcgacggggacttagcagcccgcctcgcagctgctgaacacaccatcgcggatctgcagggcgcgctgaactcgtccacgggggaggtcgaggccctccgcttggcaggcgagatagggcccagcatgcttcgcgacggcgtctcccgtctagaccgcgccgggcggtaggtgggtctctggggcgggcggactgtgaagtacgccgccaaccaggggggcctcgcccagcgcctctccgagatggccgggaccctccagcggctccccgaggagctcgaggagacaattaagtcatcctcgagggacctcgcccgaggagcggtggagctcgtactggcgagctaccaggccagggaccctgacttctccccatgggcagcgctggacgagttccctcccgggaccgaggacggtgcgcgcgcgcaggtccgggacgccgccgaccacatcgtccacaacttcgagggtacggcccctcggctcgcgttcgccctcgactccgacgaggagggcggtgacggcggtgacgaggccggcgacccgggtgcgtcggag

SEQ ID NO: 80992 - DNA, 3177 bp, Oryza sativa
  Clone ID: PAT_MRT4530_80563C.1
atggcacggggctccgcaccgctcgagggtagcgtgctgccgccttcccgcatcttgagcgagaggcaggccgggctgccgcgccgattcatgccggaatctgccaccggccaggaggtggtcgcgctgggcgagggacgcctggcgccacactacccggggcggtccgtcttcttcctctctttcgcaatggcggggctggtcccgccattctctatttttttcatggatattctggagttttatgatctccagatggcgcacctcacccccaacgcgataataacgttggccatctttgcgcacttgtgcgagatgtttatcggggtgcgcccatctctccggctgttccggtggttcttcaccgtacagccggtgtcgccgccgacggaagtcggtggctgctacttccagccgcgggggcaggtgctgaaccgctacattccctgcgtccttcgcaaaaagtgggacgactggaagagcgattggttctacacccccctcgccgacgaagcgcgcctccgacttccgagccagcctccggcgcaggcctccagctggcgggcggcggtagatctgggagacggctacgacgccgttcttgaccgcctggcgggtctgcgatcccaggggctcacgggggccatggtgttcggcgactaccttcgtcgccggatcgcgccgcttcagcggcgcgcccggggcgcctgggagtacaccgggcccgaggacatcatgaggacccaccaggggcgcaaatgggaccctgaggacttcaggatggtggtccaacgggtgctgaatctcagctccgtggaggcatccctcatcccccaaggggtcctccccctctgctgcgatccagagcgcgccaacatcctgaccatcatgcaggaggtcggggcatcgagggagcgggccccccgaggccacgacggcgagggcgggagccgcaggggggaacaatctaccccgggagggggtcgtgcttctgggccccgcgacgggggcccggggggcagccgccctgccgacgcccgggggaagaggaagcaggagggcacccctcccccatctcctccccgagggggcggggcggtgcgtgccagcagcagacgcccggagggtgccgtgccgacgccgcagcccgagggggagcgaaagaagaaacggctccgcaagatgggggggatcgtgccatgccgggggaacctcatctcgcccccgaggtggtcgtttagccgacctccccgcaggttcgtccccgcgcccaccgcggccgtatttattctcccatctcccaaggcgagttttcactcacccgtttctttttgtcttctggtttttcttctgcctcagcgagatcccgtcgcgccccccccccgccattccaagtccggccggtctgaggccgaggagacggcgacagcggaggcccggaggcgggaagctgaccggcgagaagccgcggaccgcctccgggaagccgaggaggctgcccaggaggccgtccgggttcgccaggctgagaaggccgctcgggaggaggccagactccgccgggccggggagtccgtccgggaggcagaggcggcgcgcgcacgccaggcggcctgccaaacccccgacccgactccgcccgaggggacgacaacttccgaggccacccacgacgaggccgcgggcgtgccgctcgggcccgacccctcgggcgacacttgggacgagccagcttcgagggacgcccccgagtccggcacgtcttccgctgccccactgagcgtggagcccttcctacaggccttggccgccgcgaacagcacggtgctggacgggttaagtgcccagatggaggccctgcaggcggagcgggcggagctcgacacggcgtgggcgcgcgtcgaggaggggcggcgctcggtggaggccatggtggaggctggccgcaaggcgcaccaccggcacacctcacagctcgaggcccgtcgtagggagctggtggagatcgctagggaggtggaggaggagcgggagactgccctcatcgccaccgccgtgctcgacgaggcgcgggacgacctccgcctccaatacgggagccgggcggcggagctagaggagaagctcgacgccgcccggggagtccttgatgccgccgctgcacgggaacggcgggcggcggagaaagaggcggcgtcccgccagcgcgaagaggcccttgaggttcgcgccacggcgctggaggagcgtgcccgcgccctggacgtgaaggagagagacctggcggaccgcgaggccgccgtcgccacccgggaggcaacactggcgtcgcacgaggccgcctgcgccgaagaggagtccgcactccgcctccacgaggacgcgctcaccgaacgggagcgagctctcgaggaggccgaggccgcggcgcagcggctggcggacagcctgttcctccgcgaggcagcgcgggaggagcaggcacgccgcaaactggaaggcgcccgcgccgagagggccgcactggatcagcgggccgctgagctcgaggcgcgggcgaaggagctggacgcgagagcgcacagcggcggggcggccgcgggccacggcgacctagccgcccgcctcgcagccgccgaacacaccatcgccaagctgcagggcgcgctggactcgtccgccggggaggtcgaggccctccgcttggcgagtgaggtagggcccggcatgcttcgggacgccgtctcccgtctagaccgcgccgggcggcaggcgggtctctggggcgggcggcacgcgaagtacgccgccaaccaggggggcctcgcccagtgcctctcagagatggccggggccctccagcggctccccgaggagctcgaggagacgatcaagtcatcctcgagggacctcgcccggggggcggtggagctcgtactggcaagctaccaggccagggaccctgacttctccccgtgggcagcgctggaagagttccctcccggaaccgaggatggcgcgcgcgcgcgggtccgggacgccgccgactacatcgtccacagcttcgagggtacggcccctcggctcgcgttcgcgctcgactccgacgaggagggcggtgacgacggtgcggacgacagcggcgacgaggccgacggcccgggggcgccggagtga

SEQ ID NO: 80993 - DNA, 333 bp, Oryza sativa
  Clone ID: PAT_MRT4530_80564C.1
atgaggtcagggttcgtagatccgaccaccacagtgtctcaccggaccgccagccgcatcatgctcctcctccgggacatggatccggccgctgctgccgccttccccgcctcccgaccaataaccaccggatccagccgccacagcttcttccccaaccgtaagccgtcggctgccggatccagcctccacaagtttggagaatgcggatctgatgactgccgccttcatcccctaacccccggtgaccacagcttcttccccaacgccgccaacaccacccgaatgtgcttgatttttcttatcttgcaaatgttcattgccaaactttag

SEQ ID NO: 80994 - DNA, 536 bp, Oryza sativa
  unsure (1)..(536): unsure at all n locations
  Clone ID: PAT_MRT4530_80565C.1
gcacgaggctctcttaaatcctcttctccacacagccgtgcggcggcggcggcggtgccacgcacggaggccggcggcgcggggctcgagaggcggctccggcgggctaaagaggcggtggcggcgagctcgagaggcggcacgcgggggcggcgacggcggcaagagcggatctggggacgacggccctcccccgagcggatccggggtcagccgccctcctcccacgcggatccggcgccggcgccctcccccgcagcgacgacgagctcgggggcggcggatccggctcaggtgcggcgacgacgacggtggcgggtggtggcggtgaggttgggcgcggcggatgcggtgacgaagacctcccggtggcgacgacgaccgcgatnggtggcggcggcgaggtcgggctcggcggatgcggtgacgaagacctcccggcggcgacgacgaccacaccggcgggtggcggcggcgagctcgggcgcggcgacgacgaccgcggcgggcggcggcggcgagctcgggtgcggcga

SEQ ID NO: 80995 - DNA, 3117 bp, Oryza sativa
  Clone ID: PAT_MRT4530_80566C.1
atggcacggggctccgcaccgctcgacggtagcgtgctgccgccttcctgcatcgtgagcgagaggcaggccgggctgccgtgccgattcatgccggcatctgccgccggccgggaggtggtcgagctgggcgagggacgcccggcaccacactacccggggcggtccgtcttcttcctccctttcgcaatggcagggctggtcccgccattctcttctttcttcatggatgttctggagttttatgatctccagatggcacaccttacccccaacgcagtaatgacgttggccatcttcgcgcacctgtgcgagatgtttatcggggtgcgcccatctcttcggctgttccggtggttcttcaccgtacagccagtgtcgccgccgtcggtagtcggtggctgctacttccagccgcgggggccggtgctgagccgctacattccctgcgtcctccgcaagaagtgggacgactggaagagcgactggttctacacccccctcgccgacgaagcgcgcctccgacttccgagccagcccccagcgcaggtctccagctggcgggcgccggtagatctgggagacggctacgacgccgttcttgaccgcctggcgggtctgcgatcccaggggctcacgggggccatggtgtacggcgactaccttcgtcgccggattgcgccgctccagcggcgcgcccggggcgcctgggagtacaccgggtccgaagactacatgaggacccaccagggggtcagatgggactgggcccctgaggacttcaagatagtggtccaacgggtgctgaatctcagctccgtggaggcatccctcatcccccaaggagttctccccctctgcagcgatccagatcgcgccacgatcctgaccatcatgcaggcggtcggggcgtcggaggagcgggctcctcgaggccacgatggcgcgggcgggagccgcaggggggaacaatctaccccgggagggggtcgtgcttctgggccccgcgacgggggcccggggagcagccgccccgccgacacccgggggaagaggaagcaggaaggaaccccttccccatctcctccccgagggggcggggcggcgcgtgccagcagcaggcgcccggagggtgccgtgccgacatcgcaacccgagggggagcgaaaaaagaagcggctccgcaagatgggggagactgaaccataccggggaaaccttatctccccccaaggtggtcgtttagccgacctcctcgcagattccatcgcgccccccccccgccatcccaagttcggccagtccgaggccgtggagacggcgaccgcggaggcccggaggcgggaggctgaccggcgagaagccgcagaccgcctccgggaagccgaagaagctgcccaggaggccgtccgagttcgccaggctgaggaagccgctcgggaggaggccaaactccgccgggccgaggagtccgtccggaaggcggaggaggcgcgcgcacgccaagcggcctgccaggcccccgacccgactccgcccgaggcgacgacgacttccgaggccacccacgacgaggccgcgggcgcaccgctcgggcccgacccctcgggcgacgctcgggacgtgccagcttcgggggacgcccccgagtccgccacgtcgatcggcgggccgtgccacgcggcgcccgcaccgaggcggctctctccttcgccttccgctgccccactgaacgcggagcccctcctgcaggccctagccgccgcgaacaccacggtgctggacgggctaggtgcccagatggaggtcctgcaggcagagtggacggagctcgacgcggcgtgggcgcgcgtcgaggaggggcggcgctcggtggaagccatggtggaggcgggccgcaaggcacaccgccggcacgcctcagagctcgaggcccgtcggagggagctggcggagatcgccagggaggtggaggaggagcgggagactgcactcatcgccaccgccgtgctcaacgaggcgcgggtcgatctctacctccaatacgggagccgggcggtggagctagagaagaaactcgacgccgcccggggagtccttgacgccgccgctgcacgggaacggcgggcggcggagaacgaggcggcgtcccggcggcgcgaagaggcccttgaggctcgcgccaaggcgctggaagagcgcgcccgcacgagggagagggacctggcggaccgtgaggccgccgtcgccatccaggaggcaacgctggcggcgcacgaagccgcctgcgccgaagaggagtccgcactccgcctccgtgaggacgcgcttaccgagcgggagcgagctctcgaggaggccgaggccgcggcgcagcggctggcggacagcctgtccctccgcgaggcagcgcgggaggagcaggcgccccgtaatctggaaggcgcccgcgccgagagggccgcactggatcagcgggccgctgagctcgaggcgcgggtgaaggagctggacgcgagggtgcgcagcggcggggcggccgcgggcgacggcgacctagccgcccgcctcgcagctgccgaacacaccatcgccgatctgcagggcgcgttggactcgtccgccggggaggtcgaggccctccgcttggcaggcgaggtagggcccggcatgcttcgggacgccgtctcccgtatagatcgcgccgggcggcaggcgggcctctggggcgagcggaccgcgaagtatgccgccaaccaggggggcctcgcccagcgtctctcagagatggccgggaccctccagcggctccccgaggagctcgaggagacgatcaagtcatcctcgagggacctcgcccggggggcggtggagctcgtactggcaagctaccaggccagggacccggacttctccccgtgggcagcgctggacgagtttcctcccgggaccgaggacaacgcgcgcgcgcaggtccgggacgctgccgaccacatcgtccacagcttcgagggtacggccccccggctcgcgttcgccctcgactacgacgaagagggcggtgacggcggtgcgggcgacagcggcgatgaggccggcgacccgggcgtgtcgtaa

SEQ ID NO: 80996 - DNA, 420 bp, Oryza sativa
  Clone ID: PAT_MRT4530_80567C.1
atgggttgctgccggatgggcaccacggtgggcaacggcaccgtcgacgcccatggcgagagctgggaggcggagcagctgtatgtgtgcaatgacagcgtgctgcccaccgcagtgggcatcaaccccatgatcaccatacagtccgtggcgtattgcgttgccaatggcattgctgactccctgtccgataaatataaaaaatatgaaaaaataatcatatatatttttatcaacgtattcacaataattaaattagatcaacaacgttttgcccccatcgacattaatgggaacaccatcagcatgggggccaaattagcttgtgactacatgtgtgataggggccaaattagcttgggagtacaggtgtatatcacagatgaccgagctaagagctttatctaccaattattttag

SEQ ID NO: 80997 - DNA, 273 bp, Oryza sativa
  Clone ID: PAT_MRT4530_80568C.1
atggcgatgcagagagtagcggctgaggcagtggagggcatatcagtacatgacatcgccacatccacgagtggtggcgagacggagggcggccgtggccttcctcgtcggcttgcagcgcggagccgtggaggcagcgggcaaactcgacggctgtggcaacacaacaggagtcggcacgactacggcaacgacacggcaaggcgcgggcaacttattggctctggtcttgggcacggctgcaaaggtgttatgatgatggagagtttgtga

SEQ ID NO: 80998 - DNA, 3180 bp, Oryza sativa
  Clone ID: PAT_MRT4530_80569C.1
atgaacggtctcttcaagactgccacattacgcgcgaatcgggacgtgccgttaacgcgcgcacgagatgttccatctcgactgccacagccgcatatccacctcatgcaccgtaaacgggcgaatgggataagtggaagagtgggcgcgagaatcgagggggcaagatactcttcttccggcgtcatggcacggggctccgctccgcttgacggtagcgtgctgccgccttcccgcatcgtgagcgagagacaggccgggctgctgcgccgcttcatgccggaatctgcgaccggccaggagatagtctcgctgggcgaaagatgcccggcgccacgctacccggggcggtccgtcttcttcctcccttttgctatggcagggctggttccgccattttcttctttcttcatggatgttctggagttttacgatctccagatggcgcacctcacccccaacgcggtaatgacattggccatcttcgcgcacttgtgcgagatgttcatcggggtgcgcccatcccttcggctgtttcggtggttcttcaccgtacagccggtttcgccgccgtcggtggttggtggttgctacttccagccgcgggggccggtgctgaaccgctacattccctgcgtcctccgcaagaagtgggatgactggaagagcgactggttctacacccccctcgccgacgaatcgcgcctccgactcccaagccagcctccagcgcaggcctccaactggcgggcgccggtagatctgggagatggctacgacgccgtcctcgaccgcctggcgggcctgcgatctcaggggctcacaggggccatggtattcggcgactatcttcgtcgccggatcgcgccactccagcggcgcgcccgggacgcctgggagtacaccgggtccgaggactgtatgaggacccaccagggggtccgatgggactgggctcctgaggacttcaagatagtggtccaacgggtgctgaatctcagctccgtggaggcatccctcattcctcaaggagtcctccccctctgcagtgatccagaccgtgcctccatcttgaccatcatgcaggcggtcggggcgtcggaggagcgggctcctcgaggccacgatggcgcgggtgggagccgcaggggggaacgatctaccccgggagggggtcgtgcttctgggcctcgcgacgggggcccggggagcggccaccctgccgacgcccgggggaagaggaagcaggaaggaacccctcccctatctcctccccgagggggcggggcggcgcgtgccagcagcaggcgcccggagggggccacgccgacgtcgcagcccgagggagagcggaagaagaaacggccccgcaagatgggggggacagaaccatcccggggaaaccttatttcccctccaaggtggtcgtttaaccgaccccctcgcagcgagatcccgtcgcgtccctcccgccattccaagtccggccagtctgaggccgaggacccggcgaccacagaggcccgaaggcgggaatctgaccggcgagaagccgcagaccgccttcgggaagccgaggaggccgctcgggaggccgccctggctcgccagaccgaggaagccgttcgggaggaggccggactccgccaggccgaagcgacgacatcctccgaggcgacccgtgaaactgaccggcaagaggccgcggatcgccttcgagaagccgaggaagctgttcaggtggccgtccaagctcgccaagctgaagaagccgctcgggaagaggccagacttcgccaggccgaggcggcgacaacttctgaggcagcttgcgacgaggccgcgggcgcatcgcttgggcccaatccctcgggcgacgctcaggacaagctaggtccgggggatatcccagagtccggcacgtccatcggcgggccgagccgcgcggcatcctcaccgagacggctcttccccacgccttctgttgctccactgagcgcagaaccccttctgcaggccttggccgtcgcaaacacgacggtgttggacgggttaagtgcccaggggcgacgctcggtggaggccatggtggaagtgggccgcaaggcacaccgtcggcacgtctcagagctcgaagcccgtcggaaggtgctggaggagatcgccaaggaggtggaggaggagcggggggctgccctcatcgccaccactgtgatgaacgaggcgcaggactccctccgccttcaatacgggagctgggaggcggagctagagaaaaaactcgatgccgcccagggggtccttgacgctgccgctgcccgagaacggcgggcggcggagaccgaggtggcatcccggcgacgcgacgaagcccttgaggcccgtgccatggcgctggaagagcgtgcctgcgccgtggaggggaacctggcggatcgcgaggccgccgttgctattcgggaggtcacactagcggtgcacgaagccgcctgtgccgaagaagagtccgcactccgcctccgcgaggacgcgctcaccgagcgggagcgagctctcgaggaggccgaggccgcggcgcaacggctggcggacagcctgtccctccgcgaggcttcgcaagaggaacaggcgcgccgtaatctggaagatgcccgcgccgagagggccgcgctgaaccagcgggccgctgtgctcgaggcgcgggagaaggagctggacgcgagggcacagattggcggggcggccgcgggcgaaagcgacttaaccgctcgcctcgcagctgccgaacacaccatcgccgatctgcagggcgcgctagactcgtccgccggggaggtcgaggccctccgcttggcaggcgaggtagggcccagcatgcttcgggacgccgtctcccgtctagaccgcgccggccggcaagtgggcctctggggcgggcggactgcgaagtacgccgccaaccaagggggcctcgcccagcgcctctcggagatagccgggactctccaacggttccccgaggagctcgagaggacgattaagtcataccaacaactatcatgtatcaggcacacatttggcctcataccaacaacttttgttttaaccaatttcaggaaccagtaccagctgtcggtattctcactctcaacaaaagcaaatgccaagggcaatacctga

SEQ ID NO: 80999 - DNA, 490 bp, Oryza sativa
  unsure (1)..(490): unsure at all n locations
  Clone ID: PAT_MRT4530_8056C.1
tgaaattggagtgaaatttgatgatattggggcactggaggatgttaagaggacgctggatgagcttgttactcttccaatgaggagacctgaacttttctcccatgggaatttgttaaggccctgcaaaggtgttttgctctttgggcctcctggaacaggaaaaacactcctggcaaaggcacttgcaacagaagctggagcaaatttcatcagcataactggttctacactcacatcaaagtggtttggagatgctgagaagttgacaaaggcccttttctcctttgctagccgattagctcccgttatcatatttgtggatgaggttgacagcttattaggtgcaagaggtggtgcatttgagcatgaagcaacaagaaggatgcggaacgaatttatggcagcttgggatggtctaaagtccaaagagagccagcgaatccttattcttggtgcgacaaatcgtccattngatctagatgatgct

SEQ ID NO: 81000 - DNA, 1359 bp, Oryza sativa
  Clone ID: PAT_MRT4530_80570C.1
atggatgagtcggaggctggcagggtgaagcgttgcagcaaatgcgatgaacgtgggcacacctacaagcattgtcctaaagacaaggagaaaccaagtgcggaggaggcaggactatcaggatcagcagcagatggagctcgccctacggagatggcacgtcaggatacacctgagttgttggacccggcgatagatcaccgacaccggtctcaccttactatggtgcagggggctcagcttgggacgttccgggcacggacgtgcggtgagctacatacagttcacgactcctttgtcgagagattgcgtgaggccggcctcctaccgatgtgtcggctggtggaggctgccgccggcgacgcagacccggccagacgctggaatgtggaccggtccctcctagcagctttggtcgaccgatggaggccagaggcgcacacttttcacttgccatgcggtgaggtagcccctaccctacaggacgtatcgtacttgttgaggctaccgctcgcgggagacgctattgggccagtgaccacgtgtgtggactggaaggacgatctgacggcacgtttcgcaccagtacagcgcgcaccacatctcccgctccagccgttggcacaccaccgcaacaccggacctacgaggaggtggctgcttcagttcaccctttttggctgggtgatgttctgtggcggtcacgggcacgcggtcgacaagggactcgtgcactacgccaggagcatcgccgacaccgcggtaggcgaggtgcctcagtggagctggggttccgcgttgttggcggctctgtaccgtggcctttgtgaggcttgcacgaagacggatcccagcgcgacctttggtgggtgccctctctttctttctatctgggtagctgagaggattgcgatcggctgccctgaggtggaccaacacgcatacggggagtcactgtacgtggagcgaccggaggtcgactaccctacgatgggtactctgtggtgccgtcgtcaggttaggcggtcgtatcctgagtttgttatggagttcgaccgccttctgccgactaacgtcgtgtgggagccctacagtgccgcggctacccaggctcgtgcgccgttgggtctgtccacactctgcacaagggaccaggcgtactggatgactacggttccgatggtcttcgacatctgcgttgagcctcacgcccctttccgtgtgatgtggcagtttggcttccgtcagctctttccagtaccgtttccgatgaccgtccagctgctgttcaccggaaccaccaaggagatgtcaatacagagaatggatagacaccagaagggttctaactctacctag

SEQ ID NO: 81001 - DNA, 5112 bp, Oryza sativa
  Clone ID: PAT_MRT4530_80571C.1
atgtcgaacaaacaaatatttcaagtttaccatggcccagaaaacgtccgttacgggccaactggggtagatctattagaatttattgtatcaaaaaggggaattgataaactggctgagaggagtgtaccttctataaaaggatggttaatgaggggcttgagagttgatccacagacaagtgacataacaatcaatgttatagatccaggtgtgcagatgaacatggatgatggcgagggaccaagtgctgaagtaaatgagacttctgtggaagaggtcaacgcacgagaggacgggggcgtagtagctccagtgggcattcaactaggtggagtggccgacgagggggagactgtcggtgccattgtggatgaaatggagagggaggattctgacaacgagcgtgtagagaaaggtgattcgtcagatgatgagacggatattaatccagcagaatgggctagtgaggatttttctagtctggtcgtctctgaagaggatagtgtgagatgggagtacaaagaaaatgaggttattcagggagcgatttatactagagcagaagatatgaaggaggcggtaaaacattttgcagtgtcacttcatagagagttttgggttgccaagttcaaccggtcgcaatatgaagttcggaacattacatgtgcatttgttgcatctgagatgtatgcgcatgtcatcgataatctcacatatgaaccaaggtcaataatccaacaaatcgaagagacatacaagtatactattagctatgccaaggcgtatagggccaaacagaaaataatagagatgagatttgcaacttacgaagcctcgtatgacaatttgccacgcctgcttggtgttatcgaagaaagaaaccctgggagctcttacacagtgaagaaattcccctcaattgaacatcctagcaagagtgtgctgcaaagggcgttcttagctctacatgcatgcaagatggcactcgtgaactgtcgtcctgttctctgcattgatgggacattcttgactggaaagtattttagggatcggttccaagcagttcttccctctatgccgaacaacagcattttattcagaactttcatgcagaaaaagctagaggagttgcgtaaaaaggccatgaaacatcgagctctagtgcaaggtacccaacagcacaagtttgagatactatgtcaagataaggcaggcaggggtatctaccgcaagagagtgaagcaggagtgtgttctcaaagccgacggcacatgtcattgctcttgtgcaaagccgaagctgctccacaggccatgcacccatgtcattgctgccgcagcggagtgtggcataccagatgcagtatatgtgtcacggtacttcaagatggcacgtcaggatacacctgagttgttggacccggcgatagatcaccgacaccggtctcaccttactatggtgcagggggctcagcttgggacgttccgggcacggacgtgcggtgagctacatacagttcacgactcctttgtcgagagattgcgtgaggccggcctcctaccgatgtgtcggctggtggaggctgccgccggcgacgcagacccggccagacgctggaatgtggaccggtccctcctagcagctttggtcgaccgatggaggccagaggcgcacacttttcacttgccatgcggtgaggtagcccctaccctacaggacgtatcgtacttgttgaggctaccgctcgcgggagacgctattgggccagtgaccacgtgtgtggactggaaggacgatctgacggcacgtttcgcaccagtacagcgcgcaccacatctcccgctccagccgttggcacaccaccgcaacaccggacctacgaggaggtggctgcttcagttcaccctttttggctgggtgatgttctgtggcggtcacgggcacgcggtcgacaagggactcgtgcactacgccaggagcatcgccgacaccgcggtaggcgaggtgcctcagtggagctggggttccgcgttgttggcggctctgtaccgtggcctttgtgaggcttgcacgaagacggatcccagcgcgacctttggtgggtgccctctctttctttctatctgggtagctgagaggattgcgatcggctgccctgaggtggaccaacacgcatacggggagtcactgtacgtggagcgaccggaggtcgactaccctacgatgggtactctgtggtgccgtcgtcaggttaggcggtcgtatcctgagtttgttatggagttcgaccgccttctgccgactaacgtcgtgtgggagccctacagtgccgcggctacccaggctcgtgcgccgttgggtctgtccacactctgcacaagggaccaggcgtactggatgactacggttccgatggtcttcgacatctgcgttgagcctcacgcccctttccgtgtgatgtggcagtttggcttccgtcagctctttccagtaccgtttccgatgaccgtcccagctgctgttcaccggtgtggtgatcgttgtcaggttcttcgttccataaagcctagaacattgggtcgaaggttctttatttgtccaaatattcttgacgacgatttcatggaaccaccaaggagatgtcaatacagagaatggatagacaccagaagggttctaactctacctagccatgttgtgcaacttgaactaccagagcaatacagggttactaaagcgcgaaaaatcatttgggggtactttttgcatctgggtcccttgccgccctctagtggggtggcaaggggcccaaatgcaaaaagtacaaaccccaagctctttatgggctgccgaggggctaaatgcaattttggccgacggcggcagacggcggaggcgtacctgcgcatgatccgggagcagcagcggatggggctacgtcagctgcgcggggacggggacggggcggcgtctcaggagggggagagcgacggggacggagacgaagggggaggggggaggaggaagggggtggtggcggcggggagctcgttgggtcaccgggtggacccgcgggagctggaggccggggagtacgtcgtgcacaagaaggtcggcgtcggcaagttcgtctgcatcagcgccgaggacggtctcgactacgtcttcatacagtacgccgacgccatggccaagctcgccgtcgaccaggccgcccgcatgctctacagatacaacctacctcacgagaagcagagaccacggaatttgagcaaactgaacgatccttccacgtgggagaagagaagactgaaagggaagcttgctgttcagaaaatggtagtcaatttgatggagttgtatttacaaaggatgaggcagaaaaggcctccttacccgaagcctgtgggaatggatcagtttactgctgaatttccctatgagcccactccagaccaaaaccaggcttttatagatgttgacaaagatctgactgaaagggaaaccccaatggacagattgatttgtggagatgttgggtttggtaaaactgaagttgcaatgcgtgctatattcattgttatatctgctggatttcaagctatggttcttgctccaactgtaatactagccaagcaacattatgatgtaatgtctgagcgtttctccaattatcctgatattaaggttgccatgtttagtggtgctcagaccaaagaagaaaaagatgagctaataacaaagataaggaatggtgatttgcatattattgttggaactcatgctgttcttacagaacgtatggcatataacaatcttggtctcctagtggtggatgaagaacagaagtttggtgtccaacaaaaggagaagattgcatcatacaaggcttctattgatgttctcacactgtctgcaacacccattccacgtactttgtatctcgcgttgacaggtttccgtgatgccagtttaatgtctacgccgcctccagaaagagttgctgtaaggacctacgtgtcaggatttagcaaagaaagggctctatcagctattaagtttgagttggcacgtggtggtcaagttttctatgttgttcctcgaataaaagcaatagatgatgtgctgcaatttctcaaggattctcttccagatgttccaatggctgttgctcatggaaagaaagtttcaaagaacatacaacttgctatggaaaaatttgcttgtggagaagtcaaaattctggtctgcacacacatcattgaaagtggaatagatattccaaatgccaacacgatggtagttcagtatgctgaactatttgggcttgcacagctatatcagttgcgaggtagagtaggaagatccggcacagaaggtttcgcatacctcttctacactgataagtctttgctctcaaagattgcaacggatagacttggagctattgaggagcattcagatcttggtcaaggtttccatgttgcagagaaggatatgggtatcagggggttcggaagcttgtttggtgagcaacaatctggagatgttgcaaatgttggcattgatctattctttgatatgctttttgatagcttgtcaaaggttgatcagttttgtcttattcccgtcccttacaaagatgttcagctggatataaacatttcttcacgtctctcctctgaatacataagttaccttgaaaatccggtggaattgcttaacgaagctgcaaaagctgcagagaaagacctatggaccttaatacaattcacagaagatcttcgtcgacaatatggaaaggagcctcgtgatatggagttgctattgaaaaagctctatgtaagacggatggcagcagatcttggtatcagtaggatatattcatctggcaaaatgatcatcatgaaaacaaacatgaacaagaaggtatttcggctcatgagagaagcaatgtctttggagactcatcgaaattccttatcattcactggaaaggaaattaagggtgaactacttgtcaatctgccggacactctactcctgaattggctttttcattgcttagcagactgctatgctgtaataccagcacttgtgaagtactag

SEQ ID NO: 81002 - DNA, 670 bp, Oryza sativa
  unsure (1)..(670): unsure at all n locations
  Clone ID: PAT_MRT4530_80572C.1
aacagaaaaaaacaaaaaaaaaacaataaaggagaagcagctccatccaagttcactccagngcngtgctactcccgctccccaccggcgcgcgcgcgggtgtccccccacgcgggcgccgngtttaccggggctcccgagttccccttccaccggagctgctcttcggccttctcccccttcgccggccgcagcagcagaagcacccagcgcccgtgangcccgagtcgccccccacctcggcgaggccttgacctaggctgtgatttctggctgtctaactacgtaaattcataggccctgtttggtatggctccaattcaaagttcaaggtccaattcaaagttcaaggttgggactgcttcatgttggagttggggttgatttaggaaggtgtttggccagatggttagctccaactgtaataatatcactatttcaagctggcacaaaaacaagcatcctgcatttatttcagctcatcctcggtcaccactccttgtcccaactgtaccctccacctaccaccgtagatgtaaagtcatgtgaagttgaccatttggcaatcaatatcaaagaggatatgaaatctgttttttggtctaattgtaaccttcatcaccaaatcaaatcctgcctctggcatccaagtttaaaaaaaaaaaaaaaa

SEQ ID NO: 81003 - DNA, 595 bp, Oryza sativa
  Clone ID: PAT_MRT4530_80573C.1
atgccgaacaacagcattttgtttggaactttcatgcagaaaaagctagaggagttgcgtaaaaaggccatgaaacatcgagctctagtgcaaggtactcaacaacaaaggtttgagatactttgtcaagataaggcaggcaggggtatctaccgcaagagagtgaagcaggacgagatttatgggttcggcatagctggggagttcacagagactaacgatgaagtactcaatattcctgacccatcgaagctccgaggcaaggctagaaggaggaggactcgtcgcatccgcaacgatatggatgagtcggatgctgggggctcagattgggacgttccgggcacggacgtgcggttgcgtgaggccggcctcctaccgatgtgtcggctggtggaggctgccgccggcgacgtggacccggccagacgatggactgtggaccggtccctcctagcagctttggtcgaccgatggaggccagagacgcacacttttcacttgccgtgcggtgaggtagcccctaccctacaggacatatcgtacttgttggggctaccgctcgcgggagacgctgttaggccagtgaccacgg

SEQ ID NO: 81004 - DNA, 4899 bp, Oryza sativa
  Clone ID: PAT_MRT4530_80574C.1
atgtcgaacaaacaaatattccaagtttaccatggaccaggaaacgtccattacgggccaactggggtagatctgtcagattttattgtatcagaaaggggaattgatagaccggctgagaggagtgtaccttctataaaaggatggttaatgaggggcttgagagttgatccacagacaagtgacataacaatcaatgttatagaactaatgccagttcaaaactctcaagtgtggagatggtatgtggaaaatgcaatgcaacgcgggtggcctctagctttggttccgtttgtgcacccgaaggatccaggtatgcagatgaacatggatgatggcaagggaccaagtgctgaagtaaatgagacttctgtggaggaggtcaacgcaggagaggacaggggcgtagtagctccagtgggcattcaaccaggtggagtggccgacaagggggagactgtcgcagccattgtggatgaaatggagagggaggattctgacaacgagcgtgtagaggaagaggatagtgtgagatgggagtacaaagaaaatgaggttattcagggagcgatttatagtagagcagaagatatgaaggaggcggcaaaacattttgcagtgtcacttcatagagagttttgggttgccaagtccaaccggtcgcaatatgaagttcggtgtgttaaggaaaaagatggttgtccatggagagtgcacgcgtataaggggaaatggaaggattattggacagtgtcagtcgttaccaagcatacatgttttctacctggtgttcagaaataccacaggaacattacatgtgcatttgttgcatctgagatgtatgcgcatgtcatcgataatctcacatatgaaccaaggtcaataatccgacacatcgaggagacatacaagtatactattagctatgccaaggcctggagggccaaacagaaaataatagagataagatttagaacttacgaagcctcgtatgacaatttgccacgcctgcttggtgttatcgaggaaagaaaccctgggagctcttacgaagtgaagaaattcccatcaattgaacatcctggcaagagtgtgctgcaaagggcgttcttagctctacatgcatgcaagatggcattcgtgaactgtcgtcctgttctctgcattgatgggacattcttgacaggaaagtatcggggccagatactgacagcaataggggtagatgggaacaatcaggtattgcccttggcatttgcttttgttgagagtgagaataccgacagctggtactggttcctaaaattggttaaaacaaaagttgttggtatgaggccaaatgtgtgcctgatacatgataggcacgctggcattctgcgagcgatagaagagttgcagtttgggagcatggaacaaggataccctggtgtttgggacgatgtacagagtaggtggtgcatgcgtcatatgggagctaatttcttcaagcaattcaagaacaaggagctcatgaacatgttcaagaggctgtgcaatcagaaccaggagaaaaaattcaatgagctttggaagagattagatgagttgacagccaaatgcagtgatcagcgtgcagcggctccatcgaccgccgttgctgaccctcctcaagctcttggacctctcccaacgtggattctgcatgaaccaaaagagaaatgggccaaggcgtatgacacaggtggtgctagatatggaataatgacaacaaatttggcagaagtttacaactgggtgatgcgcggtgtccgtggactgccactagttggcatagtggagttcattttacatgggacatgcaggtttgagatactctgtcaagataaggcaggcaggggtatctaccacaagagagtgaagcaggagtgtgttctgaaagccgacgacacatgtcattgctcttgttcaaagccgaagctgctccacaggccatgcacccatgtcattgctgccgcagcggagtgtagcataccagatgtagtatatgtgtcacagtacttcactagggagttcacagagactaacgatgaagtactcaatattcctgacccatcgaagctccgaggcaaggctggaaggaggaggactcgtcgcatccgcaacgatatggacgagtcggaggctggcagggtgaagcgttgcagcaaatgcgatgaacgtgggcacacctacaagcattgtcctaaagacaaggagaaaccaagtgcggcggaggcaggactatcaggatcagcagcagatggagctcgccctacggagatggcacgtcaggatacacctcagctgttggacccggtgatagatcaccgacaccggtctcaccttactgcggtgcagggggctcagcttgggacgttccgggcacggacgtgcggtgagctactcacggttgacgactcctttgtcgagaggctgcgtgaggccagcctcctaccgatgtgtcggctggtggaggctgccgccggccacgcggacccggccagacgatggactgtggacaggtccctcctagcagctttggtcgaccgatggagaccagagacgcacacttttcacttgccgtgcggtgaggtagcccctaccctacaggacgtatcgtacttgttggggctaccgctcgcgggagacgctgttgggccagtgaccacggctgtggattggcaggacgatctgacggcacgtttcgcactagtacagcgcgcaccgcacctcccgctcgagccgttggcacaccaccgcaacaccggacctacgaagaggtggctgcttcagttcaccgtcgatcagctacaggcggaggctgacgagtactcctacagccgctgtttgaaggcgtacttgctctggcttttcggctgggtgatgttctgtggcggtcacgggcacgcggtcgacaagggactcgtgcactacgccaggagcatcgccgacgccgcggtaggcgaggtgcctcagtggagctggggttccgcgttgttggcggctctgtaccgtggactttgtgaggcttgcacgacgacggatcccagcgcgacctttggtgggtgccctctctttctttctatctgggcagctgagaggattgcgatcggccgcccggaggtggaccagcacgcgtacgaggagtcactgtacaaggagcgaccagaggtcgactaccctacgatgggtactctgtggtgccgtcgtcagcgccgatgggctcacgtccaggttaggcggtcgtatcctgagtttgttatggagttcgaccgccttctgccgactgacgtcgtgtgggagccctacagtgccgcggctacccaggctcgtgcgccgttgggtctgtccacactctgcaccagggaccaggcgtactggatgactacggttccgatggtcttcgacatctgcgttgagcctcacgcccctttcggcgtgatgcggcagttcggcttccgtcagccctttccagtaccttttccgacgaccgtcccagctgctgttcagcggtactcgcgcaagggtcagcagtcagctggcgactggcccgccaagttggcgacttttgttgaggactggttgctcgcaaccgaggaggtcgtggaccacgagggagagccgcacactgaggaggcgtacaggcctactacgctggctcacgacatcaaccgggtcgtcgttgacggttcaacgacgatccaacgtttaggcgcggggattccggtacccgtagaggagcacttgacgacgtacacgcggatggtggagtcgatgcgctcaattctccgagtgctcacctgtcgtgcagacgacgttgctcgggcagacgcagctgtacagcggccacccgtaccgactggtccccgtccagctgcgcacgttcctaggccaactccccctccgcacggagggtttcgtgcaccgttcagcaccccgccttcctcggctaggccttctggtgtgccccccacaggtttcgcccagttcgctatgatgcaggacttctcccaggctacagggtcagcgtctcaggcagctgtgtcgacctcgcactcagcgcagttctgccagtacaccggtacttcgtcacaggcagccggcacgtcgagtcagggtccaccactggaccatgctgggacctcgtcggatcgcttgctgccttccaccgtgctcttcgacatcactgacttcgactccgcttcaggctcggcagaggacgtcatcggcccctcacagctgggaggcgcaccgccgacccgcactatggcttgcacatacatcgagtgggtcgatacagaaaatcccgttctcgacctaaccacttgtttacaagaaggtcgctggtatttcgcatccgaaagtaccgagcaatacttacagagaaaagcggtttatgaacgacaatatcgtgaacaacagagcgactggcgggtgctaactacggcactccctccatgggaagcccgtccaagatgcaggtgtggtgatcgttgtcaggttcttcgttctataaatcctacaacattgggtcgaaggttctttgtttgtccaaatattcttgacgacgatttcatggaaccaccaaggagatgtcaatacagagaatggatagacaccagaagggttctaactccacctagccgtgttgtgcagcttgaactaccagagcaatacaggaaaaatcttttgaccgtactttttacatctgggtcccttgccgccctctattggccgcaaaaagtacggccgcaagctctgagggggcgtccaaaattgcaattagccccttgccgccctctgtatgggcggcaagggtctaatcgcaattttggccgacggcggcagacggcgcggtcgacccaccgtctgccatgttag

SEQ ID NO: 81005 - DNA, 2415 bp, Oryza sativa
  Clone ID: PAT_MRT4530_80575C.1
atgtcgaacaaacaaatattccaagtttaccatggcccaggaaacgtctgttacgggccaactggggtagatctgtcagattttattgtatcagaaaggggaattgatagaccggctgagaggagtgtaccttctataaaaggatggttaatgaggggcttgagagttgatccacagacaagtgacataacaatcaatgttataatgaacatggatgatggcgagggaccaagtgctgaagtaaatgagacttctgtggaggaggtcaacgcacgagaggacgggggtgtagtagctccagtgggcattcaaccaggtgtagtggccgacgagggggagactgtcggtgccattgtggatgaaatggagagggaggattctgacaacgagcgtgtagaggaaggtgattcgtcagatgatgagacggatattaatccagcagaatgggctagtgaggatttttctgggttggtcgtctctgaagaggatagtgtgagatgggagtacaaagaaaatgagattattcaggaagcgatttatagtagagcagaagatatgaaggaggcgaaataccacaggaacattacatgtgcatttgttgcatctgagatgtatgcgcatgtcatcgataatctcacatatgaaccaaggtcaataatccgacacatcgaagagacatacaagtatactattagctatgccaaggcctggagagccaaacagaaaataatagagatgagatttggaacttacgaagcctcgtacgacaatttgccacgcctgcttggcgttatcgaggaaagaaaccctgggagctcttacgaagtgaagaaattcccctcaattgaacatcctggcaagagtgtgctgcaaagggcgttcttagctctacatgcatgcaagatggcattcgtgaactgtcgtcctgttctctgcattgatgggacattcttgacaggaaagtatcggggccagatactaacagcaataggggtagatgggaacaatcaggtattgcccttggcatttgcttttgttgagagtgagaataccgacagcaggtactggttcctgaaattggttaaaacaaaaattgttggtatgaggccaaatgtgtgccagatacatgataggcacgctggcattctgcgagcgatagaagagttgcagtttgggaatatggaacaaggataccctggtgagtgggaagatgtacagagcaggtattttagggatcggttccaggcagttcttccctctatgccgaacaacagcattttgtttggaactttcatgcagaaaaagctagaagagttgcgtaaaaaggccatgaaacatcgagctctagtgcaaggtacccaacagcacagactaaggcacctagtgtctctctttctttctatctgggcagctgagaggattgcgatcggccgccctgaggtggaccagcacgcgtacaaggagtcactgtacgcggagcgaccagaggtcgactaccctacgataggtactctgtggtgccgtcgtcagcgccgatgggctcacgtccaggttaggcggtcgtatcctgagtttgttatggagttcgaccgccttctgccgactgacgtcgtgtgggagccctacagtgccgcggctacccaggctcgtgcgccgttgggtctgtccacagtctgcaccagggaccaggcgtactggatgactacggttccgatggtcttcgacatctgcgttgagcctcatgcccctttccgcgtgatgcggcagttcggcttctgtcagccctttccatactcgcgcaagggtcagcagtcagctggcgactggcccgccaagttggcgacttttgttgaggactggttgctcacaaccgaggaggtcgtggaccacgagggagagccacacactgaggaggcgtaccaggcctacctacgctggtaccagccacgtacccgtactagggtcaccttcgctcccttggagcagcagccccacgttgcgagcactagagacctctacgccaggcaccgcgaccaggacttcgctcgtgctatgacgttgctcgggcagacgcagctgtacagcggccacccgtaccgactggtccccgtccagctatgcacgttcctaggccgactccccctccgcacggagggtttcgtgcaccgttcagcaccccgccttcctcggctaggccctctgttgtgccccccacagacagaggatgtcatcggcccctcacagctgagaggggcaccgccggtgcagacgcaggaccaggcgcaggccactccgccgccagacactcgtgctacccgtgctgtgccaccggatcgtttcacctactcccaggaccacgtgcgagcacaggcccggaggaccaagcgtggtcgcggcgcggggcagggccagtag

SEQ ID NO: 81006 - DNA, 3122 bp, Oryza sativa
  Clone ID: PAT_MRT4530_80576C.1
atggggagcgtggacggagatttcgaggggctccaggcagcggatcggcgtgcggaagtgattgaatggctcaatgcgttactcccggagtactgtttgccactggactcatcggatgacgagttgcgggagctgctcagtgatggcacggtcttgtgccatatcgtgaacgcactcattcctggtgttctcgaggagtcgtggggtgcttatgcatcgttagatcaagatgaaggccatgtggagaagttcatcgcagtggttgctgatatggggttgccaggcttcagtgttaaagatcttgaggagggttcaatgtctggggtagtggactgcctcttggttctgagggaaagtgtgagttctggattacgtgatggtacttccaaggctcctttgaggaaaaaatggcgagttccagaaacctgtgaacctcttgcccctggtgtgacacaagggaagacatcccctggaaaggacaagagaagttgccgcccaaaccataagtctcagcggaaaatgcccatttttgatgaaagtaccttctcacagaaggcaccaacccaatcccttcttagcgtcgctaatggcatcatggacgaaagcattgaaaggaaaaagggagaaaaaccacaacgtgtagtatacttacggaggaaagtagttcaagaaattgagcgaagtctttgtattcaagcagagcacataataagtcaaaatgtgatgattaagtcaagggaagataaataccattcaaaaatcaaagcacttgaaatattagtaaacgggacaaatgaagaaaacgaaattgctataaaccgccttcagataattaaggaagataagtcaaaagtagaagaggaaaggaaacttggtgaacaagttgtggctcggctatcgaaagaaaaagtaatttcttaaatcactatagcaggtcttaagaatgagatggaagtcaagactagcatgcatgagcaacaacttcagaaaatcgaactgaccgcaaagcaaatggaagaacatttaactaccaaaattaaggaggttgagtctcttttagtgcaatcaaacaagaaaattgaagaagttgaggctgcttccctgttaaaatcacagttgtggaataagaaggagggcatttttcagaaatacatgaatagtcaacaactatatgtcaagggtttaaggatatcatcatggtctataaaaaatgagatgcatgcccttgaaatggagttgagagatgagatgtccaattttggctctggtttaaagtgtttggttgatgctgctgaaaactaccacaaagttcttgctgaaaatcaaaagttgttcaatgaagtgcaagaactaaaaggtaatataagggtgtattgtcgtgtaagaccatttcttcctggtcaagataaaaaatcaaccactgttgattacattggtgaaaatggtgagcttttgatctcaaatccatttaaacaaggaaaggatggacatcggatgttcaagtttaacaaggtttttagtccattttcttctcaagctgaggttttctcggacattcaaccgctgattcgatcagttcttgatggattcaatgtttgtatttttgcttatggtcaaactggttcaggaaaaacttacacaatgagtggacccagcacatcaaaacaagattggggtgtcaattacagggctttaaatgatttatttgatatctcactaagtaggagaaatgctttctcttatgaggtgggagttcagatggttgagatatacaatgaacaagcaaatagagctgttggttcaacagctcttaatgaaaggagcagtcggtctcatagtattctgactgtacatgttcgagggttggatgtgaagaatggatccacttctagaggatgcctacatcttattgatcttgcagggagtgaaagggttgagcggtctgaagcaactggagatagattgaaagaggctcaacacattaataaatcactgtctgctttgggtgatgtgatttttgctttggcgcaaaagaatgctcatgtgccatacaggaacagcaagctaacacaagttcttcaaagctctttaggtggacaagcaaagacactaatgtttgttcaaataaatcctgatgttgagtcatattcagagactataagcactctaaagtttgctgaaagggtttctggagttgagttaggtgctgcaagaagtaataaagagggaaaggatataaaagagctgctggaacaggttgcatctttgaaagacactattgtacgaaaagatacggaaattgagcagctccaactcatgaaagacaaagtcaaatcgccaagttttgcagtcgatataaatggtgctagcatgccaaaaaattctaactctgacctaagatcagtattgtcaatcacaacaaaccaacagagccaactatcagatcctcagagttatgctgaggtgaacagagatggtggacctacttcatacactgacattacaccaacatgcttggatgaagcagattttgaggacaatgcatcagaagatggtttctctggaggaaccgactattctgttggctgtgctgccggtgccagcgttttcccaaattcctgctcagatagaaccgcagatacctccatgtactctcatctccctatatcacttacaccaaactaaattaggagaatttcatcacgaatagctcgattcagtctcacaaagaatggacaaccagcaacatccagaccaaaaccaaaggatactgctccgaagactccaaatcaaacgagagttcaatcgagccaattgataggaggctcttcactgagggcatctaaaaggtggcagaagtagagcacgctccggttgctcagttgtattttgtatgtccagaatgtgaaaataggcgaagtagctgtaggagacaatgtacttgtaagttgtaactctacagatgtgagagcattctgctgacgaaggacgagcagctgatgactcatcctttgctcatacagatcaaatatccaggaaaggattcccttttctgttctccatgtttcccctgtacttcaatttttgtcatggttactgcatctctggaatccaacgtttcc

SEQ ID NO: 81007 - DNA, 879 bp, Oryza sativa
  Clone ID: PAT_MRT4530_80577C.1
cggaattcccgggtcgacccacgcgtccggtgagcttttgatctcaaatccatttaaacaaggaaaggatggacatcggatgttcaagtttaacaaggtttttagtccattttcttctcaagctgaggttttctcggacattcaaccgctgattcgatcagttcttgatggattcaatgtttgtatttttgcttatggtcaaactggttcaggaaaaacttacacaatgagtggacccagcacatcaaaacaagattggggtgtcaattacagggctttaaatgatttatttgatatctcactaagtaggagaaatgctttctcttatgaggtgggagttcagatggttgagatatacaatgaacaagtgcgggatcttctgtcaaatgatattgcacagaaacgacttggcatatggagcacctctcaacctaatggacttgtcgtcccagatgcgagcttacacccagttaaatcaacatcagatgttttagacttgatggaaattggacaggcaaatagagctgttggttcaacagctcttaatgaaaggagcagtcggtctcatagtattctgactgtacatgttcgagggttggatgtgaagaatggatccacttctagaggatgcctacatcttattgatcttgcagggagtgaaagggttgagcggtctgaagcaactggagatagattgaaagaggctcaacacattaataaatcactgtctgctttgggtgatgtgatttttgctttggcgcaaaagaatgctcatgtgccatacaggaacagcaagctaacacaagttcttcaaagctctttaggtggacaagcaaagacactaatggttgttcaaataaatcctgatgttgagtcata

SEQ ID NO: 81008 - DNA, 236 bp, Oryza sativa
  Clone ID: PAT_MRT4530_80578C.1
atggtgaactgcttggaagaccaaagggtgaagctgctgaaaaagcaaacggttcctgtacttaaaccaacagtcgggctcggtgtaccaaaaagtggtgttgtaggtgatgcatttggtatcgtaggcgtagctgaggtaaatgagaatacagggctcgaggttgagctaaaaggtgaagtggcaggggagccaaggggatcctctagagtcgacctgcaggcatgcaagcttga

SEQ ID NO: 81009 - DNA, 4110 bp, Oryza sativa
  Clone ID: PAT_MRT4530_80579C.1
atgtcgaacaaacaaatattccaagtttaccatggaccaggaaacgtccgttacgggccaactggggtagatctgttagattttattgtaacagaaaggggaattgagagaccggctgagaggagtgtaccttctataaaaggatggttaatgaggggcttgagagttgatccacagacaattcaaaactctcgagtgtggagatggtatttggaaaatgcattgcaacgcgggtggcctctagctttggttccgtttgttcacccgaaggatccaggtgtgcagatgaacatggatgatggcgagggaccaagtgctgaagtaaacgagacttctgtggaggaggtcaacgcacgagaggacggggacgtagtagctccagtgggcattcaaccaggtggagtggccgacgagggggagactgtcggtgccattgtggatgaaatggagagggaggattctgacaacgagcgtgtagaggaaggtgattcgtcagatgatgagacggatattaatccagcagaatgggctagtgaggatttttctggactgatcgtctctgaagaggatagtgtgagatgggagtacaaagaaaataaggttattcagggagcgatttatagtagagcagaagatatgaaggaggcggaaagaaaccctgggagctcttacgaagtgaagaaattcccctcaattgaacatcctggcaagagtgtgctgcaaagggcgttcttagctctacatgcatgcaagatggcattcgtgaactgtcgtcctgttctctgcattgatgggacattcttgacaggaaagtatcggggccagatactaacagcaataggggtagatgggaacaatcaggtattgcccttggcatttgcttttgttgagagtgagaataccgacagctggtactggttcctgaaattggttaaaacaaaagttgttggtatgaggccaaatgtatgcctgatacatgataggcacgctggcattttgcgagcgataggagagttgcagtttgggagtatggaacgaggataccccggtgtttgggaagatgtacagagtaggtggtgcatgcgtcatatgggagctaatttcttcaagcaattcaagaacaaggagctcatgaacatgttcaagaggctgtgcaatcagaaccaggagaaaaaattcaatgagctttggaagagattagatgagttgacagccaaatgcagtgatcagcgtgcagcggctccatcaaccgccgttgctgaccctcctcaagctcttggacctctcccaacggatagtccaacattggttagaagaactggattggagattcggaaattttctcagtggattctgcatgaaccaaaagagaaatgggccaaggcgtatgacacaggtggtgctagatatggaataatgacaacaaatttggcagaagtttacaactgggtgatgcgcggtgtccgtggactgccactagttggcatagtggagttcattttacatgggacatgcagcattttgtttggagctttcatgcagaaaaagctagaggagttgcgtaaaaaggccatgaaacatcgagctctagtgcaaggtacccaacagcacaggtttgagatactatgtcaagataaggcaggcaggggtatctaccgcaagagagtgaagcaggagtgtgttctcaaagacgacggcacatgtcattgctcttgtgcaaagccgaagctgctccacaggccatgcacccatgtcattgctgccgcagcggagtgtggcataccagatacagtatatgtgtcacagtacttcagtaagcaagcaatatatcatacatggagcggcgagatttatgggttcggcatagctggggagttcacagagactaacgatgaagtactcaatattcctgacccatcgaagctccgaggcaaggttggaaggaggaggactcgtcgcatccgcaacgatatggacgagtcggaggctggcagggtgaagcgttgcagcaaatgcgatgaacatgggcacacctacaagcattgtcctaaagacaaggagaaaccaagtgcggcggaggcaggattatcaggatcagcagcagatggagctcgccctacggagatggcacgtcaggatacacctcagttgttggacccggcgatagatcaccgacaccggtcttaccttactgcggtgcagggggctcagcttgggacgttccgggcacggacgtgcggtgagctactcacggttcacgactcctttgtcgagaggctacgtgaggccggcctcctaccgatgtgtcggctggtggaggctgcggcctgcgacgcggacccggccagacgatggactgtggacaggtccctcgtagcagctttggtcgatcgatggaggccagagacgcacactttttacttgccgtgcggtgaggttgagcagctacaggcggaggccgatgagtactcgtacagccgatgtttggaggcgtacttgctctggctttttggctgggtgatgttctgtggcggtcacgggcacgcggtcgacaagggactcgtgcactacgccacgagcatcgccgacgccgcggtaggcgaggtgcctcagtggagctggggttccgcgttgttggctgctctgtacagtgcactttgtgagtcttgcacgaagacggatcccagcgcgacctttggtgggtgccctctctttctttctatctgggcagctgagaggattgcgatcggccgccctgaggtggaccagcacgcgtacgaggagtcactgtacgaggagcgaccagaggtcgactaccctacgatgggtactctgtggttccgtcgtcagcgccgatgggctcacgtccaggttaggcggtcgtatcctgagtttgttatggagttcgaccgccttctgacgactgacgtcgtgtgggagccctacagtgccgcggctacccaggctcgtgcgccgttgggtctgtccacactctgcaccagggaccaggcgtactggatgactacggttccgatggtcttcgacatctgcgttgagcctcacgcccctttccgcgtgatgcggcagttcggcttccgtcagccctttccagtaccgtttccgaccaccgtcccagctgctgttcaccggtactcgcgcgagggtcagcagtcagctggcgactggcccgccaagttggcgacttttgttgaggactggttgctcgcaaccgaggaggtcgtggaccacgagggagagccacacactgaggagtcgtaccaggcctacctacgctggtaccagccacgcacccgtactagggtcaccttcgctcccttggagcagcagccccacgttgcgagcactagagacctctacgccaggcaccgcgaccaggacttcgctcgtgttgtcgacgacatcaaccgggtcgtcgttggcggttcaacgactatccaacgtttagacgcggggattccggtacccgtagaggagcacctgacgacgtacacgctgatggtggagtcgatgcgctcgattctccgagtgctcacctgtcgtgcagacgacgttgctcgggcagacgcagctgtacagcggccacccgtaccgactggtccccgtccagctgcgcacgttcctaggccgactccccctccgcacggagggtttcgtgcaccgttcagcaccccgccttcctcggctaggccttctgttgtgccccccacaggtttcgcccagttcgctatgacgcaggccgcccacttctcccaggctgcagggtcagcgtcacaggcagccggcacgtcgagtcagggtccaccactggaccatgctgggacctcgtcggaccccttcctgtcttccaccgtgctctttgacatcactgacttcgacttcgcttcaggctcgacagaggacgtcatcggcccctcacagctgggaggcgcaccgccggtgcagacgcaggaccaggcgcaggccactcctccgcgggacactcgtgctacccgtgctgtgccaccggatcgtttcacctactcccaggaccacgtgcgagcacaggcccggaggaccaagcgtggtcgcggcgcggggcagggccagtag

SEQ ID NO: 81010 - DNA, 1501 bp, Oryza sativa
  Clone ID: PAT_MRT4530_8057C.1
tatgcaaaagataagtttacgattccctcttttcatggtgcttaattataatgctgcagcttgtcttgattgggaaatgactgtagatcaaaaaaatttagtgcacatttagttcctgatgaacatagggttaggcaagctactagtgaatttgaagattttgcaatattatgatggactcaaataagtactgatggcctaacaccaacaacatgggaagcgttaaagacatctatgtgaactaaatttgtgcctccttttagacatgatcttttaaataaattgcaatgcttaaaccagagggataaatccatagaagaatattatcaggagttgcaaaaaggttgtttgccttcttatataatggaggatgaagaggctgctattgtatgtttctatggggggctgaactgcgagattcaagatattgttatgtataagtgatatgatattgtgtgaagattgttaaaacttgaatgctggtaaaacaacaattgcaaggatggcaacaatcaacaaagtaccgttttcgaaattctactttaacaaggacggtacctcctcctacgcgctctagtatgccttccaccatccaagctacactgacaactgtctccattccaccacgagctaccgaggtgagtaagtatactaaaaagttcctcattagtggcttctacggggtgaacaaccaggatcatatatcaccactgcaagggcatgggacatatcatgaaggattgaccaagtcagcgtgcgtacatcgccacgaatgatggtggttatgtgagttctagtgatgttaaggaagaacattctcttgctactaaccttgcaggtgaaactaatgttcctgagacagaaattgatgatggagagattttaggagtagccgataccgcaaactacaagaccatacttgtgtagtgagttctaagcattcaagtagagcacacggaggaacttcaacgccataatctcttccaaacattcctcgtcatcaaggattgtcgggtacatatggtaattgatagcggaagttgtaacaacttggtgagtaccgatttgatcaagaaacttaatttgctcactcgtcaccattcacagccacgtcacatttgatggttaaacaacaatggtaaggacaaggtaacacaaactatacgaatgcatgtagtacctatgaatgcatgttcactattgttaggtcgttcttggaatttaatattaatgcaacacatcatggtagaagtaaaatatagtataattttatgcatagggataagaaacttacttcgcttccaatgacatatgctgaaattgttgagtgtgataatgaaatatcccaaaatgagaagggaactcctatttctaacatcgagcacctcatatgtcttttgatggagaaaagaaacacagaagatcactgcgatctatggaaaagacgaaagagattatgtttggtgctcaccgatgctagtttttatgcaaaagctgcatt

SEQ ID NO: 81011 - DNA, 495 bp, Oryza sativa
  Clone ID: PAT_MRT4530_80580C.1
cttccaaaattggaaacgtttgattccagagatgcagtaaccatgacaaaaattgaagtacaggggaaacatggagaacagaaaagggaatcctttcctggatatttgatctgtatgagcaaaggatgagtcatcagctgctcgtccttcgtcagcagaatgctctcacatctgtagagttacaacttacaagtacattgtctcctacagctacttcgcctattttcacattctggacatacaaaatacaactgagcaaccggagcgtgctctacttctgccaccttttaaatgccctcagtgaagagcctcctatcaattggctcgattgaactctcgtttgatttggagtcttcggagcagtatcctttggttttggtctggatgttgctggttgtccattctttgtgagactgaatcgagctattcgggatgaaattctcctaatggaggtatctgcggttctatctgagcaggaatttgggaaaacgctgg

SEQ ID NO: 81012 - DNA, 3012 bp, Oryza sativa
  Clone ID: PAT_MRT4530_80581C.1
atggggcgaggcaaataccacaggaacattacatgtgcatttgttgcatctgagatgtatgcgcatgtcatcgataatctcagatatgaaccaaggtcaataatccgacacattgaagagatatacaagtatactattagctatgccaaggcctggagggccaaacagaaaataatagagatgagatttggaacttacgaagcctcgtatgacaatttgccacgcctgcttggtgttatcgaggaaagaaaccctgggagctcttacgaagtgaagaaatccccctcaattgaacatcctggcaagagtgtgctgcaaagggcgttcttagctctacatgcatgcaagatggcattcgtgaactgtcgtcctgttctctgcattgatgggacattcttgacaggaaagtatcggggccagatactaacagcaataggggtagatgggaacaatcaggtattgcccttggcatttgcttttgttgagagtgagaataccgacagctggtactggttcctgaaattggttaaaacaaaagttgttggtatgaggccaaatgtatgcctgatacatgataggcacgctggcattctgcgagcgataggagagttgcagtttggtagtatggaacgaggataccccggtgtttgggaagatgtacagagtaggtggtgcatgcgtcatatgggagctaatttcttcaagcaattcaagaacaaggagctcatgaacatgttcaagaggctgtgcaatcagaaccaggagaaaaaattcaatgagctttggaagagattagatgagttgacagccaaatgcagtgatcagcgtgcagcggctccatcgaccgccgttgctgaccctcctcaagctcttggacctctcccaacggatagtccaacattggttagaagaactggattggagattcggaaattttctcagtggattttgcatgaaccaatagagaaatgggccaaggcgtatgacacaggtggtgctagatatggaataatgacaacaaatttggcagaagtttacaactgggtgatgcgcgctgtccgtggactgccactagttggcatagtggagttcattttacatgggacatgcaggtattttagggatcggttccaggcagttcttccctctatgccgaacaacagcattttgtttggagctttcatgcagaaaaagctagaggagttgcgtaaaaaggccatgaaacatcgagctctagtgcaaggtacccaacaacacaggtttgagatactatgtcaagataaggcaggcaggggtatctaccgcaagagagtgaagcaagagtgtgttctcaaagacgacggcacatgtcattgctcttgtgcaaagccgaagctgctccacaggccatgcacccatgtcattgctgccgcagcggagtgtggcataccagatacagtatatgtgtcacagtacttcagtaagcaagcaatatatcatacatggagcggcgagatttatgggttcggcatagctggggagttcacagagactaacgatgaagtactcaatattcctgacccatcgaagctccgaggcaaggctggaaggaggaggactcgtcgcatccgcaacgatatggacgagtcggaggctggcagggtgaagcgttgcagcaaatgcgatgaacatgggcacacctacaagcattgtcctaaagacaaggagaaaccaagtgcggcggaggcaggactatcaggatcagcagcagatggagctcgccctacgggtgaaggcactacctccactcgaccacgtcctaggcgtcgtcgtgccacgtctggctacgtgggggctcagcttgggacgttccgggcacggacgtgcggtgagctactcacggttcacgactcctttgtcgagaggctacgtgaggccggcctcctaccgatgtgtcggctggtggaggctgcggccggcaacgcggacccggccagacgatggactgtggacaggtccctcgtagcagctttggtcgatcgatggaggccagagacgcacacttttcacttgccgtgcggtgaagtagcccctaccctacaggacgtatcgtacttgttggcgacttttgttgaggactggttgctcgcaaccgaggaggtcgtggaccacgagggagagccacacactgaggagtcgtaccaggcctacctacgctggtaccagccacgcacccgtactagggtcaccttcgctcccttggagcagcagccccacgttgcgagcactagagacctctacgacaggcaccgcgaccaggacttcgctcgtgttgtcgacgacatcaaccgggtcgtcgttgacggttcaacgacgatccaacgtttagacgcggggattccggtacccgtagaggagcacccgacgacgtacacgcggatggtggagtcgatgcgctcgattctccgagtgctcacctgtcgtgcagacgacgttgctcgggcagacgcagctgtacagcggccacccgtaccgactggtccccgtccagctgcgcacgttcctaggccgactccccctccgcacggagggtttcgtgcaccgttcagcaccccgccttcctcggctaggccttttgttgtgccccccacaggtttcgcccagttcgctatgacgcaggccgcccacttctcccaggctgcagggtcagcgtcacaggcagccggcacgtcgagtcagggtccaccactggaccatgctgggacctcgtcggaccccttcctgtcttccaccgtgctcttcgacatcactgacttcgacttcgcttcaggctcgacagaggacgtcatcggcccctcacagctgggaggcgcaccgccggtgcagacgcaggaccaggcgcaggccactcctccgcgggacactcgtgctacccgtgctgtgccaccggatcgtttcacctactcccaggaccacgtgcgagcacaggcccggaggaccaagcgtggtcgcggcgcggggcagggccagtag

SEQ ID NO: 81013 - DNA, 775 bp, Oryza sativa
  unsure (1)..(775): unsure at all n locations
  Clone ID: PAT_MRT4530_80582C.1
cggacgggncctncnatgtnaaatcancatttaaccaaaatnaagagttgactcctttnaagagatcagatcaaattnaagagaagctatagtggcagtggaagtggaggccaaggcggccatatataantggcctgaccggccgggcctggtgcacgtaagggaatggactaagttgaaggatgtatcaggaagagggctggagctcatcatcatcttcgtcgtcgtcgctccgccgggtgttgagcaccggaggaggcctggtggaggaggagcggcgggagcgcattgacaagtaccggagcaagcgcaatcaacgcaatttcgacaagaagatcacctacgcttgccggaagacgctcgcggacagccggccgagggtgaagggccgcttcgcccgtaactcctccgacgacgctgctgctgctgctgcagctcaagtcgaggtgtcgccggcgacgaataataatgtgccggagtggtggccggcagtgcaggaggcgctggccaggcaggagcaggaggcggctggcctccatctctgcgacaccgccgacgatgacctgctagccgcctacctcggcgtctcctccatcgatctctactcaccccgcggccactgatcgatccattcaatcatcactgctactctgctacctactcctacctctttaaacggttcaatttactctgctatctactccatagatattttacccctgactcgcaaaacggtcaatttacaccctcaggcaatatagagggggtttaagtc

SEQ ID NO: 81014 - DNA, 2178 bp, Oryza sativa
  Clone ID: PAT_MRT4530_80583C.1
atgtcgaacaaacaaatattccaaatttaccatggcccaggaaacgtccgttacgggccaactggggtagatctgtcagattttattgtatcagaaaggggaattgatagaccggctgagaggagtgtaccttctataaaaggatggttaatgaggggcttgagagttgatccacagacaagtgacataacaatcaatgttatagatccaggtgtgcagatgaacatggatgatggcgagggaccaagtgctgaagtaaatgagacttctgtggaggaggtcaacgcacgagaggacgagggcgtagtagctccagtgggcattcaaccaggtggagtggccgacgagggggagactgtcggtgccattgtggatgaaatggagagggaggattctgacaacgagcgtgtaaaggaaggtgattcgtcagatgatgagacggatattaatccagcagaatgggctactgaggatttttctgggctggtcgtctctgaagaggatagtgtgagatgggagtacaaagaaaatgaggttattcagggagcgatttatagtagagcagaagatatgaaggaggcggtaaaacattttgcagtgtcacttcatagagagttttgggttgccaagtccaaccggtcgcaatatgaagttcggtcaataatccgacacatcgaagagacatacaagtatactattagctatgccaaggcctggagggccaaacagaaaataatagagatgagatttggaacttacgaagcctcgtatgacaatttgccatgcctgcttggtgttatcgaggaaagaaaccctgggagctcttacgcagtgaagaaattcccctcaattgaacatcctggcaagagtgtgctgcaaagggcgttcttagctctacatgcatgcaagatgacattcgtgaactgtcgtcctgttctctgcattgatgggacattcttgacaagaaagtatcggggccagatactaacagcaataggggtagatgggaacaatcaggttttgcccttggcatttgcttttgttgagagtgagaataccgacagctggtactggttcctgaaattggttaaaacaaaagttgttagtatgaggccaaatgtgtgcctgatacatgataggcacgctggcattctgcgagcgatagaagagttgcagtttgggagtatggaacgaggataccctggtgagtgggaagatcgccgatgggctcacgtccaggttaggcagtcgtatcctgagtttgttatggagttcgaccgccttctgccgactgacgtcgtgtgggagccctacagtgtcgcggctacccaggctcgtgcgccgttgggtctgtccacactctgtaccagggaccaggcgtactggatgactacggttccgatggtcttcgacatctgcgttgagcctcacgcccctttccgcgtgatgcggcagttcggcttccgtcagccctttccagtaccgtttccgacgaccgtcctagctgctattcactgcggcgactccactccacaggcaatccttgacggcagcgacaaaaccaacctctctgcgacggctccaactgagaagaacttcaactctggtgtgagggaaaagagagcaagactgactacccactgtactcagcaagtcataccggaagaggagctggacaaccggacaccccggccgacccaactccatcacgcccaccctcgccaccggtgcctaggaaagggtcgagctatacttccgatcaagcagttacccactcccgcttgtggtaagcacgcaagaaaagggggggaacttcagggtgtgacaaagggtcagcagtcagctggcgactggcccgccaagttggcgacttttgttgaggactggttgctcgcaaccgaggaggtcgtggaccacgagggagagccacacactgaggaggcgtaccaggcctacctacgctgggaccagccacgcacccgtactagggtcactttcgctcccttggagcagcagccccacgttgaaccaccaaggagatgtcaatacagagaatggatagacaccagaagggttctaactccacctagccgtgttgtgcagcttgaactaccagagcaatacagggttactaaagcgcggtttgagagaggagagggatcctcacgtagcggttag

SEQ ID NO: 81015 - DNA, 492 bp, Oryza sativa
  Clone ID: PAT_MRT4530_80584C.1
atggtcatggcgacggtgcttcgcaagctcttctctgactccctccgttgcccgccaactgctgtcgtgttcgcccatcgccgccctcgcccaccattgttccatccgtcgcccgcctaccgatgctgcgctcacccgccgccggcgtcccaggcccgctactgcgctctcccgccgtccgctccccccgcagcccaccgccatgcttgcccaccgccgctccacccactgcccgccgacggtaccgtgctcgtctgccgccggcctcccaggcccgccggtgctcccgttggattggatgcggggaggagggaccgaaatgcaaatatgttaccactctggtccgccatcaagcctgctacggcaactgcgccgcgtgcgtgcggcactgttggtgccggctgcgccacagccgcgaaccagcagctgaacatggccactagatcccctggcttcgcctctgctgcattgggtacgaagagaacatcctga

SEQ ID NO: 81016 - DNA, 1778 bp, Oryza sativa
  Clone ID: PAT_MRT4530_80585C.1
ctatggttcgtcctcgtcggcgaggcgtcgccgtcgcatgcatgcgtgcgttcgtgcctccacgcggtagctataggaggtggagtaggccggtttgatgcggtagagcgctggagaaagataaaaaggattttcgcagatggccaaaattgctctgtgcaggtggacacaagcgtcgtctacaagtagagatttacgaaaatcatcgattttcacacgaggttttcgcaggtagacggtcggtccgtctcgctttctcgcttgctctgttttgatcggcatttcatcgaacaccttcgggagtttgccaacaactggtatcagagcctcgttggctcgctggtgccatggcggagcgttcactgccacatcattctcgcacacctccgcacgtttcgacgccaccaggctcgcgctctcctctttctcgcccattgtgtaccccgccacgccgttgtcctgctaagtccccgccgcgccgtgggcgcgggcgtggcgagcgacagcccttggctgctcagccgcgggtcgtcagggagtcgagcgttgccgttcactactcggttctgacgaggaccaactacgaggaaagggcgctcctcatgaccgtgaatttgcatgctcaggggctctggcatgccatggaaccgtacgaagacgaggagaccgagtaccgcgatgatcggctggtgctggccgtgatcctgcgtgcgctacttcgccaggagtttgccgatgcacggttcaaggatgacgagaacattgacgacttctccatgcgcctcaccggaatcacaaacagcattcgcactctcggaggcgatctccccgaggtagatgttgtcaacaagctgctaaacgttgtccctaagcatctctcacagatagccatctcgatcgagacgctcctcgacatcagcgacctgtccatagaggaggtcaccggccgactccgcgccgccgagaaacgcaaggccaagccaaaggagatcgtcgacagcggcggccatctcatgctcacagaggagcagtggctggcacggctcaagcaccgcgagcagagtggtgagagcagcggcactgcacccggcgcggccacgaacaacggcggcaagaaacgcgggaatcggcgcggttgcgccaaggattaccgctcaaaggccaagaaggctgaggcccacattgtagcggaggacgacgacgagccgacgctgctcatggcgcgcacgtgtctggttgagcggcgacgctcgccagccgaacccgcaccggaaatcacaacggtgttcctggaggaggcaaaggtgctggcgcatctcgatgacgaccctgatcccactaatctcgatgacgaccctgatcccgctgatttgtggtacctttacaccggcgccacgaaccacatgaccggagtccgctccgtcttctccgagctcgacacggcggtgaccggcttcgtcaagttcggtgacggctctgtcgtcacgatcgcaggctgcagcacgatcctcttcacctacaagaacggcgaacatcgcaggctgactggggtctacttcatcccacgcctcaccgccaacctcatcagcgtcggccagctcaacaagaacgactgcgagtccctagtgcacgacggcttcatgcgcatccgcgaccaggatcggcggttgctggcgaggatcccacgctcaaggaatcggcatcgtgccatcacacgaccgaggtgtgcgccatgcgttcctactaacccggcgccccagccatgtctcctgaggtga

SEQ ID NO: 81017 - DNA, 1044 bp, Oryza sativa
  Clone ID: PAT_MRT4530_80586C.1
atgtccaacaaacatatatttcaagtttaccatggcccaggaaacattcgttacgggccgacaggggtagatctgtcagaatttattgtaacaccaaggggaattgaaagaccgactgagaggagtgtaccttctataaaaggatggttgatgaagggcttgagagttgatccacagacaagtgacataacaatcaatgttatagtaagtcgggcaactgagggtttttattgggaactaatgccagttcaaaactctcgaatgtggagatggtatgtggagaatgcattgcaacacgggtggcctctatctatagttccgtttgttcacccgaaggatccaagtgtgcagatgaacatggatgatggcgatggaccaagtgctgaggtgaatgagacttccgtggaagaggactggttgctcgtgaccgaggaagtcgtggaccacgcgcgagagccacacaccgaggaggcgtaccaagcctacctacgctggtaccagccacgcacccgtactagggtcaccttcgctcccgtggagcaacaggcccaagctgcgagcactagagacctctacactaggcaccgcgaccaggacttcgctcgtgctgtcgtagactgcaacagggtcatcgttgacgcttcaacgacgatccaacgtttagacgcggggattgagcgtggtcaattctccgagtgctcacctgtcgtgctgtcgacgttgctcaggcagacgcagcaccacagcggccaccccgaccgattggtcctcgtccagctgcgcacgttcataggccgactccccctccccacagagttctggcgggacgccgggacttcgtcacaggcagccggcacgtcgagtcggggtccaccactggaccatgccaagacctcgttggagtacggggtggcttccgccttgctctttggcatcggtgacttcgacttccaggtctcgacaaaggacgtcatcggcccctcacagctgggaggcgcactgccgttgcagacgcaagaccagtcgccctccactccattttaa

SEQ ID NO: 81018 - DNA, 3564 bp, Oryza sativa
  Clone ID: PAT_MRT4530_80587C.1
atgaggggcttgagagttgatccacagacaagtgacataacaatcaatgttatagtaagtcgggcaactgagggtttttattgggaactaatgccagttcaaaactctcgagtgtggagatggtatttggaaaatgcattgcaacgcgggtggcctctagctttggttccgtttgttcacccgaaggatccaggtgtgcagatgaacatggatgatggcgagggaccaagtgctgaagtaaatgagacttctgtggaggaggtcaacgcacgagaggacgggggcgtagtagctccagtgggcattcaaccaggtgaagtggccgacgagggggagactgtcggtgccattgtggatgaaatggagagggaggattctgacaacgagcgtgtagaggaaggtgattcgtcagatgatgagacggatattaatccagcagaatgggctagtgaggatttttctgggctgatcgtctctgaagaggatagtgtgagatgggagcacaaagaaaatgaggttattcagggagcgatttatagtagagaagaagatatgaaggaagcagtaaaacattttgcagtgtcacttcatagagagttttgggttgccaagtcgaaccggtcgcaatatgaagttcggtgtgttaagaaaaaagatggttgtccctggagagtgcacgcatataaggggaaatggaaggattattggacagtgtcagtcgttaccaagcatacatgttttctacctggtgttcagaaataccacaggaacattacatgtgcatttgttgcatctgagatgtatgcgcatgtcatcgataatctcacatatgaaccaaggtcaataatccgacacatcgaagagacatacaagtatactattagctatgccaaggcctggagggccaaacagaaaataatagagatgagatttggaacttacgaagcctcgtatgacaatttgccacgcctgcttggtgttatcgaggaaagaaaccctgagagctcttacgaagtgaagaaattcccctcaattgaacatcctggcaagagtgtgctgcaaagggcgttcttagctctacatgcatgcaagatagcattcgtgaactgtcgtcctgttctctgcattgatgggacattcttgacaggaaagtatcggggccagatactaacagcaataggggtagatgggaacaatcaggtattgcccttggcatttgcttttgttgagagtgagaataccgacagctggtactggttcctgaaattggttaaaacaaaagttgttggtatgaggccaaatagtaggtggggcatgcgtcatatgggggctgatttcttcaagcaattcaagaacaaggagctcatgaacatgttcaagaggctgtgcaatcataaccaggagaaaaaattcaatgagctttggaagagattagatgagttgacagccaaatgcagtgatcagcgtgcagcagctccatcgaccgccgttgctgaccctcctcaagctcttggacctctcccaacggatagtccaacattggttagaagaactggattggagattcggaaattttctcagtggattctgcatgaaccaaaagagaaatgggccaaggcgtatgacacaggtggtgctagatatggaataatgacaacaaatttggcagaagtttacaactgggtgatgcgcggtgtccgtggactgccactagttggcatagtggagttcattttacatgggacatgcaggtattttagggatcggttccaggcagttcttccctctatgccgaataacagcattttgtttggagctttcatgcagaaaaagctagaggagttgcataaaaaggccatgaaacatcgagctctagtgcaaggtacccaacagcacaggtttgagatactatgtcaagataaggcaggcatgagtatctaccgcaagagagtgaagcaggagtgtgttctcaaagccgacggcacatgtcattgctcttgtgcaaagccgaagctgctccacaggccatgcacccatgtcattgctgccgcagcggagtgtggcataccagatgcaatatatgtgtcatacggcgagatttatgggttcggcatagctggggagttcacagagactaacgatgaagtactcaatattcctgacccatcgaagctccgaggcaaggctggaaggaggaggactcgtcgcatccgcaacgatatggacgagtcggaggctggcagggtgaagcgttgcagcaaatgcgatgaacatgggcacacctacaagcattgtcctaaagacaaggagaaaccaagtgcggcggaggcaggactatcaggatcaacagcagatggagctcgccctacggagatggcacgtcagtatacacctcagttgttggacccggcgatagatcaccgacaccggtctcaccttactgcggtgcagggggctcagcttgggacgttccgggcacggacgtgcggctgcgtgaggccggcctcctaccgatgtgtcggctggtggaggctgccgccggcgacgcggacccggccagacaatagactgtggacagtaacgttggcgacttttgttgaggactggttcctcgcaaccgaggaggtcgtggaccacgagggagagccacacactgaggaggcgtaccaggcctacctacgctggtaccagccacgcacccgtactagggtcaccttcgctcccttggagcagcagccccacgttgcgagcactagagacctctacgccaggcaccacgaccaggacttcgctcgtgctgtcgacgacatcaaccgggtcgtcgttgatggttcaacgacgatccaacatttaggcgcggggattccggtacccgtagaggagcacctgacgacgtacacgcggatggtggagtcgatgcgctcgattctccgagtgctcacctgtcgtgcagacgacgttgctcgggcagacgcagctgtacagcggccacccgtactgactggtccccgtccagctgcgcacgttcctaggccgactccccctccgcacggagggtttcgtgcaccgttcagcaccccgccttcctcggctaggccttctgttgtgccccccacaggtttcgcccagttcgctatgacgcaggccgcccacttctcccaggctgcaaggtcagcgtctcaggcagctgcgtcgacctcgcacttagcgcagttctggcagtacaccgggacttcatcacaggcagccggcacgtcgagtcagggtccaccactggaccatgctgggacctcgtcggaccgcttgctgccttccaccttgctcttcgacatcactgactttgacttcgacttcgcttcaggctcgacagaggatgtcatcggcccctcacagctgggaggcgcaccgccggtgcagacgcaggaccaggcgcaggccactcctccgcgggacactcgtgctacccgtgctgtgccaccggatcgtttcacctactcccaggactacgtgcgagcacaggcccggaggaccaagcgtggtcgcggcgcggggcagggccagtag

SEQ ID NO: 81019 - DNA, 221 bp, Oryza sativa
  Clone ID: PAT_MRT4530_80588C.1
tcttcgcatgcagctccaatagccgatcgcagggggaatttcaacgcctgtcaccgctcgaacgatcccgacgaatcgtatagcgtacgaaacgccggtatccgactcgcgaccgtatatttcatgcagcctaagccctagtgcggatcgatccgttactatgtagcccatgtaaggaatggtgctccaaggctcccattttgttgatcagcactaagaca

SEQ ID NO: 81020 - DNA, 654 bp, Oryza sativa
  Clone ID: PAT_MRT4530_80589C.1
atgtctcctttctcaaggcatcgcacacttatgaacatctttgacaaaacccctcatgttcacagagatgcatttgttgccccaagtgcatctctcattggtgatattcaagttggacaaggagcttcaatttggtatggatgcgtcttaagaggggatgcaaacaacgttcaaattggatctgggaccaatatacaagacaattctcttgtccatgtggcaaaatctaatcttagtggaaaagtctttccaaccatcattggggataacgtcacagtaggtcatagtgctgtattacaaggatgtactgttgaggacgaagcatttgttggtatgggggcgaccctgttagatggtgttgtcgtggaaaagcatgggatggttgctgctggagcccttgtatggggaggaaaccctgccaaattcctgaggaagctcactgatgacgagattacgtttatcaaagaatcagcttctaactattccactctggcaaaggcccatgctgctgagaatgccaagcctgttgaaaagactgaatttgagaagctgttccgcaagaagtctgctcaccaggatgaggaacacgattcaatgattggtgctactcgggaggttactccggagctgacgccctcgagttctgcccaataa

SEQ ID NO: 81021 - DNA, 3507 bp, Oryza sativa
  Clone ID: PAT_MRT4530_8058C.1
atgcggctgcgctgcctcctcacgcggccgccggtctccctcgccatctcggccagcgcaggcggcggcgagggatgcttcgccaggagattcggcgccgccgtggcgccgcggccgtggggcgcggggcggcggctgtgccggttctacggctcctcgaagggcggcgtgggcagcgccgaggcgaggagcgccgcggcggcggaggggagcagcgggcgatgcagcgagcaggagcacgcgaagctcggggagagggaccagcaggagtggctgagcggcgagaggttcctcactgattgcaagcgccgggagtcgccgttcctcaccagacgggagaggttccgcaacgagttcatgcgccgcgtcgtgccgtgggagaaggggaacctcacgtggcagaatttcccttactacgtcaagtatgacgcgcgcaccacctgttcggtactttgtttgagaactgagctttacagggagagattagtaagagctctcgcacacgagttgcaggtgccgctgctggtcctggacagcagcgttctagctccatatgattatggggatgactattcagaaagtgacgaagaggatgaacatgatgagtcagaggacgaggaatctgatattgaagatgaaggtgatgaagattggacaagcaatggtgaggctaaaaccgatgaaagtgacgatgaggatgctctgaaatctgtggaagaactgaagaagtctgtggatcgcctcagaaaattggttccatgtactcttgaggaatttgccaagagagttgctggcgcagaagaaggcacaacatcagaatcatctgaaagtcctgagtcatcagaggaagataaaaggccttaccaaaggggagatagggtcaagtatgttggatcctcagaagcctttgaagcagatcagaggatcattttagggaaagtacctactaaagatggctcaagaaatgcctatacctttattagtggcaggactttatcaaagggacaacggggagaggtatatgagatcaatggggatcaagtcgcagtcatattcgaccctcttgcagagaagctgcatgatggtgataatgatgcaactagcaaggaggaaaatactgaggcatccatttactgggttgattctcaggacattgttcatgaccatgatactgagtcagaagattggcatatcgcaattgaagcactttgcgaggttctgccatctctacagccagcaattgtctactttccagacagttcccagtggctatctagagcagttccaaaatcaaatcgcagagagtttatccaaaaggtagaggagatgtttgacaaacttactggaccagtagtaatgatatgtgggcagaacatattggaagcagaacccaaggacaaggataaggaacctccggcgctgatgttccacaatctctctcgcctgtcttcgctgccatcatcactaaagcgattggtaggggggagaccaaaatactcaagatccagtggcatatcgaagctgttcacaaatagtcttatcgttcctcttcctgaggaagatgagcaacgacgaattttcaataaccagatcgaagaggatagaaaaattattatttcaaggcataaccttgttgaattgcacaaggtacttcaagagcatgaactatcatgtgttgagcttctgcatgtgaaatctgatggtgttgttttaacaagacaaaaagcggaaaaggttgttggatgggctagaagtcattatctttcatcagcagttcttcctaacattaagggtgacagattaatcatcccccgtgagagtctggatgtggccattgaaaggctgaaggaacagggcattaaaactaagagaccctctcaaaatataaagaatttggctaaagacgagtatgaacgcaatttcatttctgctgttgtccctcctgatgaaattggagtgaaatttgatgatattggggcacttgaggatgttaagaggacgctggatgagcttgttactcttccaatgaggagacctgaacttttctcccatgggaatttgttaaggaatggagatgttactcttactcaagtggtcctccgatggccagttgctatatcaggggaaaatgagattgtaaaaaaatgcctgccctgcaaaggtgttttgctctttgggcctcctggaacaggaaaaacactcctggcaaaggcacttgcaacagaagctggagcaaatttcatcagcataactggttctacactcacatcaaagtggtttggagatgctgagaagttgacaaaggcccttttctcctttgctagccgattagctcccgttatcatatttgtggatgaggttgacagcttattaggtgcaagaggtggtgcatttgagcatgaagcaacaagaaggatgcggaacgaatttatggcagcttgggatggtctaaggtccaaagagagccagcgaatccttattcttggtgcgacaaatcgtccatttgatctagatgatgctgtaatacggcgtttacctagacggatatacgtggaccttccagatgcacagaaccgaatgaaaattctcaagattttacttgctaaagaaaacttggaatctgatttcagatttgatgaacttgccaattccactgaaggttattcaggaagtgatttgaagaacctatgtatagcttcagcatataggccagttcatgaacttttagaagaagaaaagaagggaggtccgtgtagccaaaatacgggtctaagaccccttagacttgatgatttcattcaagcaaaagccaaggtaagcccgtctgtttcgtatgatgcgacgagcatgaacgaattaagaaaatggaacgaacatgactggccaatattaaaaacttcgaagttgaatgttcgtctgctgaaacccgggaaccggttcccacacatgagaggctgctttggtgaacgtgatagctcgtgggagatcgtgatcactattgattggagtcccactcccatttttaaggcaaaagatgaaattaagtccgggaaagcgaatcgggatggatacggcggtggcgggcgcggcatcgacagaggaggtcgtgacgacggctgtagctgcgcgtgggctcgtcttgctctgctccggcggatggaggcctcgtcagcgggccgaggcgagaggggcaagaaggggaatctgaaagggaggaggcaggggagacgggaccacgagccatgcttagaaaaagggagtggaggcgcccgttcctttaatgggggtcgcgcctcccttcaggggtccggcgacggaaaatggacggcgtttgcgaagacacgggttgaggataccattgctcatgctctcatgagtaaggtctcaggagtcaggactcgggaccactctagcaaagcattcatccttgcgtcgcatcgcatggtaggcatcgcaattcgcaagattgagcacgacgtgatcaatgtgatgcagctggagaattaa

SEQ ID NO: 81022 - DNA, 393 bp, Oryza sativa
  Clone ID: PAT_MRT4530_80590C.1
atggcttgcttgaggatgccaccgccgctccatgtaggcaaccacttgcataggagaagctcgtcggtagttgggattaggaatgtagagtcgtggggtgaagcagcaacacctatggaggccatgatagggagcttctacctgctgatgggaggcgaggtccagtggcggtggtggcagaggcagaggcgtgagggcaagggcagagcggacgcgaccagcgatgtgcagaggagcgccggcgctggccggacagcgggcgagagtgaggagggaggggcgccgtcgatggtcgacgccgctgtctgggcgtgccgttggccggagccgtcgtcctcccgtcgccacggccactcctccctcgccctcacgccaccgccagaccttgcctaa

SEQ ID NO: 81023 - DNA, 130 bp, Oryza sativa
  Clone ID: PAT_MRT4530_80591C.1
tcgttttaatccaatccatcttttcatacacgatcgggctctttaactcactacagaagctacataagccagcaaatatatttgttcgatcgatacacccaatgccgctccatgaacgacaataaaacta

SEQ ID NO: 81024 - DNA, 765 bp, Oryza sativa
  Clone ID: PAT_MRT4530_80592C.1
atggacgactcgagcctcttcttgcattgggcggtgagcacgctgcagcaccagcacccggcggccgtcgcagtcgtggccgacgacgacgccacgttcttctcgttccaggagctctgcgacaccgaggaggtggttgttgtcccggtccaggaagaagtgatcacggaagcgcatggtgcagccgaacggcggcggcggtggcggcgcgccggagatggcgtacgggtcaccgccggcggccgggggatccaccaccaggaagacctcggcgcccacggtggggcggcggcggcgtacgcgcagctggagcacgtcgtcgcggagcggaagcggcgggagaagatcaaccagcggttcatggagctctccgccgtcatccccaagctcaagaagatggacaaggcgacgatcctctccgacgcggcgagctacatcagggagctgcaagagaagctcaaggcgctagaggagcaggctgctgccagggtcaccgaggcagcaatggcgacaccgtcgccggcgagggcgatgaaccaccttccagttccgccggagatcgaggtgcggtgctcgccgacgaacaacgttgtgatggtgaggatccattgcgagaacggcgagggggtgatcgtgaggatcctcgccgaggtcgaggagatccacctcagaatcatcaacgccaatgtcatgccatttctggatcagggcgccacgatgatcataacgatcgctgcaaaggcaagttcttcattattatattaa

SEQ ID NO: 81025 - DNA, 1299 bp, Oryza sativa
  Clone ID: PAT_MRT4530_80593C.1
ctcgtcgtccccgatcccctcctcctctcctctcctctccactcctcgagatctcgcaaggtcagggagccagcaaattcacccgcgattccgcgcgccgccgccgtcgccgccgccgacgtcgccgcctgggtgggggaggagatggccggcctcgggaaggccttctacgcggtagggttctggatccgggagaccggccaggccctcgaccgcctcggctgccgcctccaggggaactactacttccacgagcagctctcaaggcatcgcacacttatgaacatctttgacaaaacccctcatgttcacagagatgcatttgttgccccaagtgcatctctcattggtgatattcaagttggacaaggagcttcaatttggtatggatgcgtcttaagaggggatgcaaacaacgttcaaattggatctgggaccaatatacaagacaattctcttgtccatgtggcaaaatctaatcttagtggaaaagtctttccaaccatcattggggataacgtcacagtaggtcatagtgctgtattacaaggatgtactgttgaggacgaagcatttgttggtatgggggcgaccctgttagatggtgttgtcgtggaaaagcatgggatggttgctgctggagcccttgtaagacagaacacaaggatcccctgtggagaggtatggggaggaaaccctgccaaattcctgaggaagctcactgatgacgagattacgtttatcaaagaatcagcttctaactattccactctggcaaaggcccatgctgctgagaatgccaagcctgttgaaaagactgaatttgagaagctgttccgcaagaagtctgctcaccaggatgaggaacacgattcaatgattggtgctactcgggaggttactccggagctgacgccctcgagttctgcccaataaaccttgtttctgtttttgcttctctctggtgcctttgcatcatcttatattggacagtgcaggattgttgaaggtgacactgttccatgagttcggcggtttatgtttactttcctccccaataattttgggtcgagcattgtgcaaaagctggccatgtacttcgttttctgtattccatatgtttaagatgcgctccatggaacaaagagaaccattacgcacaaaaaaaaaaaaaaattttgacaaaaaaaaaaaaaaaaaaaaaaaaaataaaaaaataaaaaaaaaaaaaaaaaaaaaaaaagggggattaatttttataatatcaactttatttttaaacaatatggggggggccgt

SEQ ID NO: 81026 - DNA, 1729 bp, Oryza sativa
  Clone ID: PAT_MRT4530_80594C.1
cccgggctgcaggaatcggcacgagggatcccttttgcttctctgatctctctcttgcgcagccatggcggaggaggaggattctagggtgtggatcccgccggcggcggagaagctcaccgacgacctcctcgtcgaggtcctctcgcgcgtgccctacaagtcgctctgccgctccaagcgcgtctgcaggcggtggcgccgcgtcatctccgaccccgaccaccgccgcctcctgccgcggtatcacctccacgacgccgtcgtcggattcttcgaccacagatccttcatcagcttctcaggcagaggccgcttcgtcggcccctcgctccccttccttcccgactgcggcgatctccggctcctcgacatctgcaatggcctcctcctctgccgccgccggaggctctccgatccccggagattcgattacctggtggccaatcctgccaccgaacaatggatcgtcctgcctgaatctggctggactcacaaggaacagattgctcgcttggggtttgatccagcggtctcctcgtcccatttccatgtgttcgagttcgagttggtggagcatagtgctatgggtatgagtggtgaccatgatggaaatgtcgttgcggtggaaatttactcatcagaaactggagtgtggattcacaggaacaatggttggggctgcataattaggacgcttgatatttggaggagcgtatttttcaagggcatgctgcatttgatcaccatggatgatgtggtggcagtggtggatgtggaggggaattcttggaggaccattccaatgccagaaacttttgttgatccttattatggtgttgatgatggattcattgatgtgtctcaagattgcctatgttttgtaaataccgatcgcgatgatctatacaaattatcggtatgggttcttgaggactacagcagtgatcagtggaccttgaagcacactgtcagccatctacatctatttggaactgacaaacagcattttggatatgacgacaaagttgtctcgattcacccaaaacggaatatcattttcttggtttcactgaatgatggaatattcatttcctatgaaatggatagcagggaagtgcattatatattggttaatcacgccactcggcaatgggtcgtcctgcctgaatccgcaaggtctgacaagagacagattgcctacttggggttcgatccggcggtctcctcctcccatttccatgtgttcgagttggtggaaaagaatcccgcgaacgcggatggggaagcagatgatggtgaacttgatgcaactatcaacgcgctggagatctattcatctgaaactggagtgtggagtcacaaggacattggttggggccatcaaatcggggtgcttgatgattggaggagcgtgttcttcaacgggatgctgcatttgatcaccatggggtatgtggttgcagtggtggatgtggaggggaattcttggaggaccattccaatgccacaaactcttgatgatcctgactgcaatgtcgatgacgggttcgtagatctgtctcaaggtcgactgtatttcgtaaataccgatcgctacgatctgtataacagcttatcagtatgggttcttcaggactacagcagtgatcagtggaccttgaagcacactgtcagccatttacatctatttggaagaaggagaaaagattttggacatgactactaa

SEQ ID NO: 81027 - DNA, 517 bp, Oryza sativa
  Clone ID: PAT_MRT4530_80595C.1
gcaggaattcggcacaggccaactcccgcaccaaatcccaatccggatcccccacgctaaaccctagctttaaacccccgaatccaaccaatccccgcgccgattcccgccatttcgcgcacctcgtgccaggatctgctcctgggcggcgctcttttagaaaaaaacctggcagatttcgacttctgcaatggagcccgtcgatttcggtgggggcaaaggttatggaaggaatctctgtctgagcaacgatctgatccttctggagtaaggttttgtgctgggtggatttgggattcgatgtggctggagttgagctcatctcggggagaagggattcggacggtgtttgatctttctgtcgtgattgctttgcttcgggtttgctcagcgctagaagatttgctcgcagaatcccgcgcggagttttgaagaaagcttggtatttcctggttcgttgtggtttgtaagcgatgcagttcgaggacgggggagatgttcatgttggtgccggtga

SEQ ID NO: 81028 - DNA, 496 bp, Oryza sativa
  Clone ID: PAT_MRT4530_80596C.1
ttagtcgaatatcagacctaaccgagaaagtcctaaataagccgatacgatcctaaatagtgatatagttaaagatagaatcaatatatctgacaggcaacacttgcatcaacctgaatagaatattgaacctaaccaagaaagttctagccatgccgatacaagcgaagttgacggaacttacttcatcgtcgaagatcgaaacaatgcaactcaacttgaaactacgaactcgctggaaaaaggtgggtatgcgccgaaagtaattgtattgatatgtggagatagattacaaagatctcaggtgtacttatttataccctcagttgatacaaatcctaatcggacacgagataagacttccatctaccaatcaacttctttcctttaactgaatccactaaagaatcgtactaaattttgacgttaacaacatcatgtctccttttaaatcttaagcacatatctcccttatgcatgtatgatggacatggat

SEQ ID NO: 81029 - DNA, 126 bp, Oryza sativa
  Clone ID: PAT_MRT4530_80597C.1
atggacatattcttcctatttgttgaaaacaacagcgtggaacatgagtacccgttccaacgccaaccgagtaatcggtccgatgctaccttggctgtggaggtggatgtgatggaaaatgattga

SEQ ID NO: 81030 - DNA, 244 bp, Oryza sativa
  Clone ID: PAT_MRT4530_80598C.1
gcagacaattgaaagaagagaaaaaaaaacatcatgcaaatctttacttgctgctctctgacaagtggacctggcacactcaggatgaaattcaggaagcttgcatttttgtcggcaactgttggtaaagattttctagaaaatcttttcctgcctgcacatcctatctggtttggggtgatcaagattctgatcagctcaatgaaatttacttggagcttagctgggggaccaatgggcttga

SEQ ID NO: 81031 - DNA, 1312 bp, Oryza sativa
  Clone ID: PAT_MRT4530_80599C.1
agcaatctagaatcggatatgtcattttatagtataacgtctgaacacccttctattcagattcattgaaatatctcatctaattctagattgccatattatgagtctgagggagtactgaacaatgcacttcagcggcagccaatacggatcagacaaatttatgtacaacgaaaggagagtctcggtagaacgaccaggcataatatgtacacacatgtcatgttgccatgcatattcacacgcatatgggacgcggtttttctgcacctagcccatctgccgttcgatcgtttccgtgatgcgtgctgtatttctccctcgtgacgttgtttttccccacctgagttgtatatgtccgaatcttgatgcaaatctgcggtggcgatttccccgcgcgagtcatgtacaagccagggtggctaactggctatttctcctcgagccccgcgacgccgtcgccgacctcgccgccgccgccgccgtcgtcgaagtactcctccttgacgttgccggcgagcatgaggcagaggagccagaagagtgacgcgtcgaggttgaggaacgccactccgccgagcaccccggtcttggccgtcgggcaggcatactccgggtcgacgccgtgcacgttccggacgcggtgcatggcctcgctcgaagtcaacccaccccgtcgtggctatccctgccaccgtgatgcctatggcgagatggaagaagacgtagaggagggtgtagtcgaagagggccttcctcgggacgggcttgccgttgtaggggaagaacacggcgagcgcgccgacgccggcgccgcacgcggcggccaccgccgagagcgcgcccagcgccaccgtcgggtccgccgggaacttgcacaccaccacgcccctgcccctgatcggcgtcccgtgcggcggcttgttgagctcgccgaggatcgcgaggaggaaggacagcgcgccgaagaacgcggtggccatgccgagctgcgcgctctggctcaccgccatggcgtcgacgaccggccggccaaccgatggatcccctcccgccttgtcaatcgccaccttgacctgccaccgcccgcctcaattggagaccctggggataataatcaaaccatgtccaagttaattagcacatccatggcatggcagaattttacaccaaacaattcaaatcttgcaggaatctgcagaaaattccagcattccaaacaaagaaaatcggtatctgggatgccatttggatcgaagcaatccatggtgtgcagaaaatcggacgcgtgggtcgaccgggaatccggacc

SEQ ID NO: 81032 - DNA, 186 bp, Oryza sativa
  Clone ID: PAT_MRT4530_8059C.1
atggcggattcgtcgctcccgaggccaccaacgccagatccaccgttattgagggcgcaggtcgatggtggtgtggctatggttgacgacgatgacagtgtggctcggccgtggtggcgacagttgtcaactaggagtgagaagcaacgatggaggagaaaggctaattcccctgttgttgcctga

SEQ ID NO: 81033 - DNA, 303 bp, Oryza sativa
  Clone ID: PAT_MRT4530_805C.1
gtgacccgccccgcccataacggcacactctccgtactctcctccaccctccaacccccacctttcctcactccccttcctttccgtgcgtgcgtcacactgtcgtcgaagagctcgcaatccttacttctttctatcggtgaggatagtcctacttatcttgtgactctgacttttatgtcaatcatcttctattaagatctttaggatgacttcactttcctcgtatagatcatccctcaattttccattcttttcgtctaccattctcatactgttaaagtcattatgaaaatattctct

SEQ ID NO: 81034 - DNA, 558 bp, Oryza sativa
  Clone ID: PAT_MRT4530_80600C.1
atggctcaatcctgcctggctctcgcggtgtgcgtcctgctcgtgcacggcggcgcggcgagggtagccgaggcggcgtcgtacaacgtcggcaacagcgccggctgggacatcagcgccgacttcccgtcctggctcgacggcaagtcgttcttcgtcggcgacactctcgtgttccagtactcgaagtaccacacgttgagcgaggtcgacgaggcggggtacaggaactgcagcacggccagcgcggtgctctccagcagcgacggcaacacgacggtggccctcacggcgcccggcgaccgctacttcgtctgcggcaacgagctgcactgcctcggcggcatgaggcttcacgtgcccgtctccgagccggcctcaccgggcggggccggcgcgacgccggcgagcccgggcggcggcggcgccctctcccccggcgcggccggcgacgcgggcgtcccgacgctcgacctcggcgggtcccaccgggtgacggtggggcccgcggtggccacgtggctgtgcatcatcgctgcagccctgtttgtatggtga

SEQ ID NO: 81035 - DNA, 1197 bp, Oryza sativa
  Clone ID: PAT_MRT4530_80601C.1
atggtgtacggcgactacctccgtcgtcggattgcgccgctccagcggcgcgctcggggcgcctgggagtacaccgggtccgaagactacatgcggacccaccagggagtcagatgggattgggctcctgaggacttcaagatattggtccaacgggtgctgaatctcaactccgtggaggcgtccctcattccccacggaatcctccccctctgcagcgatccagaccgcgcctccatcttgaccattatgacggcggtcggggcctcagaggagcaggctcctaagggccatgacggcgcaggcgggagccgccgaggggaccaatctaccccaggagggggtcgtgcttctgggccccgcgtcgggggctcggggagcaaccgccctaccgacgcccggggaaagaggaagctgggaggaacacctcccccatctcctccccgagggggcggggcggtgcgtgctagcagcaggcgcccggagggggccgcgccaacatcgcagcccgagggggagtgcaagaagaagcggatccgcaagatgggggagacagaaccatcccggggaaacctgatttctcctccaaggtggtcatttaaccgaccccctcgcagtgatgtcccgtcgcgttcctcccaccatcccaagtccggccagtccgaggccgaagatccggcggccgtagaggcacggaggcgggaatctaaccggcgagaggccgcagatcgcctacgggaagctgaagaggccgcccgggaggccgcccgggctcgccaggctgaggataccgctcgggaggaggccgcccgggctcgccaagccgaagaagccgcccgggaggaggccgcccgggctcgccaggctgaggcgatggcgacttccgaggcagctcgcgacgaggccgcgggcgcgtcgcttgggcccacctcctcgggcgacgctcaggcgacagcttctggggtggctcgcgacgaggccgcgggcgcatcgcttgggcccactccctcgggcgacgcccaggaccaaacaggtccgggggacatccccgagtccggcacgtccattggcgggccgagccgcgcggctcttctccaaaggcagctcttccccacgccttccgtcgcccccgttgagcgcaaaaccccttttgcagccttaaccgccgaaaaacccggggggttgggatggggttaa

SEQ ID NO: 81036 - DNA, 123 bp, Oryza sativa
  unsure (1)..(123): unsure at all n locations
  Clone ID: PAT_MRT4530_80602C.1
ggggataccgttccccgaactgggatcccgaaaaacttatcaaagcnctaaagccgaactgaaaggcccttgtggtttaatagtccgcccggggatcaaaattgctttagagggggaacccgg

SEQ ID NO: 81037 - DNA, 2955 bp, Oryza sativa
  Clone ID: PAT_MRT4530_80603C.1
atggcacggggctccgctctgctcgatggtagcgtactgccgccttcccgcatcgtgagcgagaggcaggccgggctgccgcgccgcttcatgccggaatctgccaccggccgggagatagtcacgctgagcgagggacgcccggcgccaagctacccggggcggtccgtcttcttcctcccttttgcaatggcagggctggttccgccattttcttctttcttcatggatgttctggagttttacgatctccagatggcgcatctcacccccaacgcggtaatgatattggccatcttcgcgcacctgtgcgagatgttcatcagggtgcgcccatcccttcggctgttccggtggttcttcaccgttcagtcggtgtcgccgccgtcggtggttggtggctgctacttccagccgcgggggccgaagagcgactggttctacacccccgtcgccgacgaagcgcgcctccgacttccgagccagcccccggcgcaggcctccagctggcgggcgccggtagatctgggggatggctatgacgccgtcctcgaccgcctggcgggcctgcgatcccaggggctcacaggggccatggtgtatggcgactacctccgtcgccggattgcgccactccagcggcgcgcctggggcgcctgggagtacaccgggtccgaagactacatgaggacccaccagggagtcagatgggactgggctcctgaggacttcaagatagtggtccaacgggtgctgaatctcagctccgtggaggcatccctcattccccaaggagtcctccccctctgcagcgatccagaccgcgcctccatcctgaccatcatgatggcggtcggggcctcagaggagcgagctcctaagggccacgacggcgcgggcgggagccgcaggggggaacaatctaccccgggagggggtcgtgcttctgggccccgcgacgggggcccggggagcagccgccctgccgacgctcgggggaagaggaagcagggaggaacacctcccccatctcctcccgagggggcggggtgcgagatcccgtcgcgtccctcccgccattccaagtccggccagtctgaggccgatgatccggcgaccgcagaggcacggaggcgggaatctgaccggcgagaagccgcggatcgcctacgggaagccgaggaggccgcccgggaggccgcccgggctcgccaggctgaggaaaccgctcgggaggaggccgcccgggctcgccaggccgaggaagccgctcgggaggaggccggatttcgccaggacgaggcgatggcgacttccgaggcagctcgcgacgaggccgcgggcgcgtcgcttgggcccactccctcgggcgatgctcaggcgacgacttccggggcagctggcgacgaggccgcgggcgcatcgcttgggcccactccctcgggcgacgctcaggaccaaccaggtccgggggacatccccgagtccggcacgtccgtcggcgggccgagccgcgcggtgtcctctccaaggcggcttttccccacgccttctgttgccccactgagcgcagagccccttctgcaggccttggccaccgcaaacaccacggtgttggacgggttaagtgcccaggtggaggccctgcaagcagagcgggcggagctcgacgccgcatgggcgcgtgtcgaagaggggcgacgctcggtggaggccatggtggaggtgggccgcaaggcacaccgccggcacgtctcagagcttgaagcccgtcagaaggtgctggcggagatcgccaaggaggtggaggaggagcggggagctgccctcatcgccactaccgtgatgaccgaggcgcaggacaccctccgccttcaatacgggagctgggaggcggagctagggaagaagctcgacgccgcccagggggtccttgacgctgccgctgcccgagagcggcgggcggcggagaccgaagtggcgtcccggcggcgtgaagaggcccttaaggcgcgtgccatggcgctggaagagcgcgcctgcgtcgtggagagggacctggcggaccgcgaggccgccgtcaccatccgggaggcaacgctggcggtgcacgaggccgcgtgcgccgaagaggagtccgcactccgcctccgcgaggacgcgctcaccgagcgggaacgtgctctcgaggaggccgaggccgcggcgcgacggctggcggacagcctgtccctctgtgaggcagcgcgggaagagcaggcgcgccgtaatctggaaggtgcccgcgccgagagggccgtactgaaccagcgggccgctgagctcgaggcgcgggcgaaggagctggacgcgagggcgcacagcggcggggcggccgcgggcgaaagcgacttagcctcccgcctcgcagctgccgaacacaccatcgccgatctgcagggcgcgctagactcgtccgccggggaggtcgaggccctccgcttggcaggcgaggtagggcccggcatgcttcgggacgccgtctcccgtctagactgcgccggccggcaggtgggcctctggggcgggcggactgtgaagtacgccgccaaccaggggggcctcgcccagcgcccctcggagatggccgggactctccaacggctccccgaggagctcgagaggacgattaagtcatcctcgagggacctcgcccgaggagcggtggagcttgtactggcgagctaccaggccagggatcccgacttctctccatggacggcgctggacgagttccctcccgggaccgaggacggcgcgcgcgcgcaggtccgggacgccgccgaccacatcgtccagagcttcgagggttcggcccctcggctcgcgttcgccctcaactccgacgaggaggacgatgacggcggagtgggcggcagtggcgacgaggctggcgacccgggcgcatcggattga

SEQ ID NO: 81038 - DNA, 555 bp, Oryza sativa
  unsure (1)..(555): unsure at all n locations
  Clone ID: PAT_MRT4530_80604C.1
ggttccctttttttgtaaactcactgttcaaaagagttaggacatttccacattattacatttattatttcctttcgaaatatcgaaagtaaacacacaccggaattaaagtcgttatctatctacagacacttagtacgtactcccttcgtcaggggggggggggctctgaatttttcatgtccaactttaactgtccgtcttatatgaaaactttttataattcgtatttttattggtgttagatgataaaacatgattaatattttatgcgtgacttgtatttttaattttttttataaattttttaaataaaacggaaaactctttttatgggacgggacggagtgagtattaaagaaagaacacaatatttcacggaaagcacttgggacacgtggcgttgcttttctgcggggccccacggcagaaggagaactggggtggacactttggcaagcaattgtccggcaaactcaccaccggggccgggctgccttcagctgcctgaggtggctngggcaggggccccgcaggagaaaggggcccctggca

SEQ ID NO: 81039 - DNA, 3135 bp, Oryza sativa
  Clone ID: PAT_MRT4530_80605C.1
atggcacggggctccgcaccgctcgacggtagcgtgctgccgccttcccgcatcgtgagcgagaggcaggccgggctgccgcgccgattcatgccggaatctgccaccggccgggaggtggtcgcgctgggcgagggacgcccggcgccacactacccggggcggtccgtcttcttcctctctttcgcaatggcggggctggtcccgccattctctatttttttcatggatattctggagttttatgatctccagatggcgcacctcacccccaacgcgataatgacgttggccatcttcgcgcacctgtgcgagatgtttatcggggtgcgcccatctctccggctgttccggtggttcttcaccgtacagccggtgtcgccgccgacagtagtcggtggctgctacttccagccgcggggtcaggtgctgaaccgctacattccctgcgtcctccgcaaaaagtgggacgactagaagagcgattggttctacacccccctcgccgaggaagcgcgcctccgacttccgagccagcccccggcgcaggcctccagctggcgggcgacggtagctctgggagacggctacgacgccgttcttgaccgcctggcgggtctgcgatcccaagggctcacgggggccatggtgttcggcgactaccttcgtcgccggatcgcgccgctccagcggcgcgcccggggcgcctgggagtacaccgggcctgaggactacatgaggacccaccaggggcgcaaatgggactgggaccctgaggacttcaggatggtggtccaacgggtgctgaatctcagctccatggaggcatccctcatcccccaaggggtcctccccctctgctgcgatccagagcgcgccaagatcctgaccatcatgcaggtggtcggggtgtcgggggagcgggccccccgaggccacgatggcgcgggcgggagccgcaggggggaacaatctaccccgggagggggtcgtgcttctgggccccgtgacgggggcccggggggcagccgccctgccgacgcccgggggaagaggaagcaggagggtactcctcccccatctcctccccgagggggcggggcggtgcgtgccagcagcaggcgcccggagggtgccgtgccgacgccgcagcccgagggggagcgaaagaagaaacggctccgcaagatgggggggatcgtaccatgccgggggaacctcatctcgcccccaaggtggtcgtttagccgacctccccgcagcgagatcccgtcgcccccccccctcccccgccattccaagtcatgccggtctgaggccgaggagacggcgaccgcagaggcccggaggcgggaagctgaccggcgagaagccgcggaccgcctccgagaagccgaggaggctgcctaggaggccgtccgggttcgccaggctgaggaggccgctcgggaggaggccagactccgccgggccggggagtccgtccgggtggcagaggcggcgcgcgcacgccaggcggcctaccaaacccccgactcgactccgcccgaggcgacgacgacttcagaggccacccacgacgaggccgcgggcgtgccgctcgggcccgacccctcgggcgatgcttgggacaagccaggttcggggggcacccccgagtccggcacgtcaatcggcgggccgagccgcgcggcacccacaccgagggggctctcccctcggccttccgctgccccactgagcgcggagcccttcctgcaggccttggccgccgcgaacagcatggtgctggacgggttaagtgcccagatggaggccctgcaggcagagcgggcggagctcgacgcggcgtgggcgcgcgtcgaggaggggcggcgctcggtggaggccatggtggaggcgggtcgcaaggcacaccgccggcacgcctcacagctcgaggcccgtcgtagggacctggcggagatcgccagggaggtggaggaggagcgggagactgccctcatcgccaccgccgtgctcgacgaggcgcggaacgacctccgcctccaatacgggagccgggcggcggagctggaggagaagctcgacgccgcccagggagtccttgacgccgccgctgcccgggaacggcgggcggcggagaacgaggcggcgtcccggcggcgcgaagaggcccttgaggcttgcgccacggcgctgaaggagcgcgcccgcgccctggacgcgaaggagagagacctggcggaccgcgaggccgccgtcgccacccgggaggcaacactggcggcgcacgaggccgcctgcgccgaagaggagtccgcactccgcttccgcgaggacgcactcaccgagcgggggcgagctctcgaggaggccgaggccgcggcgcagcggctggcggacagcctgttcctccgcgaggcagcgcgggaggagcaagcgcgccgcaatctggaaggcgcccgcgccgaaagggccgcactggatcagcgggccgctgagctcgaggcgcgggcgaaggagctggacgggagagcgcgcagcggcggggcggccgcgggccacggcgacctagtcgcccgcctcgcagccgccgaacacaccatcgccgagctgcagggcgcgctggactcgtccgccggggaggtcgaggccctccgcttggcgagcgaagtagggcccggcatgcttcgggacgccgtctcccgtctagaccgcgccgggcggcaggcgggcctctggggcgggcggcacgcgaagtacgccgccaaccaggggggcctcgcccagcgcctctcagagatgaccggggccctcaagcggcttcccgaggagctcgaggagacgatcaagtcatccacgagggacctcgcccggggggcggtggagcttgtactggcaagctgccaggccagggaccctgacttctccccgtgggcagcgctggaagagttccctcccggaaccgaggacggcgcgcgcgcgcaggtccgggacgccgccgaccacatcgtccacagcttcgaaagtacggcccctcggctcgcgttcgcgctcgactccgacgaggagggcggtgacgacggtgcggacgacagcgacgacgaggccgacgacccgggcgcgtcggat

SEQ ID NO: 81040 - DNA, 2608 bp, Oryza sativa
  Clone ID: PAT_MRT4530_80606C.1
tactcctaggtctttaataagcttcctaaaagattcacccaaaatcttcatagactgcgaccaacagtcaagcttacaaaggtgagttctttcaagaatgctatgggtctcaaacccatctccttcgatgcattatctatcatatttcgtgatagtcccttcgtgaaaggatctgctaggtttctagctgtttggatgtaatccaacgctataactccagagtttctcaatttactgacagacttcaatcgtcttttcacatgtcgtttgattgtcacagttcataagtgacggagctcgtggcccctcaccgggagaccgcgcaggcccccctttgccggttcggccggggacgctgggagtacaccgggtccgaggactacatgaggacccaccaggggcgcaaatgggactgggaccctgaggacttcaggatagtggtccaacgggtgctgaatctcagctccgtggaggcatccctcatccctcaaggcgttctccccctctgcagcgatccagagcgcgctaacatcctgaccatcatgcaggcggtcggggcgtcaggggagcgggctcctcgaggccacgatggcgcgagcgggagccgcaggggtggaacccaatctacctcgggagggggtcgtgcttctgggccccgtgacgggggcccggggggcagccgccctgccgacgcccgggggaagaggaaacaggaggataccccctccccatctcctccccgagggggcggggcggtgcgtgccagcagcaggcacccggagggtgctgcgccgacgtcgtagcccgagggggagcgaaaaaaaaagcggctccgcaagatgggggggggaccgaaccatgccggggaaacctcatctcccccccaaggtgcgagatcccgtcgcgcccttcccgccattccaagtccggccggtctgaggccgaggagacggtgaccgcggaggcccggaggcgggaagctgaccggcgagaagccgcaaactgcctccgggaagccgaggaagctgcccaggaggctgtccgggctcgccaggctgaggaagccgctcgggaggaggccagactccgccgggccgaggagtccgtccgggagacggaggcggcacacgcacgcagggcggcctgccaagcccccgacccgactccacccgaggcgacaacgacttccgaggccgcccacgacgaggccgcgggcgcgccgctcgggcccgacccctcgggcgacgttcgggacgagcccgcttcgggggacgcccccgagttcggcacgtcgatcggtgggccgagccgtgcggcatccttaccgaggcggctctcccccacgccttccgctgccccactgagcgcggagccccttctgcaggccttggccgccgcgaacaccacggtgttggacgggttaagtgcccagatggaggtcctgcaggcagagcgggcggagctcgacgcggcgtgggcgcgtgtcgaagaggggcgacgctcggtggaggccatggtggaggcgggccgcaaggcacaccgccggcacgcctcagagctcgaggcccgtcgtagggacctggcggagatcgccagggaggtggaggaggagcgggagactgccctcattgccaccgccgtgttcaacacggcacgggacgacctctgcctccaatacgggagccgggcggcggagctagagaagaagctcgacgcgtcccggcagcgcgaagaggcccttgaggctcgcgccacggtgctggaggagctcgcccgcaccctggacacgaaggagagggaactggtgggtcgcgaggccgccgtcgccatccgggaggcaacgctggcggtgcacgaggccgcctgcgccgaagaggagtccgcactccgcctccgcgaggacgagctcactgagcgggagcgagctctcaaggaggccgaggtcgcggcgcagctgcgggaggagcaggcgcgcctcaatctggaaggcgcccgcgccgagagggccgcactggatcagcgggccgctgaattcgaggcgcgggcgaaggagctggacgcgagagcgcgcagcggcggggcggccgcgggcgacggcgacctagccgcccgcctcgcagccgccgaacacaccatcgccgagctgcagggcgcgctggactcgtccgccggggaggtcgaagccctccgcttgatgggcgaggtagggcctggcatgcttcgggacgccgtctcccgtctagaccgcgccgggcggcaggcgggcctctggggcgggcggaccgcgaaatatgccgccaaccaggggggcctcgcccagcgcctctcagagatggctgggaccatccagcggctccccgaggagctcgaggagacgatcaagtcatcctcgagggacctcgcccggggggcggcagcgctggacgagttccctcctggaaccgaggatggcgcgcgcgcacaggtccgggatgccgccgaccacatcgtccacagcttcgagggtacggcccctcggctcgcgttcgccctcgactccgacgaggagggcgatgacggtggtgcggacgacagcgacgacgaggccggcagcccgggcgcgtcggcg

SEQ ID NO: 81041 - DNA, 2862 bp, Oryza sativa
  Clone ID: PAT_MRT4530_80607C.1
atggcacggggctccgcaccgctcgacggtagcgtgctgccgccttctcgcatcgtgagcgagaggcaggccgggctgccgcgccgattcatgccggaatctgccaccggccgggaggtggttgcgctgggtgagggacgcccggcgccacactacccggggcggtccgtattcttcctttccttcgcaatggcagggctggtcccgccattctcttctttcttcatggatgttctggagctttatgatctccagatggcgcacctcacccccaacgcggtaatgacgttggccatcttcgcgcacctgtgcgagatgttcatcggggtgcacccatctctccggctattccggtggttcttcaccgtacagccggtgtcgccaccgtcggtagtcggtggctgctacttcccgccgcgggggccggggctcacgagggccatggtgtacggcgattaccttcgtcgccggatcgcgccgctccagcggcgcgcccggggcgcctgggagtacaccgggtccgaggactacatgaggacccaccagggggtcaaatgggactgggtccctgaagacttcaaggtggtgatccaacgggtgctgaatctcagctccgtggaggcatccttcatcccccaaggtgtcctccccctctgcagcgatccagagcgcgccaacatcctgaccatcatgcaggcggtcggggcgtcaggggagcgggctcctcgaggccacgatggcgcgggcgggagccgaaggggggagcaatctaccccgggagggggtcgtgcttctgggccccgtgacgggggcccggggggcagccgccctgccgacgcccgggggaagaggaaacaggaggataccccctccccatctcctccccgagggggcggggcggtgcgtgccagcagcaggcgcccggagggtgctgtgccgacgtcgcagcccgagggggagcgaaaaaagaagcggctccgcaagataggggggaccgaaccatgccggggaaacctcatctcccccccaaggtggtcgtttagccgacctcctcgcagcgagatcccgtcgcgcccttcccgccattccaagtccggccggtctgaggccgaggagacggcgaccgcggaggcccggaggcgggaagctgaccggcgagaagccgcagaccgcctccgggaagccgaggaagctgcccaggaggccgtccgggctcgccaggctgaggaagccgttcgggaggaggctagactccgccgggccgaggagtccgtccgggagacggaggcggcgcgcgcacgccaggcggcctgccaagcccccgacccgactccgcccgaggcgacgacgacttccgagtcctcccacgacgaggccgcgggcgcaccgctcgggcccgacccctcgggcgacgctcaggatgagccaacttcgggggacgtccccgagtccggcacgtcgatcggcaggccgagccgtgcggcatccttaccgaggcgactctcccccatgccttccgctgccccactgagcgcggagccccttctgcaggccttggccgccacgaacaccacggtgttggacgggttaagtgcccagatggaggtcctgcaggcagagcgggcggagctcgacgcggcgtgggcgcgtgtcgaagaggggcgacgctcggtggaggccatggtggagacgggccgcaaggcacaccgccggcacacctcagagctcgaggcccatcggagggagctggcggagatcgccagggaggtggaggaggagcgggagactgccctcatcgccaccgccgtgttcaacgcggcgcgagacgacttctacctccaatacgggagccgggcggcggagctagagaagaagctcgacgcgtcccggcagcgcgaagaggcccttgaggctcgcgccacggcgctggaggagcgcgcccgcgccctggacgcgaaggagagagacctggcggaccgcgaggccgccgtcgccacccgggaggcaacactggcggcgcacgaggccgcctgcgccgaagaggagtccgcactccgcctccgcgaggacgcgctcaccgagcgggggcgagctctcgaggaggccgaggccgcggcgcagcggctggcggacagcctgttcctccgcgaggcagcgcgggaggagcaggcgtgccgcaatctggaaggcacccgcgccgagagggccgcactggatcagcgggccgctgagctcgaggcgcgggcgaaggagctggacgcgagagcgcacagcggcggggcggccgcgggccacggcaacctagccgcccgcctcgcagccgccgaacacaccatcgccgagctgcagggcgcgctggactcgtccgccggggaggtcgaggccctccgcttggcgagcgaggtagggcccggcatgcttcgggacgccgtctcctgtctagaccgcgccgggcggcaggcgggcctctgggacgggcggtacgcgaagtacgccgccaactaggggggcctcgcccagcgcctctcagagatggccggggccctcgagcggctccccgaggagctcgaggagacgatcaagtcatcctcgagggacctcgcccggggggcggtggagctcgtgctggcaagctaccaggccagggaccctgacttctccccgtgggcagcgctggaagagttccctcccggaaccgaggacggcgcgcgcgcgcaggtccgggacgccgccgaccacatcgtccacagcttcgagggtacagcccctcggctcgcgttcgcgctcgtcttcgacgaggagggcggtgacgacggtgcggacgacagcgacgacgaggccggcaacccgggcgcgtcggag

SEQ ID NO: 81042 - DNA, 2034 bp, Oryza sativa
  Clone ID: PAT_MRT4530_80608C.1
ttacatcaacagatagcgtagatggacaagtttcgagaagttacgcaacatattctccatatcataagatgcattaaacatcaagatgacacggagtgcttttgctttactcaacaaattaccaaaaggaatgacaaagctcccatgatattgtccaaatagcatcaaagactgtagtttttcaacatctagtctcttatgtagagtgctaaaatccttcttaacattttcaaaagtcactctatgatttacatccgtgtcgtctatcacaatagacaaatgtcgtacagatggtggaatttgcacacttctcacactagaactacttatagcaagatattcatatgatgaaacctttagtgctaactcatgtagtaggtcatgcattgtatagtacggagacccatttttgttcatgtcttttctaaaaaatccataattaaccaaatcattcaaatagctcagtcctatctcttcgacttttttgttttgattccgcgattgtaatatgtctagtcctatccacaagtgaatcatctcgtcactttcaaatctgtaatcttcagggaacagagcacaatatgtaaaacaatgctgtagatgaaaagggagatagtcatagctaagctttagcgctggcataatatcattctcaccggtttgcagttcccattctctactttcgaggacacttgtccaatgctccaagtcaaggtgatttctcaataaccgtcctacagtttttgctgccaaaggggagcccttcaatttttccgctatcttcttcccagtgacaagtaagtccacgtgattgcctattgatttctcatcaccaaatacacatgcttggaatagttcccaaaacacttcagattctagcccttccaactgtattgaatgatcaattgttttaaccatttctgcgactgctagaaaacgagtggtgactagaattatatttcccgttgattgtgcttttcttaggggtgctaagagccttctccactcatcctcattaccacaattccacatatcatccaagacaagtaaaaacctctttgatttcaacctttgctcaattaaatcgtctgggccaccagatttctcatctttgagttcaggcattaacttggcaatctcctctgaaccaacaattggaatgatggtcaggtctttgccacaataatcaccccgagtaatgccaataattttatttatctcactcatcctcccatgaaatttagggtctataaactctgaagtggttacaggccggctcatagcaacgctgcttggaagaaaaggtgcttgccctggcatccgggaaagcgcagcattgagactcatgaggccaatgttgcggtttgattccaacaactccagattaaggatggtggagaccttggcgcagactggttttagctgctcgacgatgtgcttcattcttgtggacagatccaccctgtcaaacttcagctttggtgttttcatggtgtgctctatgtgcgatgctttgcaaggataggcgcagcagaggaactggcttctttctcgagcattggaaaagagcttgtgaatgcagctgctgcctgcaagtgcttccccatcgttggtatggcgactcgcttccccattatctccgcatgagcacgccttcttcttgatgtttctgactgtgcggcgtgtgttgagcacgaggccatagaggcagcccttggcgtgctcttcggcggcctcgtaggtgccatcaagctcgtcctggatgcggaagtagtcgagctcgtccagcacgtcctcggcgtcgtaggccaggccgcggagcttcaggagcagctgctgcagcgcggggttgctggtctctctgctgcgagcgttgtgcagcatcccctgcgcatagagcagctccatcttgatggcgtcgacattagggccgagctccgtggtggcagcccacgcctcgacgaaccctcccgacagcgggctcagcgccttgccgaccacccatcgcgccgcgttcacggccaccgactccat

SEQ ID NO: 81043 - DNA, 3936 bp, Oryza sativa
  Clone ID: PAT_MRT4530_80609C.1
atggcgaactatctacctgtggccctagcggattctgcccggtcatggcttcacgggctaccccgcggcacgatcggatcatgggcagagctacgcgaccacttcatcgccaacttccaaggcacttttgaacggcccggcacacacttcgatctttacaacatcgttcagaagtctggagaatctcttcgagattacattcgacgcttctccgagcaacgcaacaagatctccgacatcaccgacgacatcatcatcgccgccttcactaaaggcattcgccacgaggacctagtcggcaagttcggacgcaaacctcccaagacggtcaaacaaatgtttgaaaaagccaatgagtatgccaaagccgaagatgctatcacggcgtccaagcagtcgggcaccacttggaagccaaagaaggatacgccgaccgcaggagggagtggaagtaacaaccacaaggatcgcaagcgtaagcccgaagaacttatggcaaccacctctccatcttcccgacaacgttcccgcgtcaacaccttcgacaagataatgaactcccaatgtccgcatcatcccaactccaaccacgtggccaaagattgcttcgtctacaaacagttcgcagagcaatatgtcaagaacgcacgtaaaccttcagacggagatcaaggcacatcaaagaagaaagatgatgaagacgatgccccgactggttttcaagatcatcgcaaagaactcaatcacatcttcggcggacccctggcttatgagtctaagagaaaacagaagctaacagaatgggagatcaatgcggttcagcctaacacgccccaatatcttcggtggtcagagatagcaattaagttcgaccgctcggatcatcccgaccgagtggtccacccggggcggtaccccctggtactagacctagtggttcgcaatgtcaagctccgacggactctcatcgatggtggcagcgcactcaacatccttttcgctaagaccctggacgatatgcagattcctcgcacggaattaaagccgagtaatgcacccttccacggtgttatcccaggattgtcagctacaccactcggccagatcactcttccagttaccttcggcactcgggagaattttcgcacagaaaatgtttgtttcgaagttgctgatttcgagacagcatatcacgctatacttggacgaccggctttagctaaatttatggccgtcccacactacacctacatgatgatgaagatgcctggtcctcgaggagtcatatcactacggagcgacatcaagcaggccgtcacatgtgacaaagaaagttgcgagatggcccaaacccacgagactactctcgcccgcgaagagatccgactggctgcgaccacggcaagcgagggagaagtgcctgcaaccaagctgaagaagaccaaagaaagtaatgccaagacgaaaaagattcccttagatccctccgatcctgataagactgctaataataaagatatttttgcgtggaaaccatccgatatgcctggtatccccagagaggtgattgagcactctttacatgttaaggaagacgccaaacccgtcaagcaacgactccgccgttttgcacaggacaggaaggatgcaatcaaggaggaattaaccaagctgttaacagcaggcttcattaaggaagtccttcatcccgactggctggctaacctagtcctggttcggaaaaagacggggcaatggcgcatgtgtgtcgattataccgacctcaacaaatcttgtcccaaagacccttttgggttacctcgcattgaccagacctcgtttattacgccctttggggcctactgctacatcaccatgccctttggattgaagaatgcaggagcaacctatcagcgcatgattcaaagatgtttttcaactcaaatcggtcgcaatgttgaagcttatgttgatgatgtagtcgtcaagaccaagcagaaggatgacctgattgcggatttagaagaaacttttacaagcattcgtgctttcaagatgaaactaaacccggaaaagtgcatcttcggagtaccgtcagggaagttgctcggatttatggtatctcaaagaggcatacaggccaacccagagaaaatcaacaccatcctcaacatgaaaccgccaagctcccaaaaagacatccaaaagctaactggttgcatggcggcgcccagccggcttacaggcactggagctagggtcgtcttgatatccccgactggagaaagattgagctacgtattgtggatacatttttctgcgtcccataacgtggcggaatacgaggcgctactccatggattaaggattgcaatctctctaggcattcaccgactaatcgtccgtggagactctcagttgattgttaatcaagtcatgaaagagtggtcttgtctagatgataatatgactgcttatcgacaagaggtacgcaagttggaagataaattcgatggactcgagctcacccatgtcctccgacataacaatgaggcagccgacaggctggccaattttggttcaaaacgggaagcagctccttcagatgtgttcgtcgaacatctttacgaaccgaccgtgcccaaaaaagagacagtcgaagccatggatactcaaggcgtaagcatgatcgaagctgactggagagaactgtttataaaatttttgagcaaacaagaactccctcaagacaaaaatgaagctgagcggatttccaggcgcagcagactttacattattcatgagactgagctgtacaagaaaagtctatcaggaatactgcagcgctgtgtgtctttggaagaagggagacagttgttgaaggatatacattttggtatttgtggtaatcatgccgctgcacggaccattgtcggcaaagcttaccggcaaggttttttctggcctacagctgtgtccgatgctgacaagattgtgcggacatgcgaagattgtcaattttttgctagacaaattcatttaccagcccaagagttgcaaaccatcccgttgtcctggccattggcggtctgggggctagacatggtcggcccgtttaaaagggcagtcggcggttacacgcatctctttgtggccatcgacaaattctccaagtggattgaggctaaaccggtcatcacgatcacaacagataaagctagagactttttcatcaacattgtgcatcggtttggggtacctaatcggatcatcactgataatggcactcaattcactggcggagcatttagagacttttgtgaagactttggcattaaaatttgttacgcctccatggcacaccccatgagtaacggacaagtcgagcgcgctaacggcatgatacttcaagggatcaaagcacgcgtttttgaccgactacatccctatgctggcaagtgggtagatcagctaccgtccgtactttggtctttacgcactactcctagtcgggctaccggccagtcgccgttctttttggtttatggcgcagaagcaatgttgccgagtgaaatggaatttgaatcactacgatttcggaacttcaacgaggagggctatgaagagggccgagtagacgacatcaatcgactagaagaagcccgagaagcagctttaattcagtcaactcgatatttgcaagggttgcaccgttatcataatcggaatgttcgatcgcgagcctttttagtcggcgacctggttctgaggaaaattcaaacaacacaagatcagcataaattatctcccttatgggaaggaccgttcataattgctgaagtcactcggccgggttcttatcgactcaagcgcgaagacggtactctcatcaacaattcttggaatattgaacaccttcgtcgattttacgcttag

SEQ ID NO: 81044 - DNA, 1312 bp, Oryza sativa
  Clone ID: PAT_MRT4530_8060C.1
ggaggggccgaaattttgcttctaatttcctagcatgttagcaaatatatattacatgaaaggatggacacatagtgaaattgtcacaggagtgaaaaaccagaatgatgtacaagtaagcaaacatgctctctccgaaacttcaaattctccatctcaaaaaacaaagcgtcctagctcaaggaaaaatggcttcaacaaatgcctcagcatcaaaaggctgaagatcctccatcccttcaccaacaccaataaactttactggaattccaagttcatctacaacgctaaccacacaaccaccacgagcagttccatcaagctttgttaggacgaatcctgtgactccaacaacatcattgaactccctcgcttgttgtagcatattcaagccagtcgtgccatccagaaccagcaagatctcattaggagcacccggaagggctttagctatgactttcttgcaggaaaccaattcttccatcagaccataatttgtatgaagtcctgatgcaggttttgctttcttatcattatcgataacaatctctgaacctgttctctctgcccaaacttctagctggtcacgagctgctgctctgaaggtatcacctgctgccatcaataccttcactccttcattcttgaatctgtaagcaagttttcctaatgaggtagtctttccacctccattcactcccacaatcatgataactgccggctttctgaaaccgagctgcagctccggattgccgcctttgctcgtcagcagttcaagaatacaccttttcagcgcttcctttatctcagccccagacttgagcttgccatcgcggatttcctcgcgtagagtgtccacgatccggaacgaaatcttggggccaaaatccgacaccagcagagcctgcgtgcacgagaccaagcaggaaacattcaaaaaaaacgaagacagaagcagcgccgaacagtgaagaaggagagaacagcatgcagagcagtggagcaggggacgcgcctcctcgagctcgtcgaggacgcggtcggtgtcggcgaggttccagtaggtgaggagctcgtcgacgacggagaggctctcgcgggtcttggagaagccggagaagagcttctcgacgtcgctcttggccttctcctggatgaggcgtcccaggcgggtgaagaaccccgcctgccccgccgccgccgcgcaccgcaggagccccgcgcggccgcggcggcggtggccgtagggggagcagcgcgcggacgtcgccgccggggagaggaaggggatgacgtgggagtgtgccgccat

SEQ ID NO: 81045 - DNA, 2829 bp, Oryza sativa
  Clone ID: PAT_MRT4530_80610C.1
atggcacggggctccgcaccgctcgatggtagcgtgctgccgccttcccgcatcgtgagcgagaggcaggccgggctaccgcgccgattcatgccggaatctgccaccggccgggaggtggtcgcgctgggcgagggacgcccggcgccacactacccggggcggtccgtcttcttcctctctttcgcaatggcggggctggtcccgccattctctatttttttcatggatattctggagttttatgatctccagatggcgcacctcacccccaacgcgataatgacgttggccatcttcgcgcacctgtgcgagatgtttatcggggtgcgcccatctctccggctggtcgggtggtgcttcaccgtacagccggtgtcgccgccgacggtagtcggtggctgcaacttccagccgcgggggcaggtgctgaaccgctacattccctgcgtcctccgcaaaaagtgggacgactggaagagcgattggttctacacccccctcgccgacgaagcgcgcctccgacttctgagccagcccccggcgcaggcctccagctggcgggcggcggtagatctgggagacggctacaacgccgttcttgaccgcctggcgggtctgcgatcccaggggctcacggggtccatggagtacaccgggcccgaggactacgtgaggacccaccaggggcgcaaatgggactgggaccctgaggacttcaggatggtggtccaacgggtgctgaatctcagctccgtggaggcatccctcatcccccaaggggtcctccccctctgctacgatccagagcgcgccaagatcctggccatcatgcaggtggtcggggcgtcgggggagcgggccccccgaggccacgatggcgtgggcgggagccgcaggggggaacaatctaccccgggagggggtcgtgcttctgggccccgcgacgggggcccggggggcagccgccctgccgacgcccgggggaagaggaagcaggagggtacccctctcccatctcctccccgagggggcggggcggtgcatgccagcagcaggcgcccggagggtgccgtgccgacgccgcagcccgagggggagcgaaagaagaaacggccccgcaagacggggtggatcgtgccatgccgggggaacctcatctcgcccccgaggtggtcgtttagccgacttccccgcagatcccgtcgcgccccccccccccaaccccctggacattccaagtccggccggtctgaggccgaggagacggcgaccgcggaggcccggaggcgggaagctgaccggcgagaagccgcggaccgcctccgggaagccgaggaggctacccaggaggccgtccgggttcgccaggctgaggaggccgctcgggaggaggccagactccgctgggccggggagtccgtccgggaggcagaggcggcgcgcgcacgtcaggcggcctgccaaacccccgacccgactccgcccgaggcgacgacgacttccgaggccacccacgatgaggccgcgggcgcgccgctcgggcccgacccctcgggcgacgcttgggacgagccagcttcgggggacgcccccgagtccggcacgtcgatcggtgggccgagccgcgtggcacccacaccgaggcggctctcccctcggccttccgctgccccactgagcgtggagcccctcctgcaggccttggccgccgtgaacagcatggtgctggacgggttaagtgcccatatggaggccgtgcaggcggagagggcggagctcgacgcggagtgggcgcgcgtcgaggaggggcggcgctctgtggaggccatggtggaggcgggccgcaaggcacaccgccggcacgcctcacagctcgaggcccgtcgtagggacctggcggagatcgccagggaggtggaggaggagcgggagactgccctcatcgccaccgccgtgctcgacgaggcgcgggacgacctccgcctccaatacgggagccgggctgcggagctagagcagaagctcgacgccgcccagggagagtccgcactccgcctccgcgaggacgcgctcaccgagcgggggcgagctctcgaggaggccgagcccgcggcgcagcggctggcggacagcctgttcctccgcgaggcagcgcgggaggagcaggcgcgccgcaatctggaaggcgcccgcgccgagagggccgcactagatcagcgggccgctgagctcgaggcgcgggcgaaggagctggacgcgagagcgcacagcggcagggcggccgcgggccacggcgacctagccgcccgcctcgcagccaccgaacacaccatcgccgagctgcagggcgcgctggactcgtccgccggggaggtcgaggccctccgcttggcgagcgaggtaggaccgcgccgggcggcaggcgggcctctgggcgggcggtacgcgaagtacgccgccaaccaggggggcctcgcccagcgcctctcagagatggccggggccctcgagcggctccccgaggagctcgaggagacgatcaagtcatcctcgagggacctcgcccggggggcggtggagctcgtactggcaagctaccaggccagggaccctgacttctccccgtgggcagcgctggaagagttccctcccggaaccgaggacggcgcgcgtgcgcaggtccgggacgccgccgaccacatcgtccacagcttcgagggtacggcccctcggctcgcgttcgcgctcgactccgacgaggagggcggtgacgacggtgcggatgacagcgacgatgaggccggcaacccgggcgcgtcggagtga

SEQ ID NO: 81046 - DNA, 168 bp, Oryza sativa
  Clone ID: PAT_MRT4530_80611C.1
atgttccgtgtcttcggcaaggacaaggaaacagcttcatctccgctgccaagccccgccacgtcatgtccaatgcatcaggagatcctcactgatgaggaggtcgatgagatgttccgtgaggctgatggtgataggcagaccaactacaagggatttcgtaattga

SEQ ID NO: 81047 - DNA, 2685 bp, Oryza sativa
  Clone ID: PAT_MRT4530_80612C.1
atgaagcctggtatatatctgaccgggaccaacgtgccatctccaggagctaacacgccggctctggctagggacgagtgcttggaggctctcatcctgatgggatggggcgaggccgtcatggcacggggctccgctccgcttgacggtagcgtgctgccgccttcccgcatcgtgagcgagagacaggccgggctgccgcgccgcttcatgccggaatctgccaccggccgggagatagtctcgctgggcgagagatgcccggcgccacgctactcggggtggtccgtcttcttcctcccttttgctatggcagggctggttccgccattttcttctttcttcatggatgttatggagttttacgatctccagatggcgcacctcatccccaacgcggtaatgacattggccatcttcgcgcacctatgcgagatgttcatcggggtgcgcccatcccttcggctgttccggtggttcttcaccgtacagccggtgtcgccgccgtcggtggttggtggttgctacttccagccgcgggggccggtgctgaaccgctacattccctgcgtcctccgcaagaagtgggatgactggaagagcgactggttctacacccccctcgccgacgaagcgcgcctccgacttccgagccagcctccagcgcaggcctccagctggcgggcgccggtagatctgggagatggctatgacgccgtcctcaaccgcctggcgggcctgcgatcccaggggctcacaggggccatggtgtacggcgactaccttcgtcgccggatcgcgccactccagcggcgcgcccggggcgcctgggagtacaccgggtccgaggactgtatggggacccaccggggggtcaaatgggactgggtccctgaagacttcaaggtaatgatccaacgggtgctgaatctcagctccgtggaggcatccctcatcccccaaggagtcctccccctctgcagcgatccagatcgcgccaacatcctgaccatcatgatggcggtcggggcctcagaggagcgagctcctaagggccttgatggtgcgagcgggagtcgcaagggagatcaatctaccccaggagggggtcgtgcttccgggccccgtgatgggggctcggggggctgccgccctgccgacgcccgagggaagaggaaacaagagggtacctcctccccatctcctccccgagggggcggggtggcgcgtgtcagcagcaggcgcccggagggggccgcgccgacgccgcagcccgagggggagcggaagaagaagcggctccgcaagatgggggggacagaaccatcccggggaaaccttatttcccctccaaggtggtcgtttaaccgaccccctcgcagtgagatcccgtcgcgtccttcttgccaatccaagtccggccaatctgaggccgagaatgcagcgaccacggaggcccggaggcgggaatctgaccggcgagaagccgcggatcgcctacgggaagccgaggaggccgcccgggaggccgcccgggctcgccaggctgaggaagccgctcgggaggaggccagactccgccaggccgaggcgacgacatcctccgaggcaacccgcgaaactgaccggcaagaagccgcggatcgccttcgggaagccgaggaagctgcccaggtggccgtccaagctcgccaagctgaagaagccgctcgagaggaggccagacttcgccaggccgaggcgacgacgacttccggggcagctcgcgatgaggccgcgggcgcatcgcttgggcccactccctcgggcgacactcaggacaagccaggtccgggggacgtccccgagcccggaacgtccatcggcgggccgagccgcgcggcatcctcactgaggcggctctccccaacgccttccgctgccccactgagcgcagagccccttctgcaggccttggctgtcgcaaacaccacagtgttggacgggttaagtgcccagatggaggccctgcaagcagagcgggcggagctcgacgccgcatgggcgcgtgtcgaagaggggcgacgctcagtggaggccatggtggaggtgggccgcaaggcacaccgccggcacgcctcagagctcgaagcccgtcggaaggtgctgggggagatcgccagggaggtggaggaggagcggggggctgccctcatcgccactaccgtgatgaacgaggcgcaggacgacctccgtcttcaatacgggagctgggaggcagagctagggaagaagctcgacgccgcccggggggtccttgacgctgccgctgcccgagaacggcgggcggcggagaccgaggtggcatcccggcggcgcgaagaagcccttgaggcccgtgccatggcgctggaagagcgtgcctgcgttgtggagagggacctggcggaccgcgaggccgccgttgctattcgggaggtcacactggcggcgcacgaagccgcctgtgccgaagaagagtccgcactccgcctccgcgaggatacgctcaccgagcgggagcgagccctcgaggaggccgaggccgcagcgcaaaggctagcggagagcgcgtccctccgcgaagctgcgcaagaggaacaagcgcgtcgcaatctggaaggtgcccgcgccgagagggccgcactgaaccacgcgggccgctga

SEQ ID NO: 81048 - DNA, 2691 bp, Oryza sativa
  Clone ID: PAT_MRT4530_80613C.1
atggcacggggctccgctccgcttgacggtagcgtgctgccgccttcccgcatcgtgagcgagagacaggccgggctgccgcgccgcttcatgccggaatctgccaccggccgggagatagtctcgctgggcgagggatgcccggcgccacgctacccggggcggtccgtcttcttcctcccttttgctatggcagggctggttccgccattttcttctttcttcatggatgttctggagttttacgatctccagatggcgcacctcacccccaacgcggtaatgacattggccatcttcgcgcacctgtgcgagatgttcatcggggtgcgcccatcccttcggctgttccggtggttcttcaccgtacagccggtgtcgccgccgtcggtggttggtggttgctacttccagccgcgggggccggtgctgaaccgctacattccctgcgtcctccgcaagaagtgggatgactggaagagcgactggttctacacccccctcgccgacgaagcgcgcctccgacttccgagccagcctccagcgcaggcctccaactggcgggcgccggtagatctgggagatggctacgacgccgtcctcaaccgcttggcgggcctgcgatcccaggggctcacaggggccatggtgttcggcgactatcttcgtcgccggatcgcgccactccagcggcgcgcccggggcgcctgggagtacaccgggtccgaggactgtatgaggacccaccagggggtcagatgggactgggctcctgaggacttcaagatagtggtccaacgggtgctgaatctcagctccgtggaggcatccctcattcctcaaggagtcctccccctctgcagcgatccagaccgcgcctccatcctgaccatcatgcaggcggtcggggcgtcggaggagcaggctcctcgaggccacgatggcgcgggcgggagccgcaggggggaacaatctaccccgggagggggtcgtgcttctgggccccgcgacgggggcccggggagcggccgccctgccaacgcccgggggaagaggaagcaggaagaaacccctcccccatctcctccccgagggggcggggcggcgcgtgccagcagcaggcgcccggagggggccacgccgacgtcgcagcccgagggggagcggaagaagaaacggcttcgcaagatgggggggacagaaccatcccggggaaacctcatttcccctccaaggtggtcgtttaaccgaccccctcgcagcgagatcccgtcgcgtccctcccgccattccaagtctggccagtctgaggccgaggacccggcgaccacagaggctcggaggcgggaatctgaccggcgagaagccgcggatcgcctacgggaagccgaggaggccgcccaggtggccgtccgagctcgccaagctgaagaagccgctcgggaggaggccagacttcgccaggccgaggcggcaatgacttccgaggcagctcgcgacgagtccgcgggcgcatcgcttgggcccactccctcgggcgacgctcaggacaagccaggtccgggggacatccctgagtccggcacgtccatcggcgggccgagccgcgcggcatcctcaccgaggcggctcttccccacgccttccgttgctccactgagcgcagaaccccttctgcaggccttggccgtcgcaaacaccacggtgttggacgggttaagtgcccaggtggaggccctgcaggcagagcgggcggagcttgacgccgcatgggcgcgtgtcgaagaggggcgacactcggtggaggccatggtggaggtgggccgcaaggcacaccgccggcacgtctcagagctcgaagcccgtcggaaggtgctgggggagatcgccaaggaggtggaagaggagcggggggctgccctcatcgccaccaccatgatgaacgaggcgcaggacaccctccgccttcaatacgggagctgggaggcggagctagggaaaaagctcgacgccgcccggggggtccttgacgctgccgctgcccgagaacggcgggcggcggagaccgaggtggcatcccggcggcgcgaagaagcccttgaggcccgtgccatggcgctggaagagcgtgcctgcgccgtggagagggacctggcggatcgcgaggccgccgttgctattcgggaggtcacactggcggtgcacgaagccgcctgtgccgaagaagagtccgcgctccgcctccgcgaggacgcgctcaccgagcgggaaccgcgccggccggcaggtgggcctctggggcgggcggactgcgaagtacgccgccaaccagggggcctcgcccagcgcctatcggagatagccgggactctccaacggctccccgaggagctcgagaggacgattaagtcatcctcgagggacctcgcccgaggagcggtggagctcgtactggcgagttaccaagccagggatcccgacttctccccatggacggcgctggacgagttccctcccgggaccgaggacggcgcgcgcgcgcaggtccgggacgtcgccgaccatatcgtccacagcttcgagggttcggcccctcggctcgcgttcgccctcaactccgacgaggaggacgatgacggcggagtgggcgacggtggcgacgaggctggcgacccgggtgcatcggagtga

SEQ ID NO: 81049 - DNA, 1650 bp, Oryza sativa
  Clone ID: PAT_MRT4530_80614C.1
atggcgacttccgaggcagctcgcgatgaggccgcgggcgcgtcgcttgggcccacctcctcgggcgatgcccaggcgacagcttctaggatggctcgcgacgaggccgcgggcgcatcgcttgggcccactccttcgggcgacgcccaggaccaaacaggtccgggggacatccccgaggccggcacgtccattggcgggccgagccgcgcggcatcttctccaaggcagctcttccccacgccttccgtcgccccgctgagcgcagagccccttctgcaggccttagccgccgccaacaccgcggtgttggatggattaagcgcccaggtggaggccctgcaggcggagcgtgcggagctcgacgccgcatgggcgcgtgtcgaggaggggcggcgctcggtggaggccatggtggaagcaggccgcaaagcacaccgccggcacgtctcagatcttgaagcccgtaagacggcgctggcggagatcgcccgagaggtggaggaggagcggggggctgccctcatcgccaccactgtgatgaacgaggcgcaggactccctccgccttcaacacgggagctgggaggcggagctaaagaaaaagctcgacgccgcccaggaggtccttgatgccgccgctgcccgagagcagcgagcaacggagaccgaagcggcgctccggcggcgtgaagaggccctcgaggcacgcgccatggcgctggaggagcgcgcctgcgtcgcggagaaggacctggcggaccgcgaggccgccgtcacctcccgggaggcaacgctggcggcgcacgagtctgcctgcgccgaagaggagtccgcactccgcctccgcgaggacgcgcttaccgagcgagagcgagctctcgaagaggccgaggccgaggcgcaacggttggcggacagcctgtccctccgtgaggcagcgctgacggagcaggcgcgccgcaacttggaatccgtccgcgccgagagagccacgctggagcagcgggctgccgacctcgaggcgcgggaaaaggagctggacgcgagggcacgcatcggcggggcggctgcgggcgaaagcgacttagccgcccgcctcgcagatgccgaacacatcgtcaccgacatgcagcgcgcgctagattcatccgccggggaagccgaggccctccgcttggcgggcgagatagggcccggcatgctttgggatgcagtctcccgtctggatcgcgccggtcggcaggcgggcctctggaagggccaaacgatgaagtactccaccaacttgggaggcctcgctcagcacctctcaaagatggccggagctctccagcagctccccgaggagctcgagaagatcatcaagtcatcctcgagggacctcgctcaaggagcggtggagcttgtcctggccagctaccaggccagggaccccaacttctctccgtggatggcgctggatgagttccctcccgggaccgaggacgacgcgcgcgtgcgggtcagggatgccgccgaccacatcgtccacagtttcgaggggtcggcccctcagctcgcgttcgcccccaactccgacgaggagggcgacgccagcggtgctgacgaccgtgacgacgaggccggcgacccgggcgcatcggattga

SEQ ID NO: 81050 - DNA, 4946 bp, Oryza sativa
  Clone ID: PAT_MRT4530_80615C.1
atgtcgaacaaacaaatactccaagtttaccatggaccaggaaacgtccgttatgggccaactggggtagatctgtcagattttattgtatcagaaaggggaattgatagaccggctgagaggagtgtaccttctataaaaggatggttaatgaggggcttgagagttgatccacagacaagtgacataacaatcaatgttatagtaagtcgggcaactgagggtttttattgggaactaatgccagttcaaaactctcgagtgtggatatggtatttggaaaatgcattgcaacgcgagtggcctctagctttggttccgtttgttcacccgaaggatccaggtgtgcagatgaacatggatgatggcgagggaccaagtgctgaagtaaatgagacttctgtagaggaggtcaacgcacgagaggacgggggcgtagtagctccagtgggcattcaaccaagtggagtggccgacgagggggagactgtcggtgccattgtggatgaaatggagagggaggattctgacaacgagcgtgtagaggaaggtgattcgtcagatgatgagacggatattaatccagcagaatgggctagtgaggatttttctgggctgatcgtctctgaagaggatagtgtgagatgggagtacaaagaaaatgaggttattcagggagcgatttatagtagagcagaagatatgaaggaggcggtaaaacattttgcagtgtcacttcatagagagttttgggttgccaagtcgaaccggtcgcaatatgaagttcggtgtgttaaggaaaaagatggttatccctggagagtgcacgcgtataaggggaaatggaaggattattggacagtgtcagtcgttaccaagcatacatgttttctacctggtgttcagaaataccacaggaacattacatgtgcatttgttgcatctgagatgtatgcgcatgtaatcgataatctcacatatgaaccaaggtcaataatccaacacatcgaagagacatacaagtatactattagctatgccaagtattggaacttatgaagcctcgtatgacaatttgccacgcctgcttggtgttatcgaggaaagaaaccctgggagctcttacgaagtgaagaaattcccctcaattgaacatcctggcaagagtgtgctgcaaagggcgttcttagctctacatgcatgcaagatgacattcgtgaactgtcgtcctgttctctgcattgatgggacattcttgacaggaaagtatcggggccagatactaacagcaataggggtagatgggaacaatcaggtattgcccttggcatttgcttttgttgagagtgagaataccgacagctggtactggttcctgaaattggttaaaacaaaagttgttggtatgaggccaaatgtgtgcctgatacatgataggcacgctggcattctgcgagcgatagaagagttgcagtttgggagtatggaacgaggataccccagtgtttgggaagatgtacagagtaggtggtgcatgcgtcatatgggagctaatttcttcaagcaattcaagaacaaggagctcatgaacatgttcaagaggctgtgcaatcagaaccaggagaaaaaattcaatgagctttggaagagattagatgagttgatagccaaatgcagtgatcagcgtgcagcggctccatcgaccgccgttgctgaccctcctcaagctcttggacctctcccaacggatagtccaacattggttagaagaactggattggagattgggaaattttctcagtggattctgcatgaaccaaaagagaaatgggccaaggcgtatgacacaggtggtgctaaatatggaataatgacaacaaatttggcagaagtttacaactgggtgatgcgcggtgtccgtggactgccactagttggcataatggagttcattttacatgggacattgtcgtattttagggatcggttccaggcagttcttccctctatgtcgaacaacagcattttgtttggaactttcatgcagaaaaagctagaggacttgcgtaaaaaggccatgaaacatcgagctctagtgcaaggtacccaacagcacaggtttaagatactatgtcaagataaggcaggcaggggtatctaccgcaagacagtgaagcaggagtgtgttctcaaagccgacggcacatgtcattgctcttgtgcaaagccgaagctgctccacaggccatgtatccatgtcattgctgccgcagcggagtgtggcataccagatgcagtatatgtgtcacagtacttcagtaagcaagcaatatatcatacatggagcggcgagatttatgggttcggcatagctggggagttcacagagactaacaatgaagtactcaatattcctgacccatcgaagctccgaggcaaggctggaaggaggaggactcgtcgcatccgcaacgatatggactagtgggaggctggcagggtgaagcgttgcagcaaatgcgatgaacatgggcacacctacaagcattgtcctaaagacaaggagaaaccaagtgcggcggaggcaggactatcaggatcagcagcagatggagctcgccctgatacacctcagttgttggacccggcgatagatcaccgacaccggtctcaccttactgcagtgcagggggctcagcttgggacgttccgggcacggacgtgcggtgagctactcacggttcacgactcctttgtcgagaggctgcatgaggtcggcctcctaccgatgtgtcggctggtggaggctgccgccggcgacgcggacccggccagacgatggactgtggacaggtccctcctagcagctttggtcgaccgatggaggccaaagacgcacacttttcacttgccgtgcggtgaggtagcccctaccctacaggacgtatcgtacttgttggggctaccactcgcgagagacactgttgggccagtgaccacggctgtggactggcaggatgatatgacggcacgtttcgcactagtacagcgcgcaccgcacctcccgctcgagccgttggcacaccaccgcaacaccggacctacgaagaggtggctgcttcagttcaccgtcgagcagctacaggcggaggccgacgagtactcctacagccactgtttggaggcgtacttgctctagctttttggctgggtgatgttctgtggcggtcacgggcacgcggtcgacaagggactcgtgcactacgccaggagcatcgccgacgctacggtaggcgaggtgcctcagtggagctggggttccgcgttgttggcggctctgtaccgtgcactttgtgaggcttgcacgaagacggatcccagcgcgacctttggtgggtgccctctctttctttctatctgggcagctgagaggattgtgatcggccgccctgaggtggaccagcacgcgtacgagtcactgtacgaggagcgaccagaggtcgactaccctacgatgggtactctgtggtgccgtcgtcagcgccgatgggctcacgttcaggttaggcggtcgtatcctgagtttgttatggagttcgaccgccttctgccgactgacgtcgtgtgggagccctacagtgccgcggctacccaagctcgtgcgccattgggtctatccacactctgcaccagggacaaggcgtactggatgactacggttccgatggtcttcgacatctgcgttgagcctcacgcccctttccgcgtgatgcgacagttcggcttccgtcagccctttccagtaccgtttccgaccaccgtcccagctgctgttcaccggtactcgcgcaagggtcagcagtcagctggcgactggcccgccaagttggcgacttttattgaggactggttgctcgcaaccgaggaggtcgtggaccatgagggagagccacacactgaggaggcgtaccaggcctacctacgctggtaccagccacgcacccgtactagggtcaccttcgctcccttggagcagcagccccacgttgcgagcactagagacctctacgccaggaaccgcgaccaggacttcgctcgtgctgtcaacgacatcaaccgggtcgtcgttgacggttcaacgatgatccaacgtttaggcgcggggattccggtacccgtagaggagcacctgacgacgtacacgcggatggtggagtcaatgcgctcgattctccgagtgctcacctgtcgtgcagacgacgttgctcgggcagacgcagctatacagcggccacccataccgactggtccccatctagctgcgcatgttcctaggccgactccccttccgcacggaggtcccattgtcgatgtgtaggtttcgcccagttcgctatgacgcaggccgcccacttctcccaggctgcagggtcagcgtctcaggaagctgcgtcgacctcgcactcagcgcaattctggcagtacaccgagacttcgtcacaggcagccggcacgtcgagtcaaggtccaccactggaccgtgctgggacctcgtcggaccgcttgctgccttccaccttgctcttcgacatcactgacttcgacttcgcttcaggctcgacagaggacgtcatcggcccctcacagctgggaggtgcacccccagtgcagacgcaggacaggcgcaggccactcctccgcgggacactcgtgctacccatgctgtgccaccggatcgtttcacctactcctaggaccacgtgcgagcacaggcccggaggaccaagcgtgtaatgtatgcttgtgtaatgactacgttgttgttatatgtgcacgataactttcgcgcatgcacgatacctttcggcgcatgcacgactactttctgccgcactgatgcagcctcctttattcgcgtgcgatacgagtatttgcccgccatttgg

SEQ ID NO: 81051 - DNA, 4155 bp, Oryza sativa
  Clone ID: PAT_MRT4530_80616C.1
atgtcgaacaaacaaatattccaagtttaccatggaccaggaaacgtccgttacgggccaactggggtagatctgtcagattttattgtatcagaaaggggaattgatagaccggctgagaggagtgtaccttctataaaaggatggttaatgaagggcttgagagttgatccacagacaagtgacataacaatcaatgttatagtaagtcgggcaactgagggtttttattgggaactaatgccagttcaaaactctcgagtgtggagatggtatttggaaaatgcattgcaacgcgggtggcctctagctttggttccgtttgttcacccgaaggatccaggtgtgcagatgaacatggatgatggcgagggaccaagtgctgaagtaaacgagacttctgtggaggaggtcaacgcacgagaggacgggggcgtagtagctccagttggtattcaaccaggtggagtggccgacgagggggagactgtcggtgccattgtggatgaaatagagagggagaattctgacaacgagcgtgtagaggaaggtgattcgttagatgatgagacggatattaatccagcagaatgggctagtgaggatttttctgggctgatcgtctctgaagaggatagtgtgagatgggagtacaaagaaaatgaggttattcagggagcgatttatagtagagcagaagatatgaaggaggcggtaaaacattttgcagtgtcacttcatagagagttttgggttgccaagtcgaaccggtcgcaatatgaagttcggaacattacttgtgcatttgttgcatctgagatgtatgcgcatgtcatcgataatctcacatatgaaccaaggtcaataatccgacacatcgaagagacatacaagtatactattagctatgccaaggcctggagggccaaacagaaaataatagagatgagatttggaacttacgaagcctcgtatgacaatttgccacgcctgcttggtgttatcgaggaaagaaaccctgggagctcttacgaagtgaagaaattcccctcaattgaatatcctagcaagagtgtgctgcaaagggcgttcttagctctacatgtatgcaagatggcattcgtgaactgtcgtcctgttctctgtattgatgggacattcttgacaggaaagtatcggggccagatactaacagcaataggggtagatgggaacaatcaggtattgcccttggcatttgcttttgttgagagtgagaataccgacagctggtactggttcctgaaattggttaaaacaaaagttgttggtatgaggccaaatgtgtgcctgatacatgataggcacgctggcattctgcgagtgatagaagagttgcagtttgggagtatggaacgaggataccccggtgtttgggaagatgtacagagtaggtggtgcatgcgtcatatgggagctaatttcttcaagcaattcaagaacaaggagctcatgaacatgttcaagaggctgtgcaatcagaaccaggagaaaaaattcaatgagctttggaagagattagatgagttgacagccaaatgcagtgatcagcgtgcagcagctccatcgaccgccgttgctgaccctcctcaagctcttggacctctcccaacggatagtccaacattggttagaagaactggattggagattcggaaattttctcagtggattctgcatgaaccaaaagagaaatgggccaaggcgtatgacacaggtggtgctagatatggaataatgacaacaaatttggcagaagtttacaactgggtgatgcgcggtgtccgtggactgccactagttggcatagtggagttcattttacatgggacatgcaggtattttagggatcggttccaggcagttcttccctctatgccgaacaacagcattttgtttggagctttcatgcagaaaaagctagaggagttgcgtaaaaaggccatgaaacatcgagctctagtgcaaggtacccaacagcacaggccatgcacccatgtcattgctgccgcagcggagtgtggcataccagatgcagtatatgtgtcacagtacttcagtaagcaagcaatatatcatacatggagcggcgagatttatgggttcggcatagctggggagttcacagagactaacgatgaagtactcaatattcctgacccatcgaagctccgaggcaaggctggaaggaggaggactcgtcgcatccgcaacgatatggacgagtcggaggctggcatggtgaagcgttgcagcaaatgcgatgaacatgggcacacctacaagcattgtcctaaagacaaggagaaaccaagtgcgacggaggcaggactatcaggatcagcagcagatggagctcgccctacggagatggcacgtcaggatacacctcagttgttggacccggcgatagatcaccgacaccggtctcaccttactacggtgcagggggctcagcttgggacgttccgggcacggacgtgcggtgagctactcacggttcatgactcctttgtcgagaggctacgtgaggccggcctcctaccgatgcgtcggctggtggaggctgcggccggcgacgcggacccagccagacgatggactgtggacaggtccctcctagcagctttggtcgatcgatggaggccaaagacgcacacttttcacttgccgtgcgctgagaggattgcgatcggccgccctgaggtggaccagcacgcgtacgaggagtcactgtacgaggagcgaccagaggtcgactatcctacgatgggtactctgtggtgccgtcgtcagcgccgatgggctcacgtccaggttaggcggtcgtatcctgagtttgttatggagttcgaccgccttctgccgactgacgtcgtgtgggagccctacagtgccgcggctacccaggctcatgcgccgttgggtctgtccacactctgcaccagggaccaggcgtactggatgactacagttccgatggtcttcgacatctgcgttgagcctcacgcccctttccgcgtaatgcggcagttcggcttccgtcagccctttccagtaccgtttccgaccaccgtcccagctgctgttcaccggtactcgcgcaagggtcagcagtcagctggcgactggcccgccaagttggcgacttttgttgaggactggttgctcgcaaccgaggaggtcatggaccacgagggagagccacacactgaggagtcgtaccaggcctacctacgctggtaccagccacgcacccgtactagggtcaccttcgctcccttggagcagcagccccacgttgcgagcactagagacctctatgccaggcaccgcgaccaggacttcgctcgtgctgtcgacgacatcaaccgggtcgtcgttgacggttcaacgacgatccaacgtttaggcgcggggattccggtacccgtagaggagcacctgacgacgtacacgcggatggtggagtcgatgcgctcgattctccgagtgctcacctgtcgtgcagacgacattgctcgggcagacgtagctgtacagcggccacccgtaccgactagtccccatccagctgctcacgttcctaggccgactccccctccgcacggagggtttcgtgcaccgttcaacaccccgccttcctcggctaggccttctgttgtgccccccacaggtttcgcccagttcgctatgacgcaggctgcccacttctcccaggctgcagggtcagcgtctcaggcagctgtgtcgacctcgcactcagcgcagttctggcagtacaccgggacttcgtcacaggcagccggcacgtcgagtcagggtccaccactggaccatgctgggacctcgtcggaccgcttgctgccttccaccttgctcttcgacatcactgacttcgacttcgcttcaggctcgacagaggacatcatcggcccctcacagctgggaggcgcaccgccggtgcagacgcaggaccaggcgcaggccactcctccgcgggacactcgtgctacccgtgctatgccaccggatcgtttcacctactcccaggaccacgtgcgagcacaggcccggaggaccaagcgtggtcgcggcgcggggcagggccagtag

SEQ ID NO: 81052 - DNA, 4371 bp, Oryza sativa
  Clone ID: PAT_MRT4530_80617C.1
atgtcgaacaaacaaatattccaagtttaccatggaccaggaaacgtccgttacgggccaactggggtagatctgtcagattttattgtatcagaaaggggaattgagagaccggctgagaggagtgtaccttctataaaaggatggttaatgaggggcttgagagttgatccacagacaagtgacataacaatcaatgttatagtaagtcgggcaactgagagtttttattgggaactaatgccagttcaaaactctcgagtgtggagatggtatttggaaaatacattgcaacgtgggtggcctctagctttggttccgtttgttcacccgaaggatccaggtgtgcagacgaacatggatgatggcgagggaccaagtgctgaagtaaacgagacttctgtggaggaggtcaacgcacgagaggatgggggtgtagtagctccagtgggcattcaaccaggtggagtggctgacgagggggagactgtcggtgccattgtggatgaaatggagagggaggattctgacaacgagcgtgtagaggaaggtgattcgtcagatgatgagacggatattaatccagcagaatgggctagtgaggatttttctgggctgatcgtctctgaagaggatagtgtgagatgggagtacaaagaaaatgaggttattcagggagcgatttatagtagagcagaagatatgaaggaggcggtaaaacattttgcagtgtcacttcatagagagttttgggttgccaagtcgaaccggccgcaatatgaagttcggtgtgttaaggaaaaagatggttgtccctggagagtgcacgcgtataaggggaaatggaaggattattggacagtgtcagttgttaccaagcatacatgttttctacctggtgttcagaaataccacaggaacattacatgtgcatttgttgcatctgagatgtatgtgcatgtcatcgataatctcacatatgaaccaagctatgccaaggcctggagggccaaacagaaaataatagagatgagatttggaacttacgaagcctcgtatgacaatttgccacgcctgcttggtgttatcgaggaaagaaaccctgggagctcttacgaagtgaagaaattcccctcaattgaacatcctggcaagagtgtgctgcaaagggcgttcttagctctacatgcatgcaagatggcattcgtgaactgtcgtcctgttctctgcattgatgggacattcttgacaggaaagtatcggggccagatactaacagcaataggggtagatgggaacaaccaggtattgcccttagcatttgcttttgttgagagtgagaataccgacagctggtactggttcctgaaattggttaaaacaaaagttgttggtatgaggccaaatgtatgcctgatacatgataggcacgctggcattctgcgagcgataggagagttgcagtttgggagtatggaacgaggataccccggtgtttgggaagatgtacagagtaggtggtgcatgcgtcatatgggagctaatttcttcaagcaattcaagaacaaggagctcatgaacatgttcaagaggctgtgcaatcagaaccaggagaaaaaattcaatgagttttggaagagattagatgagttgacagccaaatgcagtgatcagcgtgcagcggctccatcgaccgccgttgctgaccctcctcaagctcttggacctctcccaacggatagtccaacattggttagaagaactagattagagattcggaaattttctcagtggattctgcatgaaccaaaagagaaatgggccaaggcgtatgacacaggtggtgctagatatggaataatgacaacaaatttggcagaagtttacaactgggtgatgcgcggtgtccgtggactgccactagttggcatagtggagttcattttacatgggacatgcaggtattttagggatcggttccaggcagttcttccctctatgccgaacaacagcattttgtttggagctttcatgcagaaaaagctagaggagttgcgtaaaaaggccatgaaacatcgagctctagtgcaaggtacccaacagcacaggtttgagatactatgtcaagataaggcaggcaggggtatctaccgcaagagagtgaagcaggagtgtgttctcaaagacgacggcacatgtcattgctcttgtgcaaagccgaagctgctccacaggccatgcacccatgtcattgctgccgcagtggagtgtggcataccacatacagtatatgtgtcacagtacttcaataagcaagcaatatatcatacatggagcggcgagatttatgggttcggcatagctggggagttcacagagactaacgatgaagtactcaatattcctgacccatcgaagctccgaggcaaggctggaaggaggaggactcgtcgcatccgcaacgatatggacgagtcggaggctggcagggtgaagcgttgcagcaaatgcgatgaacatgggcacacctacaagcattgtcctaaagacaaggagaaaccaagtgcggcagaggcaggactatcaggatcagcagcagatggagctcgccctacggagatggcacgtcaggatacacctcagttgttggacccagcgatagattaccgacaccggtctcaccttactgcagtgcagggggctcagcttgggacgttccgggcacggacgtgcggtgagctactcacggttcacgactcctttgtcgagaggctacgtgaggccggcctcctaccgatgtgtcggctggttgagcagctacaggcggaggccgacgagtactcgtacagccgatgtttggaggcgtacttgctctggctttttggctgggtgatgttctgtggcggtcacgggcacgcggtcgacaagggactcgtgcactacgccaggagcatcgccgacgccgcggtaggcgaggtgcctcagtggagctggggttccgcgttgttggcggctctgtaccgtgcactttgtgagtcttgcacgaagacggatcccagcgcgacctttggtgggtgccctctctttctttctatctgggcaactgagaggattgcgatcggccgccctgaggtggaccagcacgcgtacgaggagtcactgtacgaggagcgaccagaggtcgactaccctacgatgggtactctgtggtgccgtcgtcagcgccgatgggctcacgtccaggttaggcggtcgtatcctgagtttgttatggagttcgaccgccttctgacgactgacgtcgtgtgggagccctacagtgccgcggctacccaggctcgtgcgccgttgggtctgtccacactctgcaccagggaccaggcgtactggatgactacggttccgatggtcttcgacatctgcgttgagcctcacgcccctttccgcgtgatgcggttgttcggcttccgtcagccctttccagtaccgtttccgaccaccgtcccagctgctgttcaccggtactcgcgcaagggtcagcactcagctggcgactggcccgccaagttggcgacttttgttgaggactggttgctcgcaaccgaggaggtcgtggaccacgagggagagccacacactgaggagtcgtaccaggcctacctacgctggtaccagccacgcacccgtactagggtcaccttcgctcccttggagcagcagccccacgttgcgagcactagagacctctacgccaggcaccgcgaccaggacttcgctcgtgttgtcgacgacatcaaccgggtcgtcgttgacggttcaacgacgatccaacgtttagacgcggggattccgacgacgttgctcgggcagacgcagctgtacagcggccacccgtaccgactggtccccgtccagctgcgcacgttcctaggccgactccccctccgcacggcgggtttcgtgcaccgttcagcaccccgccttcctcggctaggccttctgttgtgccccccacaggccacccacttctcccaggctgcagggtcagcgtcacaggcagccggcacgtcgagtcagggtccaccactggaccatgctgggacctcgtcggaccccttcctgtcttccaccgtgctcttcgacatcactgacttcgacttcgcttcaggctcgacagaggacgtcatcggcccctcacagctgggaggcgcaccgccggtgcagacgcaggaccaggcgcaggccactcctccgcgggacactcgtgctacccgtgctgtgccaccggatcgtttcaccttctcccaggaccacgtgcgagcacaggcccggaggaccaagcgtggtcgcggcgcggggcagggccagtag

SEQ ID NO: 81053 - DNA, 3735 bp, Oryza sativa
  Clone ID: PAT_MRT4530_80618C.1
atgtcgaacaaacaaatattccaagtttaccatggcccaggaaacgtccgttacgggccaactggggtagatctgtcagattttattgtatcagaaaggggaattgatagactggctgagaggagtgtaccttctataaaaggatggttaatgaggggcttgagagttgatccccagataagtgacataacaatcaatgttataatgaacatggatgatggcgagggaccaagtgctgaagtaaatgagacttctgtggaggaggtcaacgcacgagaggatgggggtgtagtagctccagtgggcattcaaccaggtggagtggccaacgagggggagactgtcggtgccattgtggatgaaatggagagggaggattctgacaatgagcgtgtagaggaaggtgattcgtcagatgatgagacggatattaatccagcagaatgggctagtgaggatttttctgcgctggtcgtttcagaagaggatagtgtgagatgggagtacaatgaaaatgcggttattcaaggagcgatttatagtagagcagaagatatgaaggaggtagtaaaacattttgcagtgtcacttcatagagagttttgggttgccaagtccaaccggtcccaatatgaagttcggtgtgttaaggaaaaagatggttgtccctggaaagtgcacgcgtataaggggaaatggaaagattattggacagtttcagtcgttaccaagcatacatgttatctacctggtgttcagaaataccacaggaatattacatgtgcatttgttgcatctgagatgtatgcgcatgtcatcgataatctcacatatgaactaaggaaagaatcggggctagatactaacaacaataggggtgggaacaaccaggtattgcccttggcatttgcttttgttgagagtgagaataccgacagctggtattggttcctgaaattggttaaaacaaaagttgttggtatgaggccaaatgtgtgcctgatacatgataggcacgctggcattctgcgagcgatagaagagttgcagtttgggagtatggaacgaggataccctggtgagtgggaagatgtacagagcaggtggtgcatgcgtcatatgggagctaatttcttcaagcaattcaagaacaaggagctcatgaacatgtttaagaggctatgcaatcagaaccaagagaaaaaattcaatgagctttggaagagattagatgagttgacagccaaatgcagtgatcagcgtgcagcagctccattgaccgccgatgctgaccctcctcaaactctggacctctcccaacggatagtccaacattggttagaagaactggattggagattcggaaattttctcagtggattctgcatgaaccaaaagagaaatgggccaaggcgtatgacacagaaaaagctagaggagttgcgtaaaaaggccatgaaacatcgagctctagtgcaaggtacccaacagcacaggtttgagatactatgtcaagataaggcaggcaggggtatctaccgcaagagagtgaagcaggagtgtgttctcaaagccgacggcacatgtcattgctcttgtgcaaagccgaagctgctccacaggccatgcacccatgtcattgctgccgtagcggagtgtggcataccagatgcagtatatgtttcacagtacttcagtaagcaagcaatatatcatacatggagcggcgagatttatgggttcggcatagctggggagttcatagagactaacgatgaaggactcaatattcctgacccatcgcagctccgaggcaaggctggaaggaggaagactcatcgcatccgcaacgatatggacgagtcggaggctggcagggtgaagcgttgcagcaaatgcgatgaacgtgggcacacctacaagcattgtcctaaagataaggagaaaccaagtgcggcggaggcaggactatcaggatcaacaacagatggagctcgccctacggatggcacgtcaggatacaactcagttgttggacccggtgatagatcaccaacaccggtctcaccttactgcagtgcagggggctcagcttgggacgttccgggaacggacgtgcggctgcgtgaggccggcctcctaccgatgtgtcggctggtggaggttgccgccggcgacgctgacccggccagacgatggactgtggatcggtccctcctagcagctttggtcgaccgatggaggccagagacgcacacttttcacttgccgtgcggtgaggtcgagcagctacaggcggaggccgacgagtacacctacagccgttgtttggaggtgtacttgctctggctttttggctgggtgatgttctgtggcggtcacgggcacgcggtcgacaagggactcgtgcactacgccaggagcatcgccgatgccgcggtaggcgaggtgcctcagtggagctggggttccgcgttgttggcggctctgtaccgtggcctttgtgaggcttgcacgaagacggatcccagcgtgacctttggtgggtgccctctctttctttctatctgggcagctgagaggattgcgatcggccgccctgaggtggaccagcacgcgtacgaggagtcactgtacgcagagcgaccagaggtcgactaccctacgatgtgtactctgtggtgccatcgtcagcgccgatgggctcacgtccaggttaggtggtcgtatcctgagtttgttatggagttcgaccgccttctgccgactgacgtcctgtgggagccctacagtgccgcggctacccaggctcgggcgccgttgggtctgtccacactctgcaccagggaccaggcattaattcgcagttactcgcgcaagggtcagcagtcagctggcgactggcccgccaagttggcgacttttgttgaggactggttgctcgcaaccgaggaggtcgtggaccacgagggagagccacacactgaggaggcggtcaccttcgcgaagtccttggagaagcagccccacgttgcgagcactagagacctctacgccaggcaccgcgaccaggacttcgctcgtgctgttgacgacatcaaccgggtcatcgttgacggttcaacgatgatccaacgtttaggcgcggggattccgacgacgttgctcgggcagacgcagctgtacagcggccacccgtaccaactggtccccgtccagctgcgcacgttcctaggccgactccccctccgcacggagggtttcgtgcaccgttcagcaccccgccttcctcggctaggccttctgttgtgccccccacaggccgcccacttctcccaggttgcagggtcagcgtctcaggcagctgcgtcgacctcacactcagcgcagttctggcagtacaccgggacttcgtcacacgcagccggcacgtcgagtcagggtccaccactggaccatgctgggacctcgttggatcgcttgctgccttccaccttgctcttcgatatcactgacttcgacttcgcttcaggcttgacagaggatgtcatcggcccctcacagctgggaggcgcaccgccggtgcagacgcaggaccaggcgctggccactccaccgccagacactcgtgctacccgtgttgtgccaccggatcgtttcacctactcccatgaccacgtgcgagcacaggcctggaggaccaagcgtggtcgcggcgcggggcagggccagtag

SEQ ID NO: 81054 - DNA, 978 bp, Oryza sativa
  Clone ID: PAT_MRT4530_80619C.1
atgccgccaccgccgccgatgatgcccaccggcggctaccccggccaccgcggctgcggcggcgaccgctgcggctccgggcgcgacgcctggcccctccacaacgtccggcaccagggcgtcttctgccgcctctgctcctcctgcgtcctcctctaccaccccgccgccttctgctccgcctgcctcctcctcctccctcccgccgccgcccccgtcgccgccccgcccggccccgtctccgcctgctcctcctgcggcctcttcgtcgcccaccactcctgcgtcccggaccccgtctccttcgtctgccccacctgcgccgacgccgccgtgggcagggtctactcctacacccccgccgccgccgccggccgccgccgcacgatggacgagcgcgccgcgcgcgtcctcctcgtggcggcgcgcctggcgcacgagtccatctcgcgcgccgcggcggcggcgcgcgaggaggcggaccgcgccgcccgggaggcggccgtggcgcggaagcacgcgcgcgagctgctcgacgccgcgtgccgcgcggcggagccggaggccttggaagccaagaagaaggccgaggcccccgttgcgcccgcggccgcgccgccaccgccgccgccgcagcccaagaagaaggcacccccgaagagcagcgaggcgagcagagacagggacaacaagccgctcaagctcaccgccacgcagcagccggcgctggcgttcgccgcggccgccgctgccgcagccagctcgatgccattgtcaatgccgtcacccatggaggtggacgagaagccggtgatagaggagttgcaaggttcaggagacgggtcgttgatatatgatcgtggctcgctgttcgggaccttgcaacgatttgcaagtttgagcagtccctgtgtctgtgatgttggcattggtcttggttggttggatcgtccaactagttcagaacagatcttctaa

SEQ ID NO: 81055 - DNA, 216 bp, Oryza sativa
  Clone ID: PAT_MRT4530_8061C.1
atgccggagggtctcagtgatgacgatggcgcggtggatggcccggccatgcaccgtggcggccggaacgcagagatggtcttgacagtagcgcagagagcacgctccggggtcacggaagatcgagatgatggcgagctctgcttgacgacttatggcaactcctccttcttggcggccgacgatgaggaggatggcgaggaggatgatatgtag

SEQ ID NO: 81056 - DNA, 405 bp, Oryza sativa
  unsure (1)..(405): unsure at all n locations
  Clone ID: PAT_MRT4530_80620C.1
agaggtatgggtataggtaaaatgcacacttctaccaggtatgtgagactctttctaagtaagagagagctcgttctagctttgtcaatcgtggaatgagcagctccatccttactgtcctggtgaattaattgggtaattaatgagcacactgactcacaaagtctatagctagtctctacgaatatctcgatgcaactattaccaatagttggaggtaacttcgtgcttgaatgtattagtggaagttagtagcttgaagaatggaaagagtcttttcgtccctctcaaagagggaggggagtagttcacagctactgtctcaaataatctagtagggaatggagtgaacagcagggagtttagtgggttgntnnnggtgtggggggggggggtggggggggg

SEQ ID NO: 81057 - DNA, 4470 bp, Oryza sativa
  Clone ID: PAT_MRT4530_80621C.1
atgccagttcaaaactctcgagtgtggagatggtatttggaaaatgcattgcaacgcgggtggcctctagctttggttccgtttgttcacccgaaggatccaggtgtgcagatgaacatggatgatggcgaaggaccaagagctgaagtaaacgagacttctgtggaggaggtcaacgcacgagaggacgggggcgtagtagctccagtgggcattcaaccaggtggagtggccgacgagggggagactgttggtgccattgtggatgaaatggagagggaggattctgacaacgagcgtgtagaggaaggtgattcgtcagatgatgagacggatattaatccagcagaatgggctagtaaggatttttctgggctgatcgtctctgaagaggatagtgtgagatgggagtacaaagaaaatgaggttattcagggagcgatttatagtagagcagaagatatgaatgaggcggtaaaacattttgcagtgtcacttcatagagagttttgggttgccaagtcgaaccggtcgcaatatgaagttcggtgtgttaaggaaaaagatggttgtccctggagagtgcacgcgtataaggggaaatggaaggattattggacagtgtcagtcgttaccaagcatacatgttttctacctggtgttcagaaataccacaggaacattacttgtgcatttgttgcatctgagatgtatgcgcatgtcatcgataatctcacatatgaagcaaggtcaataatccgacacatcgaagagacatacaagtatactattagctatgccaaggcctggagggccaaacagaaaataatagagatgagatttggaacttacgaagcctcgtataacaatttgccacgcctgcttggtgttatcgaggaaagaaaccctgggagctcttacgaagtgaagaaattcccctcaattgaacatcctagcaagagtgtgctgcaaagggcgttcttagctctacatgcatgcaagatggcattcgtgaactgtcgtcctgttctctgcattgatgggacattcttgacaggaaagtatcggggccagatactaacagcaataggggtagatgggaacaatcagatattgcccttggcatttgcttttgttgagagtgagaataccgacagctggtactggttcctgaaattggttaaaacaaaagttgttggtatgaggccaaatgtgtgcctgatacatgataggcacgctggcattctgcgagcgatagaagagttgcagtttgggagtatggaacgaggataccccggtgtttgggaagatgtacagagtaggtggtgcatgcgtcatatgggagcgaatttcttcaagcaattcaagaacaaggagctcaagaacatgttcaagaggctgtgcaatcagaaccaggagaaaaaattcaatgagctttggaagagattagatgagttgacagccaaatgtagtgatcagcgtgcagcggctccatcgaccgccgttgctgaccctcctcaagctcttggacctctcccaacggatagtccaacattggttagaagaactggattggagattcggaaattttctcagtggattctgcatgaaccaaaagagaaatgggccaaggcgtatgacacaggtggtgctagatatggaataatgacaacaaatttggcagaagtttacaactgggtgatgcgcggtgtccgtggactgccactagttggcatagtggagttcattttacatgggacatgcaggtattttagggatcggttccaggcagttcttccctctatgccgaacaacagcattttgtttggagctttcatgcagaaaaagctagaggagttgcgtaaaaaggccatgaaacatcgagctgtagtgcaaggtacccaacagcacaggtttgagatactatgtcaagataaggcaggcaggggtatctaccgcaagagagtgaagcaggagtgtgttctcaaagccgacggcacatgtcattgctcttgtgcaaagccgaagctgctccacaggccatgcacccatgtcattgctgccgcagcggagtgtggcataccagatgcagtatatatgtcacagtacttcagtaagcaagcaatatatcatacatggagcggcaagatttatgggttcggcatagctggggagttcacagagactaacgatgaagtactcaatattcctgacccatcgaagctccgaggcaaggctggaaggaggaggactcgtcgcatccacaatgatatggacgagacggaggctagcaaggtgaagcgttgcagcaaatgcgatgaacatgggcacacctacaagcattgtcctaaagacaaggagaaaccaagtgcggcggaggcaggactatcaggatcagcagcagatggagctcgccctacggagatggcatgtcaggatacacctcagttgttggacccggcgatagatcaccgacaccggtctcaccttactgcggtgcagggggctcagcttgggacgttccgggcacggacgtgtggtgagctactcacggttcacgactcctttgtcgagaggctacgtgaggccggcctcctaccgatgtgtcggctggtggaggctgcggccggcgacgcggacccggccagacaatggactgtggacaggtccctcctagcagctttggtcgatcgatggaggccagagacgcacacttttcacttgccgtgcggtgaggttgagcagctacaggcggaggccgacgagtactcctacagccgatgtttggaggcgtacttgctctggctttttggctgggtgatgttctgtggcggtcacgggcacgcggtcgacaagggactcgtgcactacgccaggagcatcgccgacgccgcggtaggcgaggtgactcagtggagctggggttccgcattgttggcggctctgtaccgtgcactttgtgagtcttgcacgaagacggatcccagcgcgacctttggtgggtgccctctctttctttctatctgggcagctgagaggattgcgatcggccgccctgaggtggaccagcacgcgtacgaggagtcactgtacgaggagcgaccagaggtcgactaccctacgatgggtactctgtggtgccgtcgtcagcgccgatgggctcacgtccaagttaggcggtcgtatcctgagtttgttatggagttcgaccgccttctgccgactgacgtcgtgtgggagccctacagtgccgcggctacccaggctcgtgcgccgttgggtctgtccacactctgcaccagggaccaagcgtactggatgactacggttccgatggtcttcgacatctgcgttgagcctcacgcccctttccgcgtgatgcggcagttcggcttccgtcagccctttccagtactgtttccgaccatcgtcccagctgctgttcaccggtactcgcgcaagggtcagcagtcagctggtgactggcccgccaagttggcaacttttgttgaggactggttgctcgcaactgaggaggtcgtggaccacgagggagagccacacactgaggagtcgtaccaggcctacctacgctggtaccagccacgcacccgtactagggtcaccttcgctcccttggagcagcagccccacgttgcgagcactagagacctctatgccaggcaccgcgaccaggacttcgctcgtgctgtcgacgacatcaaccgggtcgtcgttgacggttcaacgacgatccaacgtttaggcgcggggattccggtacccgtagaggagcacctgacgacgtacacgcggatggtggagtcgatgcgctcgattctccgagtgctcacctgtcgtgcagacgacattgctcgggcagacgcagctgtacagcggccacccgtaccgactggtccccgtccagctgcgcacgttcctaggccgactccccctccgcacagagggtttcgtgcaccgttcagcaccccgccttcctcggctaggccttctgttgtgccccccacaggtttcgcccagtttgctatgacgaaggccgcccacttctcccaggctgcagggtcagcgtctcaggcagctgtgtcaacctcgcactcagcgcagttctggcagtacaccgggacttcgtcacaggcagccggcacgtcgagtcagggtccaccactggaccatgctgggacctcgtcggaccgcttgctgccttccaccttgctcttcgacatcactgattttgacttcgcttcaggctcgacagaggacgtcattggcccctcacagctgggaggcgcaccgccggtgcagacgcaggaccaggcgcaggccactcctccgcgggacactcgtgctacccgtgctgtgccaccggatcgtttcacctactcccaggaccacgtgcgagcacaggcccggaggaccaagcgtggtcgcagcgcggggcagggccagtag

SEQ ID NO: 81058 - DNA, 392 bp, Oryza sativa
  Clone ID: PAT_MRT4530_80622C.1
gcgccacgcgtacggtttgccattcccttggaggaggcactggatcagtaatgggctcactgctgatcttcgagatcaccagacggggcgggcgcaggatgatgctcacattttctgtcttcccttcaccaacagtctgagacacagacgatgaaccttacaatgcaactctctctgtgcatcactcggaggagaacgctgatgagtgcatggatctagacaatgaggcactctatgacatctgcttgcggaccatcaagctgaccactgatagctacggctacctgaaccacttgatcagtgctacaacgaagggagttacttgctgacttcgattgcctggtcaactgaactatgacctccgcaagctggccgcgaacttgatccctttc

SEQ ID NO: 81059 - DNA, 4584 bp, Oryza sativa
  Clone ID: PAT_MRT4530_80623C.1
atgtcaaacaaacaaatattccaagtttaccatggcccaggaaacgtccgttacgggccaactggggtagatctgtcaaattttattgtatcagaaaggggaattgatagaccggctgagaggagtgtaccttctataaaaggatggttaatgaggggcttgagagttgatccacagacaagtgacataacaatcaatgttatagtaagtcgggcaactgagggtttttattgggaactaatgccagttcaaaactctcgagtatggagatggtatgtggaaaatgcattgcaacgtgggtggcctctagctatggttccgtttgttcacccgaaggatccatgtgtacagatgaacatggatgatggcgagggaccaagtgctgaagtaaatgagacttctgtggaggaggtcaacgcacgagaggacgggggtgtagtagctccagtgggcattcaaccaggtggagtggccgacgagggggagactgtcggtgccattgtggatgaaatggagagggaggattctgacaacgagcgtgtagaggaaggtgattcgtcagatgatgagacggatattaatccagcagaatgggctagtgaggatttttctgggctggtcgtctctgaagaggatagtgtgagatgggagtacaaagaaaatgagattattcagggagcgatttatagtagagcagaagatatgaaggaggcggtaaaacattttgcagtgtcacttcatagagagttttgggttgccaagtccaaccggtgtgttaaggaaaaagatggttgtccctggagagtgcacgcgtataaggggaaatggaaggattattggacagtgtcagtcgttaccaagcatacatgttttctacctggtgttcagaaataccacaggaacattacatgtgcatttgttgcatctgagatgtatgcgcatgtcatcgataatctcacatatgaaccaaggtcaataatccgacacatcgaagagacatacaagtatactattagctatgccaaggcctggagggccaaacagaaaataatagagatgagatttggaacttacgaagcctcgtatgacaatttgccacgcctgcttggtgttatcgaggaaagaaaccctgggagctcttacaaagtgaagaaattcccctcaattgaacatcctggcaagagtgtgctgcaaagggcgttcttagctctacatgcatgcaagatggcattcgtgaactgtcgtcctgttctctgcattgatgggacattcatgacaggaaagtatcgaggccagatactaacagcaataggggtagatgggaacaatcaggtattgcccttggcatttgcttttgttgagagtgagaataccgacagctggtactggttcctgaaattggttaaaacaaaagttgttggtatgaggccaaatgtgtgcctgatacatcataggcacgctggcattctgcgagcgatagaagagttgcagtttgggagtatggaacgaggataccctggtgagtgggaagatgtacagagcaggtggtgcatgcgtcatatgggagctaatttcttcaagcaattcaagaacaaggagctcatgaacatgtttaagaggctatgcaatcagaaccaggagaaaaaattcaatgagctttggaaaagattagatgagttgatagccaaatgcagtgatcagcgtgcagcggctccatcgaccaccgatgctgaccctcctcaagctcttggacctctcccaacggatagtccaacattggttagaagaactggattggagattcggaaattttctcagtggattctgcatgaaccaaaagagaaatgggccaaggcgtatgacacaggtggtgctagatatgaaataatgacaacaaatttggcagaagtttacaactgggtgatgcgcggtgtccatggactgccactagttggcatagtggagtttattttacatgggacatgcaggtattttagggatcggttccaggcagttcttccctctatgccgaacaacagcattttgtttggaactttcatgcagaaaaagctagaggagttgcgtaaaaaggccatgaaacatcgagctctagtgcaaggtacccaacagcacaggtttgagatactatgtcaagataaggcaggcaggggtatctaccgcaagagagtgaagcaggagtgtgttctcaaagccgacggcacatgtcattgctcttatgcaaagccgaagctgctccacaggccatgcacccatgtcattgctgccgcagcggagtgtggcataccagatgcagtatatgtttcacagtacttcagtaagcaagcaatatatcatacatggagcggcgagatttatgggttcggcatagctggggagttcatagagactaacgatgaagtactcaatatttctgacccatcgaagctccgaggcaaggctggaaggaggaagactcgtcgcatccgcaacgatatggacgagtcggaggctggcagggtgaagcattgcagcaaatgcgatgaacgtgggcacacctacaagcattgtcctaaagacaaggagaaaccaagtgtggcagaggcaggactattaggatcagcagcagatggagctcgccctacggagatggcacgtcaggatacacctcaattgttggacccggcgatagatcaccgacaccagtctcaccttactgcggtgcagggggctcagcttgggacgttccgggcacggacgtgcggtgagctacttatggttcacgactcctttgtcgagaggctgcgtgaggccggcctcctaccgatgtgtcggctggtggaggctgccgccggcgatgcggacccggccagacgatggactgtggaccggtccctcctagcagctttggtcgaccgatggagaccagagacgcacacttttcacttgccgtgcggtgaggtagcccctatcctacaggacgtatcgtacttgttggggctaccactcgcgggagacgatgttgggccagtgaccacgggtgtggactggcaggacgatctgacagcacgtttcgcactagtacagcgcgcaccgcatctcccgctcgagccgttggcacaccaccgcaacaccggacctatgaagaggtggctgcttcagttctccattgagcagctacaggcggaggccgacgagtactcctacagccgctgtttggaggcgtacttgctctggctttttggctgggtgatgttctgtggcggtcacgggcacgcggtcgataagggactcgtgcactacgccaggagcatcgccgacgccgcggtaggcgaggtgcctcagtggagctggggttccgcgttgttggcggctctgtaccgtggcctttgtgaggcttgcacgaagacggatcccagcgcgacctttggtgggtgccctctctttctttctatctgggcagctgagaggattgcgatcggccgccctgaggtggaccagcacgcgtatgaggtgtcactgtacgcggagcgaccagagcgccgatgggctcacgtccaggttaggcggtcgtatcctgagtttgttatggagttcgaccgccttctgccgactgacgtcgtgtgggagccctacagtgccgcggctacccagccccaggcgccgttgggtctgtccacactctgcaccagggaccaggcgtactggatgactacggttccgatggtctacgacatctgcgttgagcctcacgcacctttccgcgtgatgcggcagttcggcttccgtcagccctttccagtaccgtttccgacgaccgtcccagctgctgttcaccgttactcacgcaagggtcagcagtcagctggcgactggcccgccaagttagcgacttttgttgaggactggttgctcgcaaccgaggaggtcgtggaccacgagggagagccacacactgaggaggcgtaccaggcctacctacgctggtaccagccacgcacccgtactagggtcaccttcgctcccttggagcagcagccccacgttgcgagcactagagacctctacgccaggcaccgcgaccaggacttcgctcgtgctgtcgacgacatcaaccgggtcgtcattgacggttcaacgacgatccaacgtttaggcgcggggattccgacaacgttactcgggcagacgcagctgtacagcggccacccgtaccgactggtccccgtccaactgcgcacgttcctaggccgactccccctccgcacggaggcagccggcacgtcgagtcagggtccaccactggaccatgctgggacctcgtcggaccgcttgctgccttccaccttgctcttcgacatcactgacttcgacttcgcttcaggctcgacagaggatgtcatcggcccctcacagctgggaggcgcaccgctggtgcagacacaggaccaggcgcaggccactccgccgccagacactcgtgctacccgtgctgtgccaccggatcgtttcacctactcccaggaccacgtgcgagcacaggcccggaggaccaagcgtggtcgcggcgtagggcagggccagtag

SEQ ID NO: 81060 - DNA, 2394 bp, Oryza sativa
  Clone ID: PAT_MRT4530_80624C.1
atggagttgggtcggccggggtgtccggttgatcggcttccggattcaccgcggcacgaaaggggggctgcccgttgtctgctggggacgggggcgaaccctaagggatttaatacacaaaatagtctggaaatttgggctaaatttctgggcgtgacaattctgcatgaaccaaaagagaaatgggccaaggcgtatgacacaggtggtgcatcatatggaataatgacaacaaatttggcagaagtttacaactgggtgatgcacggtgttcgtggactgccactagttggcatagtggagttcattttacatgggacatgcagatattttagggatcggttccaggcaattcttccctctatgccgaacaacagcattttgtttggaactttcatgcagaaaaagctagaggagttgcgtaaaaaggccatgaaacatcgagctctagtgcaaggtactcaacaacaaaggtttgagatactttgtcaagataaggcaggcaggggtatctaccgcaagagagtgaagcaggagtgtgttctcaaagccaacggcacatgtcattgctcttgtgcaaagccgaagctgctccacaggccatgcacccatgtcattgctgccgcagcggagtgtggcataccagatgcagtatatgtgtcacagtacttcagtaagcaagcaatatatcatacatggagcagcgagatttatgggttcggcatagctggggagttcacagagactaacgatgaagtactcaatattcctgacccatcgaagctccgaggcaaggctagaaggaggaggactcgtcgcatccgcaacgatatggatgagtcggatgctggtagggtgaagcattgcagcaaatgcgatgaacgtgggcacacctacaagcattgtcctaaagacaaggagaaaccaaatgcggcggaggcaggactatcaggatcagcagtagatggagctcgccctacggatggcacgtcaggatacacctcagttgttggacccggcgatagatcaccgacacccggtcttaccttactgcggtacagggggctcagaattgggacgttccgggcaccgacgtgcggtgagctacttacggttcacgactcctttgtcgagaggttgcgtgaggccggcctcctaccgatgtgtcggctggtggaggctgccgccggcgacgtggacccggccagacgatggactgtggaccggtccctcctagcagctttggtcgaccgatggaggccagagacgcacacttttcacttgccgtgcggtgaggtagcccctaccctacaggacatatcgtacttgttggggctaccgctcgcgggagacgctgttaggccagtgaccacgggtgtggactggcaggacgatcttacggcacgtttcgcactagtacagcgcgcaccgcatctcccgctcgagccgttggcacaccaccgcaacaccggacctacgaagaggtggctgcttcagttcaccgtcgagcagctacaggcggaggctgacgagtactcctacagccgctgtttggaggcgtacttgctctggctttttggctgggtgatgttctgtggcggtcacgggcacgggtacaaatcctaccggctttcgtcaatggctagacgccggggtgttgaggatccgaactggcgtagcgatccttgtgtatacctactaccaccttggtgccagcgtcctctttgcctatgcggtgatcgatgccaactaatggcttcgaggaatcctgatattcgaggaaggcacttttttaggtgccctaactatgaccgtgagacccgcactacggcttgcgcatacatcgagtgggtcgatacagaaaatcccgttctcgacctaaccacttgtttacaagaaggtcgctggtatttcgcatccgaaagtactgagcaatacttacagagaaaagcggcttatgaacgacaatgtcgtgaacaacagagcgactggcgggtgctaactacagcactccctccatgggaagcccgtccaagatgcaggtgtggtgatcgttgtcaggttcttcgttctataaagcctacaacattgggtcgaaggttctttgtttgtctaaatattcttgacgatgatttcatggaaccaccaaggagatgtcaatatagagaatggatagacactagaagggttctaactccacctagccatgttgtgcaggggaactaccagagcaatacagggttactaaagcgcggtttgagagaggagagggatcctcacgtaggggttagctattatcggacaacttggcatattgaaatttctactgtcatgcttccttgtcccattactgcatcgtcgttgtgttcaactattgcactacctccctcctag

SEQ ID NO: 81061 - DNA, 967 bp, Oryza sativa
  Clone ID: PAT_MRT4530_80625C.1
gtggatccccgggctgcaggaatcggcacgaggcctccccttttttttttttttttttttttttttttttttttggaaccatcagaagatttccatttcattgagatttggagactaaacatacatgcatatggcctgatctgatctccctccccaattaagaacaaacactaggtagttaatcgacatcaaaacttctttttcatcaaatggattatggctttcttcatcctagccactaggaggagatacacctaaaaccaagatccatctttgcactgacatgtacttgcacagtagttacagtggtactactagtggtactaactaactatagtaagctggctccttgagccttttgagctctgttctctgcctatctcccattcatccagtggcctcttgatttctgtgcataagtgtgttaattagaggtttccattaactcctctcacacatctcatgcaggtatgcagcagtctggcagctgctgtgccaggatcatatatcagcatttgatttttcatcccagctgcagatgcagcttctgctgggatcctttgcagaggctgtgcatgagctcgacctgcgtcttgaggcacacgacgtagtcgagcgtctcgcttagcagcgagaagccgcgcagcgcctcgccgccggggacgagccgccggagcagccggagccggcccttcaccatcctcctcgccgccaatgcgccgccgccgccgctcgccgcggccattgccaggctccgccgcttcctcctcgagctgcacgccaccctctgcgacctcctcacgatcctcctgctcctcgccacggcggcgccggcggaggagaccgcgcgctcgtagacgtcgccgcccatgatgcggcgtaggagcggctcgttgcggcgctcggcggcgtggcgcgccacgagggcgcgcgcccagggcgccgcgcggccgcgcgccgacgccat

SEQ ID NO: 81062 - DNA, 3981 bp, Oryza sativa
  Clone ID: PAT_MRT4530_80626C.1
atgtcgaacaaacaaatattccaagtttaccatggaccaggaaatgtccgttacgggccaactgaggtagatctgtcagattttattgtatcagaaaggggaattgatagaccggctgagaggagtgtaccttctataaaaggatggttaatgaagggcttgagagttgatccacagacaagtgacataacaatcaatgttatagatccaggtgtgcagatgaacatggatgatggcgagggatcaagtgctgaagtaaacgagacttctgtggaggaggtcaacgcacgagaggacgggggcgtagtagctccagttggcattcaaccaggtggagtggccgacgagggggagactgtcggtgccattgtggatgaaatggagagggaggattctgacaacgagcgtgtagaggaaggtgattcgtcagatgatgagacggatattaatccagcagaatgggctagtgaggatttttctgggctgatcatctctgaagaggatagtgtgagatgggagtacaaagaaaatgagaaataccacaggaacattacttgtgcatttgttgcatctgagatgtatgcgcatgtcatcgataatctcacatatgaaccaaggtcaataatccgacacatcgaagagacatacaagtatactattagctatgccaaggcctggagggccaaacagaaaataatagagatgagatttggaacttacgaagcctcgtatgacaatttgccacgcctgcttggtgttatcgaggaaagaaaccctgggagctcttacgaagtgaagaaattcccctcaattgaacatcctagcaagagtgtgctgcaaagggcgttcttagctctacatgcatgcaagatggcattcgtgaactgtcgtcctgttctctgcattgatgggacattcttgacaggaaagtatcggggccagatactaacagcaataggggtagatgtgaacaatcaggtattgcccttggcatttgcttttgttgagagtgagaataccgacagctggtactggttcctgaaattggttaaaacaaaagttgttggtatgaggccaaatgtgtgcctgatacatgataggcacgctggcattctgcgagcgatagaagagttgcagtttgggagtatggaacgaggataccccggtgtttgggaagatgtacagagtaggtggtgcatgcgtcatatgggagctaatttcttcaagcaattcaagaacaaggagctcatgaacatgttgaagaggctgtgcaatcagaaccaggagaaaaaattcaatgagctttggaagagattagatgagttgacagccaaatgcagtgatcagcatgcagcggctccatcgaccgccgttgctgaccctcctcaagctcttggacctctcccaacggatagtccaacattggttagaagaactggattggagattcggaaattttctcagtggattttgcatgaaccaaaagagaaatgggccaaggcgtatgacacaggtggtgctagatatggaataatgacaacaaatttggcagaagtttacaactgggtgatgcgcggtgtccgtggactgccactagttggcatagtggagttcattttacatgggacatgcaggtattttagggatcggtttcaggcagttcttccctctatgccgaacaacagcattttgtttggagctttcatgcagaaaaagctagaggagttgcgtaaaaaggccatgaaacatcgagctctagtgcaaggtacccaacactacaggtttgagatactatgtcaagataagacaagcaggggtatctaccgcaagagagtgaagcaggagccatgcacccatgtcattgctgccgcaacggagtgtggcataccagatgcagtatatgtgtcacagtacttcagtaagcaagcaatatatcatacatggagcggcgagatttatgggttcggcatagctggggagttcacagagactaacgatgaagtactcaatattcctgacccatcgaagctccgaggcaaggctggaaggaggaggactcgtcgcatccgcaacgatatggatgagtcggaggctggcagggtgaagcgttgcagcaaatgcgatgaacatgggcacacctacaagcattgttctaaagacaaggagaaaccaagtgcggcggaggcaggactatcaggatcagtagcagatggagctcgccctacggagatggcacgtcaggatacacctcagttgttggacccggcgatagatcaccgacaccggtctcaccttactgcggtgcagggggctcagcttgggacgttccgggcacggacgtgcggtgagcttctcacggttcacgactcctttgtcgagaggctacgtgaggccggcctcctaccgatgtgtcggctggtggaggctgcggccggccacgcggacccggccagacgatggactgtggactggtccctcctagcagctttggttgatcgatggaggccagagacgcacacttttcacttgccgtgcggtgaggttgagcagctacaggcggaggccgacgagtactcctacagccgatgtttggaggcgtacttgctctggctttttggctgggtgatgttctgtggcggtcacgggcacgcggtcgacaagggactcgtgcactacgccaggagcatcgccgacgccgcggtaggcgaggtgcctcagtggagctggggttccgcattattggtggctctgtaccgtgcactttgtgagtcttgcacgaagacggatcccagcgcgacctttggtgggtgccctctctttctttctatctgggcagctgagaggattgcgatcggccgccctaaggtggaccagcacgcgtacgaggagtcacagtacgaggagcaaccagagcgccgatgggctcacgtccaggttaggcggtcgtatcctgagtttgttatggagttcgaccgccttctgccgactgacgtcgtgtgggagccctacagtgccgcagctacccaggctcgtgcaccattgggtctgtccatactctgcaccagggaccaggcgtactggatgactacggttccaatggtcttcgacatctgcgttgagcctcacgcccctttccgcgtgatgcggcagttcggcttccgtcagccctttccagtaccgtttccgaccaccgtcccagctgctgttcaccggtactcgcgcaagggtcagcagttagctgacgactggcccgccaagttggcgacttttgttgaggactggttgctcgcaaccaaggaggtcgtggaccacgagggagagccacacactgaggagtcataccaggcctacctacgctggtaccagccacgcacccgtactagggtcaccttcgctcccttggagcagcagccccacgttgcgagcactagagacctctacgccaggcaccacgaccaggacttcgctcgttctacgacgttgctcgggcagacgcagctgtacagcggccacccgtaccgactggtccccgtccagctgcgcacgttcctaggccgactccccctccgcacggaggccgcccacttctcccaggctgcagggtcagcgtctcaggcagctgcgtcgacctcgcactcagcgcagttctggcagtacaccgggacttcgtcaccggcagccggcacgtcgagtcagggtccaccactggaccatgctgggacctcgtcggaccgcttgctgccttccaccttgctcttcgacatcactgacttcgacttcgcttcaggctcgacagaggacgtcatcggcccctcacagctgggaggcgcaccgccggtgcagacgcaggaccaggcgcaggccactcctccgcgggacactcgtgctacccgtgctgtgccaccggatcgtttcacctactcaaaggaccacgtgcgagcacaggcccggaggaccaagcgtggtcgcggcgcggggtag

SEQ ID NO: 81063 - DNA, 4395 bp, Oryza sativa
  Clone ID: PAT_MRT4530_80627C.1
atgtcgaacaaacaagtattccaagtttaccatggaccaggaaacgtccgttacgggccaactggggtagatctgtcagattttattgtatcagaaaggggaattgatagaccggctgagaggagtgtaccttctataaaaggatggttaataaagggcttgagagttgatccacagacaagtgacataacaatcaatgttatagtaagtcgggcaactgagggtttttattgggaactaatgccagttcaaaactctcgagtgtggagatggtatttggaaaatgcattgcaacgcgggtggcctctagctttggttccgtttgttcacccgaaggatccaggtggagtggccgacgagggggagactgtcggtgccattgtggatgaaatggagagggaggattctgacaacgagcgtgtagaggaaggtgattcgtcagatgatgagacggatattaatccagcagaatgggctagtgaggatttttctgggctgatcgtctctgaagaggatagtgtgagatgggagtacaaagaaaatgaggttattcagggagcgatttatagtagagcagaagatatgaaggaggcgaaataccacaggaacattacttgtgcatttgttgcatctgagatgtatgtgcatgtcatcgataatctcacatatgaaccaaggtcaataatccgacacatcgaagagacatacaagtatactattagctatgccaaggaaagaaaccctgggagctcttacgaagtgaagaaattcccctcaattgaacatcctagcaagagtgtgctgcaaagggcgttcttagctctacatgcatgcaagatggcattcgtgaactgtcgtcctgttctctgcattgatgggacattcttgacaggaaagtatcggggccagatactaacagcaataggggtagatgggaacaatcaggtattgcccttggcatttgcttctgttgagagtgagaataccgacagctggtactggctcctgaaattggttaaaacaaaagttgttggtatgaggccaaatgtgtgcctgatacatgataggcacgctggcattctgcgagcgatagaagagttgcagtttgggagtatggaacgagtataccccggtgtttgggaagatgtacagagtaggtggtgcatgcgtcatatgggagctaatttcttcaagcaattcaagaacaaagagctcatgaacatgttcaagaggctgtgcaatcaaaaccaggagaaaaaattcaatgagctttggaagagattagatgagttgacagccaaatgcagtgatcagcgtgcagcggctccatcgaccgccgttgctgagcctcctcaagctcttggacctctcccaacggatagtccaacattggttagaaaaactggattggagattcggaaattttctcagtggattctgcatgaaccaaaagagaaatggggcaaggcgtatgacataggtggtgctagatatggaattatgacaacaaatttgacagaagtttacaactgggtgatgcgcggtgtccgtggactgccactagttggcatagtggagttcattttacatgggacatgcaggtattttagggatcggttccaggcagttcttccctctatgccgaacaacagcattttgtttggagctttcatgcagaaaaagctagaggagttgcgtaaaaaggccatgaaacatcgagctgtagtgcaaggtacccaacagcacaggtttgagatactatgtcaagataaggcaggcaggggtatctaccgcaagagagtgaagcaggagtgtgttctcaaagccgacggcacatgtcattgctcttgtgcaaagccgaagctgctccacaggccatgcacccatgtcattgctgccgcagcggagtgtggcataccagatgcagtatatgtgtcacagtacttcagtaaccaagcaatatatcatacatggagcggcgagatttatgggttcggcatagctggggagttcacagagactaacgatgaagtactcaatattcctgacccatcgaagctccgaggcaaggctggaaggaggaggactcgtcgcatccgcaatgatatggacgagtcggagactggcagggtgaagcgttgcagcaaatgcgatgaacatgggcacacctacaagcattgtcctaaagacaaggagaaaccaagtgcggcggaggcaggactatcaggatcagcagcagatggagctcgccctacggagatgggggctcagcttgggacgttccgggcacggacgtgcggtgagctactcacggttcacgactcctttgtcgagaggctacgtgaggccggcctcgtaccgatgtgtcggctggtggaggctgcggccggcgacgcggacccggccagacgatggactgtggacaggtccctcctagcagctttggtcgatcgatggaggccagagacgcacacttttcacttgccgtgcggtgaggtagcccctaccctacaggacgtatcgtacttgttggggctaccgctcgcgagagacgctgttgggccagtgaccacggctgtggactggcaggacaatctgatggcacgtttcgcactagtacagcgcgcaccgcacctcccgctcgagccgttagcacaccaccgcaacaccggacctacgaagaggtggctgcttcagttcaccgttgagcagctacaggcggaggccgacgagtactcctacagccgatgtttggaggcgtacttgctctggctttttggctgggtgatgttctgtggcggtcacgggcacgccgtcgacaagggactcgtgcactacgccaggagcatcgctgacgccgcggtaggcgaggtgcctcagtggagctggggttccgcgttgttggcggctctgtaccgtgcactttgtgagtcttgcacgaagacggatcccagcgcgacctttggtgggtgccctctctttctttttatctgggcagctgagaggattgcgatcggccgccctgaggtagaccagcacgcgtacgaggagtcactgtacgaggagcgaccagaggtcgactaccctacgatgggtactctgtggtgccgtcgtcagcgccgatgggctcacgtccaggttaggcagtcgtatcctgagtttgttatggagttcgaccgccttctgccgactgacgtcgtgtgggagccctacagtgcagcggctacccaggctcgtgcgccgttgggtctgtccacactctgcaccagggaccaggcgtactggatgactacggttccgatggtcttcgacatctgcgttgagcctcacgcccctttccgtgtgatgcggcagttcggcttccgtcagccctttccagtaccgtttccgaccaccgtcccagctgctgttcaccggtactcgcgcaagggtcagcactcagctggcgactggcccgcctggcccgccaagttggcgacttttgttgagtactggttgctcacaaccgaggaggtcgtggaccacgagggagagccacacactgaggagtcgtaccaggcctacctacgctggtaccagccacgcacccgtagtagggtcaccttcgctcccttggagcagcagccccacgttgcgagcactagagacctctatgccaggcaccacgaccaggacttcgctcgtgctgtcgacgacatcaaccgggtcatcgttgacggttcaacgacgatccaacgtttaggcgcggggattccggtacccgtagaggagcacctgacgacgtacacgcggatggtggagtcgatgcgctcgattctccgagtgctcacctgtcgtgcagacgacgttgctcgggcacatgcagctgtacagcggccacccgtaccgactggtccccgtccagctgcgcacgttcctaggctgactccccctccgcacggagggtttcgtgcaccgttcagcaccccgcctttctcagctaggccttctgttgtgccccccacagggtcagcgtctcaggcagctgtgtcaacctcgcactcagcgcagttctggcagtacaccgggacttcgtcacaagcagccggcacgtcgagtcagggtccaccactggaccatgctgggacctcgtcggaccgcttgctgccttccaccttgctcttcgacatcactgacttcgacttcgcttcaggctcgacagaggacgtcattggcccctcacagctgggaggcgcaccgccggtgcagacacaggaccaggcgcaggccactcctccgcgggacactcgtgctacccgtgctgtgctaccggatcgtttcacctactcccaggaccacgtgcgagcacaggcccggaggaccaagcgtggtcgcggcgcggggcagggccagtag

SEQ ID NO: 81064 - DNA, 2220 bp, Oryza sativa
  Clone ID: PAT_MRT4530_80628C.1
atggggcaatatcacgcggggagaagcaaggcggccccttgccgccctctggccgggcggaaggcctcgctgcctataaaaggcctgccgcccagcccccagccctcattcctcccctcaaatccagtgaaaaaaaacaagaagaaaggggaggagaagagaagaaggggtgaagccctgccggattcagacgccgatttcaggggaattgatagaccggctgagaggagtgtaccttctataaaaggatggttaatgaggggcttgagagttgatccacagacaagtgacataacaatcaatgttataatgaacatggatgatggcgagggaccaagtgctgaagtaaatgagacttctgtggaggaggtcaacgcacgagaggacgggggtgtagtagctccagtgggcattcaaccaggtgtagtggccgacgagggggagactgtcggtgccattgtggatgaaatggagagggaggattctgacaacgagcgtgtagaggaaggaaagtatcggggccagatactaacagcaataggggtagatgggaacaatcaggtattgcccttggcatttgcttttgttgagagtgagaataccgacagcaggtactggttcctgaaattggttaaaacaaaaattgttggtatgaggccaaatgtgtgccagatacatgataggcacgctggcattctgcgagcgatagaagagttgcagtttgggaatatggaacaaggataccctggtgagtgggaagatgtacagagcaggtggtgcatgcgtcatatgggagctaatttcttcaagcaattcaagaacaaggagctcatgaacatgtttaagaggctatgcgatcagaaccaggagaaaaaattcaatgagctttggaagagattagatgagttgacagccaaatgcaagactaacgatgaagtactcaatattcctgacacatcgaagctccgaggcaaggctggaaggaggaagactcgtcgcatccgcaacgatatggacgagtcggaggctggcagggactatcaggatcaacagcagatggagctcgccctacggatgaaggcactacctccactcgaccacgtcctaggcgtcgtcgtgccacctgagaggattgcgatcggccgccctgaggtggaccagcacgcgtacaaggagtcactgtacgcggagcgaccagaggtcgactaccctacgataggtactctgtggtgccgtcgtcagcgccgatgggctcacgtccaggttaggcggtcgtatcctgagtttgttatggagttcgaccgccttctgccgactgacgtcgtgtgggagccctacagtgccgcggctacccaggctcgtgcgccgttgggtctgtccacagtctgcaccagggaccaggcgtactggatgactacggttccgatggtcttcgacatctgcgttgagcctcatgcccctttccgcgtgatgcggcagttcggcttctgtcagccctttccacagtcagctggcgactggcccgccaagttggcgacttttgttgaggactggttgctcacaaccgaggaggtcgtggaccacgagggagagccacacactgaggaggcgtaccaggcctacctacgctggtaccagccacgtacccgtactagggtcaccttcgctcccttggagcagcagccccacgttgcgagcactagagacctctacgccaggcaccgcgaccaggacttcgctcgtgctatgacgttgctcgggcagacgcagctgtacagcggccacccgtaccgactggtccccgtccagctatgcacgttcctaggccgactccccctccgcacggagggtttcgtgcaccgttcagcaccccgccttcctcggctaggccctctgttgtgccccccacaggctgcccacttctcccaggctgcagcgtcagtgtctcaggcagctgcgtcgacctcgcactcagtgcagttctggcagtacaccgggacttcgtcacaggcagccggcacgtcgaaggatgtcatcggcccctcacagctgagaggggcaccgccggtgcagacgcaggaccaggcgcaggccactccgccgccagacactcgtgctacccgtgctgtgccaccggatcgtttcacctactcccaggaccacgtgcgagcacaggcccggaggaccaagcgtggtcgcggcgcggggcagggccagtag

SEQ ID NO: 81065 - DNA, 146 bp, Oryza sativa
  Clone ID: PAT_MRT4530_80629C.1
accgcgcgcatatagcgtgtcaagaagcaggcagagcatctatccgactcacctttctacagagattacagtacagcttatcgagtttaacgtttggctcggtgtctgataataacatgcatacttgcgtgctcacttgggtgttc

SEQ ID NO: 81066 - DNA, 678 bp, Oryza sativa
  Clone ID: PAT_MRT4530_8062C.1
tttttttttttttttccaccacaatagagatctgggcctgtctatatatttttatttttcagaatattctgcaagataacatcaatggtactcaatggacgtacaaagaattgccagagcagctgctatgttgttaacaagttatctatggtacatgttcggtaggacgaaatgatcatccaggaaactagagcctactgacagcaagagcattgacatatcaaaaatacagtgtgttgaattacaacttcagatttccataccccttcttgatcttgcctgtataacaagggaagaaacaactaaagcctatctcaaagttaaaactgtatgatattgccgtgccgtgcttgtcgatactgttttttcatttctttccattggcataggggtactctgcaggtgagctccataagccaaaccaagatggagatgtgaatgcaatcagcaacagcagtgacgcaataggcagtggaaggatagcatattcccagcagaagctccacagccaagaaataaaatgaccctccacaaatgttggaaaacgagttttgccactaaatccaaggggtttgccaaaaagggttttgaatatgccaactggaggtggaaaaggaccatgcaatagttagcgtgttaccctacaaatggttgaaaaacgagttttccacaaaagga

SEQ ID NO: 81067 - DNA, 222 bp, Oryza sativa
  Clone ID: PAT_MRT4530_80630C.1
gaaggaaacggagacaaatacgccaaaaggtgttctcaattgaagtcaaacaaccaccgatggtttttaaggttgtatctaacacaaggtacccacaaacaggttacatgcgaaactggtgcaagtccaccccccccattaagggacgggccttgaaccacgcatgtgtgccggcccacatatgcgccaaatatccttgttctttcggaataaattgccccc

SEQ ID NO: 81068 - DNA, 325 bp, Oryza sativa
  Clone ID: PAT_MRT4530_80631C.1
atgtagagctagccccagccggcgagctctcccacctcctccatggcgatggcggtgctgctccgcaaggtgtggggctccgtgctggcccgcgcggcggcgggggcggtgccggcggaggcctttgccggcgtcgcctacccaagccgtccgcaagccggcggagagtacggctcgttgggcgcgctcgacgttatcctgatcgacgtgctcccgcaaatcctgtgcctgctccgccacgccgacgccgcgcggttcaccgacgggtgccaagcctggcgcctggtggccttcgacaatggactgtgggacttctcaattcttt

SEQ ID NO: 81069 - DNA, 198 bp, Oryza sativa
  Clone ID: PAT_MRT4530_80632C.1
ctgttttctcctagtaaatacttaacctacggtagatgtaaagaaaacacatattactttagcagagacgacatggatgtcaatttaattgatcaacactacataacaacatgtaatcgtaaaaagaacatcggttcttcggaagaatttcctacttggaattttgatgtatatgcaagtccccatcgatcagctaat

SEQ ID NO: 81070 - DNA, 1443 bp, Oryza sativa
  Clone ID: PAT_MRT4530_80633C.1
gacagataacactaaaaaagtgtcgtatataaaaggcattaccaacaggagatttctagcacaacaacttacacacccagattgttagctaattaatcatacagaaattccagaagaaagtcactgtacgaagcagttcagaaccttgatgaactgtacacaaacaaacaagcgccaagttatttacatggagatcattgtgggccgaccgaactgatcattttggttcaaccctggacgaagatgggatgccaccactgtaatcaaattgagactctccactgtatggatgacgcggtgtcctgctgttgtagctcatcgagtttgatgccgagtcgacctttgggtttacgcctgccatcttcatgatcttctcaatctccgccaccacctcactcattgatgggcggtccattcctgcctcctccacgcacttcaaagccaagtcgacatacagttcgaagccggccagcgacgtgggtgctagcattgggtctaggagctcatggaggccgtataggtccttggtcctatccattgcacctttcacctcacgcacgatgtaccttcccctctctaatggctttctcgccgttatcacttcaagtagtagcacaccgaagctgtagacatcgctcttctcggtcaactgctgggtcatgtagtattcagggtccaaatatcccatggttcctttcacttgagttgtgacctgaccccttccatcctggttcagaggcttggagagaccaaagtcggaaacctttgtgtggaggtttccatcaagaagaatgttacttgactttatatccctgtgtactatcggagggtctgcaagctcatgcaggtacgcgatgcctttcgctgcaccaagtactactcgcagccgtctcttccaatctaggcgcaccccagacttccctgtgaggctgtccttgagtgtgccattgggcacatactcatagaccagcatttgctcaccctggtcaaagcaaaatcccacaaggctgacaaggttcttgtgatgaaccctggataggagctctatctcagtccggaattctaggttgccttgcaaggacccttgctcggatcttttgactgcaattagatgcccatttgggagtactcctctgtagaccttcccatagccaccagttccaatgtcattagcatcggagaagctgtttgtgattttcttcagctcatcgaatgtgaacacccgcgcgccttggagatgcggggtgctgatgctggtgctcttgatgtcccatgaagcgtaagatgggctcctgggttgtggctgcagctttggccttttgttcctcctgaaaaacagaactgtaaaaagaacaagcagtgacacaacaacaaaagctccaccagctgacacaccaatgatgagggactggttctttttcgtctgtctgggtgctgatagtg

SEQ ID NO: 81071 - DNA, 2330 bp, Oryza sativa
  Clone ID: PAT_MRT4530_80634C.1
atggggctggccagcgacagccctgcgtcgttccccttctccgccgccaagctcgccgcctcgccgcgcgtctgcaaccccatcagcaggaggatattttctgatgttgctggagatttaacagtatcggtggatggccaatcttttctactacataagttccctctagtctctaggtgtggaagaatacgaagaatggtagctgaatccaaggatccagatctctcaaagttggagctagtaaatgtaccagggggagctttagcatttgaacttgctgccaagttctgttatgggagtaattttgaaattaatactgtcaatgtggctcatctccggtgcattgcagagtatttggaaatgacagaagtgtaccaagactagaggctgagcaatggggctggccagcgacagccctgcgtcgttccccttctccgccgtcaagctcgccgcctcgccgcgcctctgcaaccccatcagcaggaggatattttctgatgttgctggagatttaacgtcgatgcaattgcgataaatgcaagcaaggagcagctggtttcaggcttggctcatttggaatgtgatgtcggatcaggaaagttgcgcatgcattgtcaagattggtgggttgaggatctttctgcactaagaattgactattatcagcgtgttatcatcgcaatgagaagaactggggtgaggccagagagtattggcacatccattgtgcactatgctcaaacagctctgaagggtatcgaaaggcggcatgtatgggactcaggtcctcttgttggagacaaccaacgagtgattgtggagacgctcattgatctgttggcaacagaaaagatcacatcggttaccttgtcattcttgtttggcatgctgagaatggcaatagaagttgatgcaggactagattataggattgaagttgagaaaaggattggacttcagcttgagatggcatcacttgatgatcttctgatccccgcaacgcagacaagcgactcgatgtttgatgtcgacaccgtccatcgcatattggtgaatttcctgcagaggatagaggaagatgattcaggaaacttgtcaccttgcggatatgagtctgatgatggactaaagtctccgagccacagctcagtcttgaaggttggaagactgatggatggttaccttgcagaaatagcaccagatccatatctgaaactgcagaagttcatggctctcatcgaactcttaccggactatgcgagaattgtcgatgacggactctaccgtgccattgacatatacctgaaggctcatccatctctgatggagtcggagtgcaagaaggtgtgcaagctgatcgactgccagaagctgtcgcaggacgcgtcgagccacgcggcgcagaacgaccgcctccccatccagacggtggtgcgcgtcctctacttcgagcagctccgcctcaaatccacggtgtcgtcaactaccccccacaccacctccctcggcggcgacggctgcggcgggtcgctgtcgcagcggatgatgatgaccggcggcagcggggtggcgagctcgtgcgtgtcgccgcagcgcgacaactacgcgtcgctgcggcgggagaaccgggagctgaagctggagatcgcgcggatgcgggtgcggctgacggagctggagcgggagcagggggtgatgaggcaggggatgcgggatggccgtggcggcggggagcacggccgggcgctgctggcgtcgatatcgcgagggatcgggaggatcgccatgctcgggggagcgcagggaggagcggagaggaggaggaagacgaagacgaagaagagctctcattcgcagtctcagtggtcgtcggatggtggcgggaagacgatgatgatgagcaacaggcggaggcacaaggcatcatctgtcacatacgctgcttcctgaatcatcaagctgctgtgttctcgttgctgcatgcattttacagggaagagatggtgttataaaccgcagggaaaatgtaaaattctacagctaggtgaagagattaaagtgtaacactcctttattagataagctaatctagttctaatgtacaagtagtagcattttcattttgggtgtagccttttcttggtcacggattggcggcctcctgcgctgatggaacgaggggaattttgcaaaagaacactagtaatccaaatcatggatattttgcggaaacctctgattaatttcacatttttaaccattccattcttaacaacaatgattttttgttcaagtaatataaacactaaattttaaattaagattttaac

SEQ ID NO: 81072 - DNA, 130 bp, Oryza sativa
  Clone ID: PAT_MRT4530_80635C.1
acccgttttattctaccacatctgactgctttaaaaaggggggatctttataagagcgctagtgtactacatactccgaaccctgcatatcaccaggtgcgcggttgctcctttaacccaggaatgagct

SEQ ID NO: 81073 - DNA, 1726 bp, Oryza sativa
  Clone ID: PAT_MRT4530_80636C.1
cgtcgtctggtggttgcattgtgttgcaatgagcaaaggcgcgatcatcggcgcgtcgaccgtgctggtggtggcggtggtggcggcggtgtgcgtggtgtcgttcaagaacgggtcgagcaatgccaaggaggacggcgagctgtcgacgtcggtgaagtcgatcaagtcgttctgccagccggtggactaccgggagacgtgcgagaccacgctggagcagacggcgggcaacgcgacgaacccgacggacctcgccaaggccatcttcaaggcgacgtcggagcggatcgagaaggcggtgagggagtccgccgtgctcaacgacctcaagaacgacccgcgcacgtccgacgcgctcaaggactgcgaggagctgctcgactacgccatcgacgacctcaagacgacgttcgacaagctcggcgggttccagacgagcaacttcaagcgcgccgtggacgacgtcaagacgtggctcagctcggcgctgacgtaccaggagacgtgcctcgacgggttcgagaactctacgtcgacggaggcgtcggagaagatgcgcaaggcgctcaagagctcgcaggagctgacggagaacatcctcgccatcgtggaccagttcgccgacacgctggcgaacctggacatcaccggattcagccgccggctgctcggcgacgacggcgtgcccgtgtggatgtccaacgcgaagcgccggctgctggaggcgaccccgggctccaaggagttcaagccggacgtgacggtggcggcggacggcagcggcgacttcaagaccatcaatgaggcgctggccaaggtgccggtcaagagcacggggacgtacgtgatgtacgtgaaggccgggacgtacaaggagtacgtgtcggtggcgcgcaacgtgacgaacctggtgatgatcggcgacggcgccaccaagaccatcatcacggggaacaagagcttcatgctcaacatcaccaccaaggacacggccaccatggaggcgatcggcaacgggttcttcatgcgcggcatcggcgtggagaacacggccgggtccaagaaccaccaggcggtggcgctccgcgtgcagagcgaccagtcggcgttctacgagtgccagttcgacgggcaccaggacacgctctacacccacaccagcaggcagtactaccgcgactgcaccatcaccggcaccatcgacttcatcttcggcaacgcgcaggtggtgctccagaactgccggatccaggtgcgccggtgcatggacaaccagcagaacatcgtgacggcgcaggggcgcaaggagaagcactccgcgggcggcacggtgatccacaactgcaccatcgagccgcacgaggacttcaaggccgacgccgccaagttcaagacgttcctcggccgcccgtggaaggagtactcgcggacgctctacatccagtccgacatcggcgggttcatcgacccgcaggggtggctgccgtggctcggcgacttcggcctcaacacctgctactacgccgaggtggagaaccgcggcgacggcgccgacatgagcaagcgcgccaagtggagaggggtcaagacggtcacgtaccagcaggcgcagcagaagtacaccgtcgagaggttcatccagggacagacgtggctcccaaagttcggcgtgccgttcatccccggcctgttgccgcaggagcagtcagggaggatacactga

SEQ ID NO: 81074 - DNA, 257 bp, Oryza sativa
  Clone ID: PAT_MRT4530_80637C.1
gaaacaatcacacaaactcaatgccctagcatcgagctgaaggaatacagatggctccacatgcttattgatacgaacagtactatacctcattcatacacacgaaacgagaacgagcgtatatgcacaaggatagacagtgagcttattcactgtacagttcttacagccttgcatgactgaagtgcatacaccctattatagagctggcgctcatgctcatttctgggctgaaaagaatcaacctctgccaaaac

SEQ ID NO: 81075 - DNA, 1028 bp, Oryza sativa
  Clone ID: PAT_MRT4530_80638C.1
attttgttgggcgaaactgatcgctaatgaccgtcaacaactatatgagttctttgaaggcagaaactgttcaggctttggtttgtgcatcaagttggataagagcctctcaaaatgataacagtgcacctattcttgtgatggtggagatgatgatattgaaatagtggagttccctaattgtgtggtgtcaagcaactagtaagtagctacaactctagaagagacggcctgtttggttggagggagtttttaggagggattgggagtttagagggatgaggctattaagtgttttgtttggttgggagacatgggaattttggtgggatgaggatgaggaattgaggaaggaactccctccttttcaatacctgggtaggggcaggtaattgggagggaattcctcctttaatttttctaagcaaatctcagtcatccgtttttattaatgacttaatctccaactaaactccctatcaatttccatcacctctaccaaacaagatatttggattaaaaatcaaattctcatcttaatctcataatcaattccctcgtgtaaactcccaatccccttccctcgagttaccaaacaagccgagaagggatgggagtgggactatggagggagaaaggaagctgtcaagggctcagggctgcagcagctgctgctctaaactgcactccacttgtgttttgtgtttatgtgcaattgtcttggatgaaaatgatgaaccttgcaggctgcagctttactagttatgcatttatgttaaattttgatgtattgaactattgaagtatatattattgtactggactttggaagttggaacttggaacctatctaccacctatgtgggcatgtcagcatgtggtgtggctgcctgtggctctgaatatgtgaatatgtgaatatgtgatgtgatgaactgatttgatatccgtcaatctatgtgagtctgcctgtggttatgtaaaaaaaaaaaaaaaaaaaaaactcgagactagttccctccctcgtc

SEQ ID NO: 81076 - DNA, 378 bp, Oryza sativa
  Clone ID: PAT_MRT4530_80639C.1
gaacacaatgattagggtgcacttatttgctagaggtgttccatgctgttctaccacggcttaacgtttcaggcgccatctaacaccacttaaggatgcacattacaggttaatgagccacaacgaaacgggacacgaccaatgaccagaccagacaacctttgattcattggggaagacaaataggccgacttgtgaacacctatacagtagcagctttgatggatgaggacttactggccacgaccgaggcagagcaccaggtgatgtgcggactccttacggatgttaaatccggaacgctgctgtcttatttaagctgtttacaagcaaagatgagacgctgttagtacggggggatgccctgcttgtactgga

SEQ ID NO: 81077 - DNA, 302 bp, Oryza sativa
  Clone ID: PAT_MRT4530_8063C.1
acgcccacgcgtgcgtccactcgtccgaccacgcgtacgttcacgcgtgcgattacacacatgaagagctggactggctctatatatctacttgatgatgccctgtgcctacgtgcactcggcgaggagaggaccgactgattgattgatcgatccattgccattgaccacgagtcttcgttcaaggagctcctgctctagaacatgatgatcatgggaagaggacggcctgagcccaaggaggaggagtccgtttcactcatattgctactactctcttctgctttattcctattattttt

SEQ ID NO: 81078 - DNA, 1049 bp, Oryza sativa
  Clone ID: PAT_MRT4530_80640C.1
atgccgtgtgggtatggggtacccataatctccacaggcgggctccgggaggcatgcggcacaggcctctactccaccgtgatcatctccttcctgaccgacttcggcggcggcaactacaagctcaacctcgccggccacgcctggagcgccgtcggaccggacgtcaagtactgccggtccaagggcgtcctcgtcctcctctctatcggcggcggcgtcggcaggtactccctggcctcgcaggccgatgccaaggccgtcgccgaccacctctggaacttctacctcggtgggaccagcaccatgtcctggccgttcggcgacgccgtgctcgacggcgtcgacttcgacatcgagctgggcagcaacgcccactacggcgacctcgccaggtacctcaaggcgtacagcgggaggaagcccggagggaggaaggtgtggctgacggcggcgccgcagtgcccgttcccggacaggatgctcggcgaggcgctgcgcacggggctgttcgaccgagtgcacgtccagttctacaacaacccggtctgcaactaccgcgccagcaacgtggccgcgttcacctccgcatggaacaagtgggcggggagccctccccgggagctcagtctacctgtcgctccctgcggcaagcgcggcggggaacaacgggtacggggattcggggacgctgaaagagacttagctcccgacctaccagattacatactccggcaggcaatgcgctcgggcggggtcgggaccacggaactggcgcggagaatcctcgttggcgcgtgattctgcgccgcaggggtggatgagggtgagtgagagggtgctagagtcacgcaggtttcatgccagggataggagaggggcggtgataggggacgaagtttcgggttgaggctaatcacttggaaggctcgtcgctgaggtagagctaggctacaggcggaaagagcaagtaggagtgtagggcgacggagtggggaggaggggcggtagatggtaggtggtgttgggctggatgcattctggcgagg

SEQ ID NO: 81079 - DNA, 136 bp, Oryza sativa
  Clone ID: PAT_MRT4530_80641C.1
ggacacagcactgcattcttaattacgtacacaccacaagactggagaggaaggactacataatcgtacagacgaccatagaatgttctcaaaacatactgtgatacttaggcactaatcaaaaactaaggatgca

SEQ ID NO: 81080 - DNA, 936 bp, Oryza sativa
  Clone ID: PAT_MRT4530_80642C.1
atggtgaaacagttattccctgaagcacgttgccagaactggccaccaactgccgtgcaacccatgtggaaaacggtttgggagacaaagagttcttgtctgcgagagggtgttttcaggactacatgcgatccacggctaattgaagcattgcctcctgagagtcacaatgcaagagttgcttttcttacacctaagtcagtttcacctgagaagatggcctgtgtgattcatctggcaggcactggtgatcactcgtttgagagaagacttcgacttggtggacctcttttgaaggacaacattgcaactatggttcttgagagcccttattatggacaacggcgaccaagcatgcagcatgggtcaaagcttcagtgtgtgagtgacttgctactattaggaaaagctactattgatgaagctcgcagccttctgtactggttgcagaatgaggctggttatggcaagatgggcatatgcgggctcagcatgggtggtgtacatgctgcaatggttggatccttgcacccaacaccaattgctacgctgccatttcttgctccgcattctgctgtggtgcctttctgtgacgggctctacaggcatgccacagcttgggatgcattgaggaaagatgcagcaacattggcccaagacgtaacttctttgacagaagacatggcccagaaatcaggaatcactattgagcaagtaagagagaggttgcgatcagtgctgtctttgactgacgtcactcgatttccagtgccaaagaacccacaggctgtcatttttgttggtgcaacggatgacggctacatccccaaacattcgataatggagctccaaaaggcatggccaggttcagagtggtgtagcagtgtagatgctgggccattggatctccagggccagtggatggatgtggtctaa

SEQ ID NO: 81081 - DNA, 285 bp, Oryza sativa
  Clone ID: PAT_MRT4530_80643C.1
atgtcgcctctcctcccctgcacatggattcagtgggccgggccctccccctccacgtggatcctgccacctcttccgccccttcatcgcgcatggatccggcgttgcgcatcgacggcgaggaggagaaacaatgactacggcaacggtggccgggagagcttgctggattttctggcggcagcgacaggaggggcgatgggagacatggagaccgggaatggcatcggcggtggcaatgatgatgatcgttgtcacaccctgaagttctcctcccaagcctaa

SEQ ID NO: 81082 - DNA, 2754 bp, Oryza sativa
  Clone ID: PAT_MRT4530_80644C.1
atggaggtgagttctttgtatctaagtgttcggatctttaatgcttctggtggtggagaggtgaagcgggctgagctacccatgaaggtgctagagagggagcccaaggagggcacatcacttcgccggcccacgcctccaacgacgccgggacgctcctgccgtccacgccgtgccgcccagcctttccagcaactgctaccgacgtcccctctgaactttgccgagactgcagtcctcctcgtacaatccagcgccgcggccgacgaccgcgcaagctcgtcggaattcatcggctgtaggataagatatatgggggaggaagaaggggatgaaggtagctcgctcgacgcgcgcgatggaggaacgggactggtcgtccctcccgctcgacgtgctcgccgcgatcctggagcgcctgcggtggtcgagccacccgagcgtcgcgctgacgtgccggcactggcgctccgccccgtgccgcccttctacccggcgtggatcaccccgctcctgctcagcaccgcccgcgtcggcgccgcgaacctccgctactacagcccctactaccacaagagcttcgaggtcggggacgacgaaggcggcagccccgctcttggcggcgtcgcccgtggcgccaggatctgctgcgcctccgccgggcgacacctcgcgctcggcatgtcgggcgcggtactcgatgccgatcttgtaaccggcgtcgttcgtaaggttccgcacgcgcataaggacatgttcgactttatcatctacagcgacgacgcgcatagaatgtttgggatcaacgcggttctcccgctcagcgttgcctatgtcaaccaaaacaacgacggcgattgggaggactggacgttgacagagttcgaccccactaggccatggctaagggcgtcacctatcaccaaccctgtcatacataggggcttgatatatcttctggacgaacaagggaggttggccgtgtatgacccatgcaagcatgaggagggatttgagattcttgataagcccatgagctttggaatatttaaacattatgacagccacaacatctacatgtttgagtctgaccaggacgaactgatggtcgtcctcgttgggcaacgaggtgcaccggttcatgttgtcaagcttaatgagaatacaatggagtgggataaggtggatagtttgcaggggagggcgttgttcaccggcacgcatgcatcgatgatgaagaaaatcgagctggagtggatgcagaatcggaaagtccttttagcacctaggaaacgggggaaacaagagctctgctgctgcttcttcttcattctttttcttcttccatttgtgtctgtcccctctcgtcttcttcttgtgtcctctctctccgtcctccaccgcctcctccgcctcctcgcctcccgcggcgtcttctccgagcacacctcctcctccccgcgccgcttctcgctcaccaccgtcagccgcaccctcgtcccggccggcgggggctcctccgccgcgtcctacgccgactacgtgctgcagcaccaccaggacgagctcgtccgcgcctggtccctcctccacgaggccgtcctcgaccccgccggctccgagcccttcgcccgcgccaacgccggcgccctcacctgcgagccggtggtgccggacacgacggacggcagcacgaggacgagggcgctgctggagaatgacatcttcgtcatggccacctaccggactcagggcagggagcgctccgaggaggagttccggccgcggacggcgtgttctcgaacacaccgacgagaggaaccgaggctgccgggcgacggagccggcaggcggcgcgaggcgccagcggcagatcgagggcggcacgtggcgcgagcgacgccgaagccgggcggccctagcggcgacagcgccagcggcaaatcgagagcggagcgcccgagggagagggagccgacggccgggctcggcagcgcggctagcactaggcgacggcacgtggctcgtgtgaccaaggcggcggtgggcggccatggggagagtcgtgtgggggtggtggcgtggcgcctcggcgacgcatggcttgggcctgggcggcggctgggcgcgaccgaggtggacgcggcacggtggcggagcgagcactgggcaacagtagggaggagcccgggggcgtcgcgccaggcaggagtaggtcgggggcgccggtggctcattgaggcgcgaaggatccgccggcgttggagatgggaagggcggatctggcgcccccttcctcttccccgcaggccacagatcccgtcgcctctccgtcccccacgcgcctagaatgatccggtgcccgctcccactaccgcgtggatcccggccaccgcctatctgcccctcacgcatgtggatccggcgccggcgccccctcccaccgacaatgtggccgcacaagtcagcctggtggtctggtgggaactgacaccacggttgcattctttttaatatggtatagttataatgtaattactccttccgttccataatgtaataccgtatttctagattcattacactataatatgtcatatccatccaaaatctcttatattatgggatggagagagtatattatagcatactatagctgcttctaaatattctatgagggattttctagttaaaaaaaactatagatacaaaattccctttcggctagaaggaagaataaaaaagattacgatg

SEQ ID NO: 81083 - DNA, 3084 bp, Oryza sativa
  Clone ID: PAT_MRT4530_80645C.1
atggcacggggctccgctccgcttgacggtagcgtgctgccgccttcccgcatcgtgagcgagagacaggccgggctgccgcgccgcttcatgccagaatctgccaccggccgggagatagtctcactgggcgagggatgccctgcgccacgctacccggggcggtccgtcttcttcctcccttttgctatggcagggctggttccgccattttcttctttcttcatggatgttctggagttttacgatctccagatggcgcacctcacccccaacgcggtaatgacattggccatcttcgcgcacctgtgcgagatgttcatcggggtgcgcccatcccttcggctgttccggtggttcttcaccgtacagccggtgtcgccgccgtcggtggttggtggttgctacttccagccgcgggggccggtgctgaaccgctacattccctgcgtcctccgcaagaagtgggatgactggaagagcgactggttctacacccccctcgccgacgaagcgcgcctccgacttccgagccagcctccagcgcaggcctccaactggcgggcgccggtagatctgggagatggctacgacgccgtcctcgaccgcctggcgggcctgcgatcccaggggctcacaggggccatggtgttcggcgactatcttcgtcgccggatcgcgccactccagcggcgcgcccggggcgcctgggagtacaccgggtccgaggactgtatgaggacccaccggggggtcaaatgggactgggtccccgaagacttcaaggtaatgatccaacgggtgctgaatctcagctccgcggaggcatccctcatcccccaaggagtcctccccctctgcagcgatccagatcgcgccaacatcctgtccatcataatggcggcggggcctcagaggaacgagctcctaagggccatgacggtgcgagcgggagccacaagggagatcaatctaccccaggagggggttgtgcttccgggccccgtgatgggggctcggggggcagccgccctgccgacgcccgagggaagaggaagcaagagggtacttcctccccatctcctccccgagggggcggggcggcgcgtgtcagcagcaggcgcccggagggggccgcgccgacgccgcagcccgagggggagcggaagaagaaacggctccgcaagatgggggggacagaaccatcccggggaaacctcatttcccctccaaggtggtcgtttaaccgaccccctcgcaggttcgtcccacgcccattgtggctgtattcattcttccaacacaagttttcattcacccatcttgtttgtcttctggcttttcttctgcttcagcgagatcccgtcgcgtccttcttgccaattcaagtccggccaatctgaggccgagaatgcggcgaccacggaggctcggaggcgggaatctgaccggcgagaagccgcggatcgcctacgggaagccgaggaggccgcccaggtggccgtccgaactcgccaagctgaagaagccgctcgggaggaggccagacttcgccaggccgaggcggcgacgacttccgaggcagctcgcgacgaggccgcgggcgcatcgcttgggcccactccctcgggcgacgctcaggacaagccaggtccgggggacatccctgaatccggcacgtccatcggcgggccgagccgcgcgacatcctcaccgaggcggctctcccccacgccttccgctgccccactgagcgcagagcctcttctgcaggccttggccgtcgctaacaccacggtgttggacgggttaagtgcccagatggaggccttgcaagcagagcgggtggagctcgacgccgcatgggcacgtgtcgaagaggggcgtcgctcggtggaggccatggtggaggtgggccgcaaggcacaccgccggcacgtctcagagctcgaagcccgtcggaagatgctgggggagatcgccagggaggtggaggaggagaggggggctgccctcatcgccactaccgtgatgaacgaggcgcaggacgacctccgccttcaatacgggagctgggaggcggagctagggaagaagctcgacgccgcccggggggtccttgacgctgccgctgcccgagaacggcgggcggcggagaccgagcgtgcctgcgtcgtggagagggacctggcggaccgcgaggccgccgttgctattcgggaggtcacactggcggtgcacgaagccgcctgtgccgaagaagagtccgcactccgcctccgcgaggatacgctcaccgagcgggagcgagccctcgaggaggccgaggccgcagcacagaggctagcggagagcgcgtccctccgcgaagctgcgcaagaggaacaagcgcgtcgcaatctggaaagtgcccgcgccgagagggccgcactgaaccagcgggccgctgaactcgaggcgcaggcaaggaagctggatgcaagggcgcgtagcggcggggcggccacgggcgacagcgacttagccgcccgcctcgcagctgccgaacacaccatcgcggatctgcagggcgcgctggattcgtccaccggggaggtcgaggcccttcgcctggcaggcgagatagggcccagcatgcttcgcgacgccgtgtcccgtttagaccgcgccgggcggcaggcgagtctctggggcgggcggactgtgaagtacgccgccaaccaagggggcctcgcccagcgcctctcggagatggccgggactctccagcggctccccgaggagctcgaggggacgattaagtcatcctcgagggacctcgcccgaggagcggtggagctcgtactggcgagttaccaggccagggaccccgacttctccccatggacggcgctggacgagttccctcccgggaccgaggacggcgcgcgcgcgcaggtccgggatgccgccgaccatatcgtccacagcttcgagggttcggcccctcggctcgcgttcgccctcaactccgacgaggagggcgatgacggcggtgtgggcgacagtggcgacgaggctggcgacccgggtgcatcggagtga

SEQ ID NO: 81084 - DNA, 472 bp, Oryza sativa
  Clone ID: PAT_MRT4530_80646C.1
ctgcaggcaaccggctaaagaaaaaaccgatgacgggcttccgaggctatcaccaccggttgccaaaccagcagtacacactacctaatatgaatatcactgtcggtcacccgggaggacaaatataaccaacacgacaaggctgcatggctgccatagctcgaacatatgatattgttaacagtgaaatttggtaatcccttaagagaattatcacatcgccaatattcagattctttggacctgcactagagctaagcggatctctcaagccagtgtatgttttttgcatcaacagatatttatgaaatatcatacgctggtcctctgcctgctgccttctgcatgctgaaaaaaaatactgattccctcccctgacagctgcaccttgcttctgcatgctatatgcgttgatctaataccgctgcatgcaagccctctctctttcttaaatacaaaaatattttaaaga

SEQ ID NO: 81085 - DNA, 2901 bp, Oryza sativa
  Clone ID: PAT_MRT4530_80647C.1
atggcaaggggctccgcaccgctcgacggtagcgtgctgccgccttctcgcatcgtgagcgagaggcaggccgggctgccgcgccgattcatgccggaatctgccaccggccgggaggtggtcgcgctgggtgagggacgcccggcgccacactacccggggcggtccgtgttcttcctttccttcgcaatggcagggctggtcccgccattttcttctttcttcatggatgttctggagctttatgatctccagatggcgtacctcacccccaacgcggtaatgacgttggccatcttcccgcacctgtgcgagatgttcatcggggtgcgcctatctctccggctgttccggtggttcttcaccgtacagccggtgtcgccaccgtcggtagtcggtggctgctacttccagccgcgggggcaggtgctgaaccgctacattccctgcgtccttcgcaaaaagtgggactactggaagagcgattggttctacacccccctcgcggacgaagcgcgcctccgacttccgagccagcctccggcgcaagcctccagctggcgggcggcggtagatctgggagacggctacgacgccgttcttgaccgcctggcgggtctgcgatcccaggggctcacgggggccatggtgttcggcgactaccttcgtcgccggatcgcgccgctccagcggcgcgtccggggtgcctgggagtacaccgggcccgaggacatcatgaggacccaccaggggcgcaaatgggactgggaccctgaggacttcaggatggtggtccaacgggtgctgaatctcagctccctggaggcatccctcaacccccaaggtgtcctccccctctgcagcgatccagagcgcgccaacatcctgaccatcatgcaggcggtcgagcgtcaggggagcgggctcctcgaggccacgatggcgcgggcgggagccgcaggggggaacaatctaccccgggagggggtcgtgcttctgggccccgtgacgggggcccggggggcagccgccctgccgacgcccgggggaagaggaaacaggaggataccccctccccatctcctccccgagggggcggggcgcgagatcccgtcgcgcccttcccaccattccaagtccggccggtctgaggccgaggagacggcgatcgcggaggcccggaggcgggaagctgaccggcgagaagccgcagaccgcctccgggaagccgaagaagctgcccaggaggccgtccgggctcgccaggctgaggaagcagcttgggaggaggccagactccgccggaccgaggagtccgtccgggagacggaggcggcgcgcgcacgctgggcggcctgccaagcccccgacccgactccgcccgaggtgacgacaacttccgaggccacccacgacgaggccgcgggcgcgccgctcgggcccgacccctcgggcgacacttgggacgagccagcttcgagggacgcccctgagtccggcacgtcgatcggcgggccgagccgcgcggcgcccacaccgaggcggctctcccctctgtcttccgctgccccactgagcgaggagcccttcctgcaggccttggccgccgcgaacagcacggtgctggacgggttaagtgcccagatggaggccctgcaggcggagcgggcggagctcgacacggcgtgggagcgcgtcgaagaggggcggcgctcggtggaggccatggtggaggcgggccgcaaggcgcaccgccggcacacctcacagctcgaggcccgtcgtagggagctggcggagatcgccagggaggtggaggaggagcgggagactgccctcatcgtcaccgccgtgctcgacgaggcgcggaacgacctccgcctccaatacgggagccgggcggcggagctggaggagaagctcgacgccgcccggggagtccttgatgccgccgctgcccgggaatggcgggcggcggagaaagaggcggcgtcccgccagcgcgaagaggcccttgaggccgccgtcgccacccgggaggcaacactggcggcgcacgaggccgcctacgccgaagaagagtccgcactccgcctccgcgaggacgcgctcaccgaacgggagcgagctctcgaggaggccgaggccgcggcgcagcggctggcggacagcctgttcctccgcgaggcagcgcgggaggagcaggcgcgccgcaatctggaaggcgcccgcgccgagagggccgcactggatcagcgggccgctgagctcgaggcgcgggcgaaggagctggacgcgagggcgcacagcggcggggtggccgcgggccacggcgacctagccgcccgcctcgccgccgccgaacacaccatcgccgagctgcagggcgcgctggactcgtccgccggggaggtcgaggccctccgcttggcgagcgaggtagggcccggcatgcttcgggacgccgtctcctgtctagaccgcgccgggcggcaggcgggtctctggggcgggcggcacgcgaagtacgccgccaaccaagggggcctcgcccagcgcctctcagagatggccggggtcctccagcggctccccgaggagctcgaggagacgatcaagtcatcctcgagggacctcgcccggggggcggtggagctcgtactggcaagctaccaggccagggaccctgacttctccccgtgggcagcgctggaagagttccctcacggaaccgaggatggcgcgcgcgcgcgggtccgggacgccgccgactacatcgtccacagcttcgagggtacggcccctcggctcgcgttcgcgctcgactccgacgaggagggcggtgacgacggtgcggacgacagtggcgacgaggccgacggcccgggggcgccggagtga

SEQ ID NO: 81086 - DNA, 3102 bp, Oryza sativa
  Clone ID: PAT_MRT4530_80648C.1
atggcacggggctctgctctgctcgacggcagtgtactaccaccttcccgcatcgtgagcgagaggcacgccggactgccgcgccgcttcatgccggagtccgccaccggtcgggagatagtgatgctgggcgagggacgcccggcaccagactacccggggcggtccatcttcttcctccccttcgcaatggctgggctggtcccgccattttcttctttcttcatggatgtcctggagttctacgatctccagatggcgcacctcacccccaatgcggtgatgacattggccatcttcgcgcacctgtgcgagatgttcattggggtgcgcccctctcttcagctgttccggtggttcttcaccgtgcagtcggtgtcaccgccgtcggtggttggcggctgctacttccagccgcgggggccggtgttgaaccgctacatcccctgcgtcctccgcaagaagtgggacgactggaagagtgactggttctacacccccctcgccaacgaagcgcgcctccgacttccaagccagcccccggcgcaggtctccagctggcgggcgccggtagatctgggggaggactacgacgccgtcctcgaccgcctggcgggcctgcgatcccaggggctcaccggggccatggtgtacggcgattacctccgtcgccggattgcgccgctccaacggcgcgcccggagcgcctgggagtacactgggcctgaagactacatgcggacccaccagggagccagatgggattgggctcccgaggacttcaagatcgtggtccaaagggtgctgaatcttagctccgtggaggcgtctcgcattcctcaggagatcctccccctctgcagcgatcccgaccgcgcctccattctaaccattatgatgggggtcggggcctcagaggagagagcccctaagggccacgacggcgcgggcgagcgccgccggggggaacaatctgccccaggagggggtcgtgcttctgggccccgcgtcgggggctcggggagcagccgccctgccgacgcccaggggaagaggaagctgggaggaacacctcccccatctcctccccgagggggcggggcggcgcgtgccagcagtcggcgcccggagggggccgcgccgacgtcgcagcccgagggggagcgcaagaagaaacggctccgcaagacgggggagacggaaccatgccggggaaacctgatttcccctccaaggtggtcattcaaccgaccccctcgcagcgatgtcccgtcgcattcctcccgccaccccaagtccggccagtccgaggccgaagatccagcggccgcagaggagcggaggcgagaatctgaccggcgtgaagccgcagaccgccttcgggaagctgaagaggccgcccgggaggccgcccggattcgccaagcggaggaagctgctcgggaggaggccgcccgggctcgccaggctgaggcaacaactgctgctggcgcatcaactgggcccactccctcgggcaaccctcaggcgacagcctccggggaggctcacgacgaggccgcgggcacatcgcctgggcccacctccccgggcgacgcccaggatcaaacgggtccgggggacatccccgagcccagcacgtcctccggggggccgagccgcatcgccttctctccaaggcggctcttctcctcatcttccgtcgccccgctgagcgccgagcccattctgcaggccttggccgccgcaaacaccgcggtgctagatgggttcagcgcccaagtggaggccctgcgcgcggaacgagcggagctcgaggccgcatgggcacgcgttgaggaggggcggcgctcggtggacgccatggtggaggtgggccgtaaagctcaccgccgtcacgtctcggagcttgaagcccggaaggcggcgctgacggagatcgctcgtgaggtggaggaggagcgagcggccgcccttatcgctaccaccacgatgattgaggcgcaagacgccctccgccttcaaaacgccaaccgggaggcggagctgaaagaaaagctcgacgccgcccagggagtccttgactccgccgctgcccgagagcggcgggtaacagagagtgaggcggcgtcccggcggcgcgaggagtcccttgaggcccgtgctatggcgctggaagaacacgccggcgccgtggaggaaggcttgacggaccgcgaggccgccgctgctctccgggaggcgacgctggcggcgcacgaggccgcctgcgccgaggaggagtgcgcgctccgcctccgcgaggacgcactcgctgagcgggagcgagctctcgaggaggctgaggccacgaccaaacggctggcggacagcctgtcccttcgcgaggcggcgcaggaggagcaggcgcgccgcaatcttgaatgcgtccgcgccgagagagccgcactggagcagcgggctgctgacctcgaggcgcgggaaaaggagctggacgcgagggcgcatatcggtggggcggccgcgggcgaaagcgacttagccgcccgcctcgcagctgccgaacacaccgtcgccgatatgcagcgagcgctggactcctccaccggggaggccgaggcccttcgcttggcgggcgagattgggcccgacatgctttgggatgcggtctcccgcctgaagcgcgccggtcggcaagcgggtctctggaaaggccagacgacggtgccccccaccaatttggaaggcctcgctccgcacctcaacaggatggcctgggttctcgaacaactccccgaggagcttgagaagaccatcaagtcatcctcgagggacctcgcgcggggagcggtcgaactcgtgctggcgagttaccaggcccgggaccccaacttctctccatggatggcgctggaggagttccctcccgggaccgaggacgatgcgcgcgcgcgggtccgggatgccgctaaccacatcgtccaaagcttcgaggggtcggcccctcggctcgcgttcgcccccagctccgacgaggagggcaacaccagcagtgcagacgatggtggtgacgaggccgtcgactcgggcgcgtcggaatga

SEQ ID NO: 81087 - DNA, 3084 bp, Oryza sativa
  Clone ID: PAT_MRT4530_80649C.1
atggcacggggctccgctctgctcgatggtagcgtgctgccgtcttcccgcatcgtgagcgagaggcaggccgggctgccgcgccgcttcatgccggaatctgccaccggccgggagatagtcacgctgggcgagggacgcccggcgccatgctacccggggcggtccgtcttcttcctcccttttgcaatggcagggctggttccgccattttcttctttcttcatggatgttctggagttttacgatctccagatggcgcacctcacccccaatgcggtaatgacattggccatctttgcgcacctgtgcgagatgttcatcggggtgcgcccatcccttcggctgttccggtggttcttcaccgtacagccggtgtcgccgccgtcagtggttggtggctgctacttccagccgcgggggccggtgctgaaccgctacattccctgcgtcctccgcaagaagtgggatgactggaagagcgactggttctacacccccctcgccgacgaagcgcgcctccgacttccgagccagcccccagcgcaggcctccaactggcgggcgccggtagatctgggagatggctatgacgccgtcctcgaccgcctggcgggcctgcgatcccaggggctcacaggggccatggtgttcggcgactaccttcgtcgccggattgcgccgcttcagcggcgcgcccggggcgcctgggagtacaccgggtccgaagactacatgaggacccaccagggggtcagatgggattgggctcctgaggacttcaagatagtagtccaacgggtgctgaatctcagctccgtggaggcatccctcattccccaaggagtcctccccctctgcagcgatccagatcgcgcctccatcctgaccatcatgcaggcggtcggggcgtcggaggagcgggctcctcgaggccacgatggcgcgggcgggagccgcaggggggatcaatctaccccgggagggggtcgtgcttctgggccccgcgacgggggcccggggagcagccgccctgccgacgcccgggggaagaggaagcaggaaggaacccctcccccatctcctccccgagggggcggggcggcgcgtgccagcagcaggcgcccggaaggggccacgccgacgtccgagatcccgtcgcgtccctcccaccattccaagtccggccagtctgaggccgaggatccggcggccgcagaggctcggaggcgggaatctgaccggcgagaagccgcggatcgcctacgggaagccgaggaggccgctcgggaggccgcccgggctcgccaggccgaggaagccgctcgggaggaggccggactccgccaggccgaggcgacgacatcctccgaggcgacccgtgaaactgaccggcaagaggccacggatcgccttcgggaagccgaggaagctgcccaggtggccgtccgagctcgccaagctgaagaagccgctcgggaggaggccagacttcgccaggccgaggcgacgacgacttccgaggcagctcgcgacgaggccgcgggcgcatcgcttgggcccactccctcgggcgacgctcaggacaatccaggtccgggggacatccccgagtccggcacgtccatcggcggcccgagccgcgcggcatcttctccgaggcggctcttccccacgccttccgttgccccactgaacgcagagccccttctgcaggccttggccgtcgcaaacaccacggtgttggacgggttaagtgcccaggtgaaggccctgcaagcagagcgggcggagctcgacgccgcatgggcgcgtgtcgaagaggggcgatgctcggtggaggccatggtggaggtgggccgcaaggcacaccgccggcacgtctcagatcttgaagcccgtcggaaggtgctggcggagatcgccaaggaggtggaggaggaacggggggctgccctcatcgccaccaccgtgatgaacgaggcgcaggacaccctccgccttcaacacgggagctgggaggcggagctagggaagaagctcgacgccgcccggggggtccttgacgctgccgctgcccgagaacggcgggcggcggagaccgaggtggcatcccggcggcgcgaagaagcccttgaggcccgtgccatggcgctgaaagagcgtgcctgcgtcgtggagagggacctggcggaccgcgaggccgtcgtctccatccgggaggcaacgctggcggcgcacgaggccgtctgcgccgaagaggagtccgcactccgcctccgcgaggacgcgctcaccgagcgggagcgagctctcgaggaggccgaggccgcggcgcaacggctggcggacagcctgtccctccgcgaggcagcgcgggaggagcaggcgcgccgtaatctggaaggtgtccgcgccgagagggccgcactgaaccagcgggccgctgaactcgaggcgcaggcaaaggagctggacgcgagggcgcgcagcggcggggcggctgtgggcgaaagcgacttagccgcccgcctcgcagctgccgaacacaccatcgccgatctgcagggcgcgctagactcgtccgccggggaggtcgaggccctccgcttggcaggcgaggtagggcccggcatgcttcgggacgccgtctccggtctagaccgcgccggccggcaggcaggcctctggggcgggaggacagcaaagtacgccgccaaccaggggggcctcgcccagcgcctcttggagatggccgggactctccaacggctccccgaggagctcgagaggacgattaagtcatcctcgagggacctcgcccgaggagcggtggagcttgtactggcgagttaccaggccagggatcccgacttctccccatggacggcgctggacgagttccctcccgggaccgaggacggcgcgcgcgcgcaggtccgggacgccgccaaccacatcgtccacagcttcgagggttcagcccctcggctcgcgttcgccctcaactccgacgaggaggacgatgacggcggaatgggcggcagtggcgacgaggctgacgacccgggtgcatcggattga

SEQ ID NO: 81088 - DNA, 277 bp, Oryza sativa
  Clone ID: PAT_MRT4530_8064C.1
tgggctgagggacgatgactccaccacccgtgccgtgaggggaggccgcagcctcgtcatcatcgtggttgctctccacatatctgaagctttcgagcctccattctcagcttcccagggcaagcctcatcgatctgtagcgttgtatcaagaagcagcggcaagctcgttcgtccttttcaaggctttcaagcaagaagcaaatagcagcagatctggagcagcaaaagcggatttcatcaccgccgcgacttccgcgggggatagcaccgcctga

SEQ ID NO: 81089 - DNA, 679 bp, Oryza sativa
  Clone ID: PAT_MRT4530_80650C.1
gttgggttttttttttttcatcacacacaaaaatctagaacatttcatcacagataaaagtctttatgaacatatcacacataaaacagccatggcaagcaagcaattcatcaaacaccagaataaccacgagagagatggatgcagaaatcagatctgggttcaaatcacaagttgagatcgaatcataccacgatgggcttgaactccttggcatgctggaccttcttgagctcggtctggaggcgacctcgtccccattgctgctcgacgccgccctcttcgccttctgcacccgggaagcggcgtacgggcggatctgcacccggcagttggggacgcagccggcggacggaggagacgacgcccggcagttgaggacgacggatccggcgccaggcggacggggattgaggccgcggcgccgccgctcacctcctcctcgcggtcgaggatgcaggccgccgaactgccgctcgccgttggaaccacctcgcacctcgccgccgccacgcatcgctgagccaccgcccagcgtcgccgctgccacgcgccgccgcaccacctcgccgcttcgccaccgcaccgccgccgccgccacgcaccgctgagccgcagcccggcgccacgtgtcgccgaaccagagccgccgcccagcgccaccgccgccgccgcgcat

SEQ ID NO: 81090 - DNA, 826 bp, Oryza sativa
  unsure (1)..(826): unsure at all n locations
  Clone ID: PAT_MRT4530_80651C.1
ccggccgggacaatcctcttctcttgcttctccctgcgatttctcagcttcctcccgagacctctccctcctctgcttctctctctctctcagccgacacaccgggctccagttttcttctactccgtttgttcaggttcaaaccaagaagaagaagaagaacaaggagagagagagagagagagagagagagagagagagagagagagaacctggggaatgctgtgtctccttcctcctcgccgatgagccaggtgagctgctctagcaatgagggcaaagaagttgacttgcaaatgctactaaatgggcgaattagcagtcagttaatgtagcagcatagactctactgatacaagagaaaatgagcgtgtatgctttgaaaagtccgaagggaccattgtttcctctgcgatcaattcttgtcttcttaattgcattatttgggttctacgtctgctacttctcctttaatcaaatagatttagaaaataaagaaaatttgatcagtggagaagaacaaataagaactctttgcagaagacatacaattccaaatgagctgatgcaatatgtgcactttccaaaacctacgagttacagtaggggggaatgcgcgtgtactccagttcggttttttgttatcatttctatgcaaagatcaggaagtgggtggtttgagactttgctaaatagccatcccaatgtcagttcaaatggcgaaattttctcaataagagagagaagagaagatatctcatctatcttgaggacgctngataagctttataatctggattgcacaccagtgcagcaaaaatgaatg

SEQ ID NO: 81091 - DNA, 254 bp, Oryza sativa
  unsure (1)..(254): unsure at all n locations
  Clone ID: PAT_MRT4530_80652C.1
cacgcgtacgtaagcttggncttaataanagcgccgccctgtgtgtcggggtgtgtttttatatattttttttttggggggtttttttttttttgggaaaannggaagtaaactttgttgcttttcatcaccactgggggccctaaaggcaccctttttgatatttcccctctttcctaaagaaaccatanntggttgaagaaagggttanaatttttttttccaaaannnnctttctttaaaaccatacccca

SEQ ID NO: 81092 - DNA, 425 bp, Oryza sativa
  Clone ID: PAT_MRT4530_80653C.1
gcacgaggggggcccagttcaattagcttgcacgtggggttaagttgcttgggacaagttccatccagtgtgccagccccaggctgaacaaataccgtgacgcatttgctcttgccctaagagaagtcctaggcccatggaaggtctggcccattattacaacacaataatctgtcaagagaccggcccataattcgcacggatcagcctggagtcccgggacctacgatgaaagtacctgcctgagtttttcttttccgattaaggcctgttggaattgttcagatattagtttcacatacaaaatcccaggattttacccacaccatacgagcagatcagcagtgaagagaaccgagaacagacaatgcagtagtacagtacactcaagactcgacaactatgctagcggggtcaacttggca

SEQ ID NO: 81093 - DNA, 5322 bp, Oryza sativa
  Clone ID: PAT_MRT4530_80654C.1
atgccgctcgacgactactggcctgcggcggtggcggtggcggtcgccgggaacgggatggcgacagcgccctcattgacgacgacgacgacgacgctctcgggcctaccaccacgcctgagcatgagcaggccacggccggatgcggcgaaccactggcggtcgtcgtcccctcggcgtctagttccagcacgctcacatccatcatccatggccagcctcagccccgccacgaccgacgccgagcagagcgccaatgtcgctgcgactaacctgccgtggctggacctaggacacgccaaccccttcgcgatgatggaccactatgccggcgtgctggacgagctcaggtggtctgactacttcgacggcgcataccaagcgttccgattcagcagcctcgacttcatcaccaacgacttcggcaagatctctctccttgactcggattcaaaccagtcggggagaaaccaggtccccgtgccgttcggtattccgaactcggccgaggcctactccaagatcatctctcctaagtcggtttcaagccactcggacgagatccaatctattcccccacgatcagatcaagacgacgggtcctatccctcaatcttgatgaaacttcctgatgacttggccgccgtcttcacagccaaaacatctcccactcggagatctaggcgagctccggcaccggccccgatccagtctacatccagggaggttggcgttatactccaacctcttgggacagtctcgacggaagagttggatggctacctcagctcccccggcgtcagttcccgaccaactgagatcctcgactatgacgacttcggctaccactacgaccatggcgacttcgacaacttcgacgacagctacgaggataactacacgcccctcttcttcggcgtattcatggctgacaacgaaacggaagaacagcgccgagcccgagaagcagaacaagatcgcgcacggcaagaagctgaacatcgcgaacggattgcaaaggaagctgaagatcgacggcaccgcgccttggtatctgggcgccgagcgagagagctcattgggcaacaagacgtcgacgggacagcggtctttcgcaccccccagcagaacgtggttgcagcaatcactctcctcgacaccctcctcaaggaagacgccctcaaccaagccgatcatgttgtcaacatcttgaaccagacgaagaccatgatcgctacctcggttccagccaactccgcaagcacccgcaccccgactggtagccgagtccctcatcatcagccaagcctcagcatcaccggcacaggatctagtcgcaggagcaggggtcacgacgaacgatctgttcactcgcttcccgaacgtcacagggagcgccgagctgaacggcctcgttctccacctcgccagcgtcccgtcgaccttcgtgacacgatcaaccagcgccgtgcagcacgaggtcaccgtcattcaccaaatcgctacgacgacgacgtggatggagtagctgccttcactaatgacctgcgtcgagtggattggccagtcggcttcaaaccgactggaatcgagaagtatgacggcaccaccaatctggagtcttggctcaccgtctacggactcgcaatccgcgcagcaggtggagacagcaaggccatggcaaactatctacctgtggccctagcggactccgcccgatcctggctccacggactaccccgtggcatgatcggatcatgggcgaaacttcgtgatcacttcatcgccaacttccagggcacctttgaacgccccggcacacagtttgatctctacaacgtcattcagaagtctggagaatcccttcgagattacatccgacgcttctccgagcaacgcaacaagatctccgacatcaccgacgacgtcatcatcgccaccttcactaaaggcattcgccacgaggacctagtcagagggagtggaaataacaaccacaaggatcgcaagcgtaagcccgaagaacttgtggcgaccacctctccatcttcccgacaacgtccccgcgtcaacaccttcgacaagataatgaactctcaatgtccgcatcatcccaattccaaccacgtggccaaagattgcttcgtctacaaacagttcgcggagcaatacgtcaagaacgcacgcaaacctgcagacggagatcagggcacatcaaagaagaaagatgatgaagatgatgccccgactggttttcaagatcatcgcaaagaacttaatcacatcttcggcggacccctggcttatgagtccaagagaaaacagaagctaacagaacgggagatcaatgcggttcagcctaacacgccccagtatcttcggtggtcagaaacagcaattaagttcgaccgctcggatcatcccgaccgagtggtccacccggggcggtaccccctggtactagacccagtggttcgcaatgtcaagctccgacggactctcatcgatggtggcagcgcactcaacatccttttcgctaagaccctggacgatatgcagattcctcgcacggaattaaagccgagtaatgcacccttccacggtgttatcccaggattgtcagctacaccactcggccagatcactcttccagttaccttcggcactcgggaaaattttcgcacagaaaatgtttgtttcgaagttgccgatttcgagacagcatatcatgctatacttggacgaccggctttagccaaatttatggccgtcccacactacacctacatgatgatgaagatgcctggtcctcgaggggtcatatcactacggagcgacatcaagcaggccgtcacatgcgacaaagaaagctacgagatggcccaaacccacgagactactcttgctcgcgaagagatccgactgtctgcaaccacggcaggcgagggagaagtgcctgcaaccaagctgacaaagaccgaagaaagtgatgccaaggcgaaaaagattcccctagatccctccgatcctgataagactgctaataataaagatatttttgcgtggaaaccatccgatatgcctggtatccccagagaggtgattgagcactctttacatgttaaggaagacgccaaacccatcaagcaacgactccgccgttttgcacaagacaggaaggatgcgatcaaggaggaattaaccaagctgttagcagcaggtttcataaaggaagtccttcatcccgactggctggctaacccagtcctggttcggaaaaagacggggcaatggcgaatgtgtgtcgattataccgacctcaaaaaatcttgtcccaaagacccttttgggttacatcgcattgaccaggtggttgactcaacggccggctgcgagctactcagcttcttggattgttactcgggatatcatcagatccgactaaaagaatccgactacttgaagacctcgtttattacaccctttggggcctactgctacatcaccatgccctttggattgaagaacgcaggagcaacctatcaacgcatgattcaaaggaaattatctcactattttcaaagtcactcggtcacggtggtcacatcgtttccactcggggatatacttcataatcgcgaagcaaacgggcggattgcgaagtgggccttagaattgatgtctttggatatatctttcaaaccacgaacttcgatcaagtcacaagctctagctgatttccttgccgagtggaccgagtgccaagaagacatgccagaggaaaagatggaatattggactatgcattttgatgggtcgaagaggcttacaggcactggagctggggtcgtcttgatttccccgactggagaaagattaagctacgtattgtggatacatttttctgcgtcccataacgtagcggaatacgaagccctactccatggactaaggattgcaatatctctaggtattcgccgactaatcgtccgtggagactctcagttgggtgttaatcaagtcacgaaagagtggtcatgtctagatgttaatatgaccgcttaccgacaagaggtacgtaagctggaagataaattcgacggactcgagctcacccatgtcctccgacataataatgaggcagccgacagactggccaattttggttcaaaactggaagcagctccttcagatgtgttcgtcgaacatctttacgaaccgaccgtacccagaaaggagataactgaagccatggatactcaaggcgtaggcatgcttgaagccgattggagagaaccgtttataaagtttttgagcaaacaagaactccctcaagacaaaaatgaagtcgagcggatttccaggcgcagcagactttacattattcatgagactgagctgtacaagaaaagtccatcaggaatactgcagtgctatgtatctttggaggaagggaaacaattgttgaaggatatacactctggtatttgtggtaatcatgctgctgcacggaccattgtcggcaaagcttaccggcaaggttttttttggcctacagctgtgtccgatgtagataagattgtgcggacatgcgaaggttgtcaattttttgccagacaaactcatttaccagcccaagagttgcaaaccatcccgttgtcctggccgtttgcgatctgggggcttgacatggtcggcccatttaaaagggcagtcggcggttacacacatctcttcgtggctatcgacaaattctccaaatggattgaggctaaaccggttatcacgatcacagcagataaagctagagattttttcatcaacattgtgcatcagtttggggtacctaatcggatcatcactgataatggcactcaattcactggcggaacatttaaagacttttgtgaagacttcggcattaaaatttgttatgcctccatggcacaccccatgagtaacggacaagttgagcgcgctaacagcatgatactgcaagggatcaaagcacgagttttcgaccgactacgcccctatgctggcaagtgggtagatcagctgccgtccgtactttggtctttacgcactactcctagtcgggctaccggccagtcgccattctttttggtttatggcgcagaagcaatgttgccgagtgaagtggaatttgaatcactacgatttcggaacttcaacgaggagggctatgaagagggccgagtagacgacatcaaccgactagaagaagcccgagaagcagctttaattcaatcgactcgatacctgcaagggttgcgtcgttatcataatcgaaatgtttga

SEQ ID NO: 81094 - DNA, 402 bp, Oryza sativa
  Clone ID: PAT_MRT4530_80655C.1
atgttcgatattccaagagttgtcgatgggagtaccgtcttcacgtttgagtcgtaccatgccattggcacgttcaacttgtcaattactcatgggatgcgctatggaggcgtaacaaatcttgatgccgaagtcttcacaaaagtctttaaatactccgccagtaaattgagtgccgttatcagtgatgatccgattgggtaccccaaaccggtgcacaatgttgataaagaaatctctaggcttgtctaccgtgattgtaatgaccggtttagcttcaatccacttggaaaatttgtcaacagccacaaagaggtgagtataaccaccaactgcctttttaaacgggccgaccatgtcaagcccccaggccaagacaacgggatggtttgcacctcttga

SEQ ID NO: 81095 - DNA, 1317 bp, Oryza sativa
  Clone ID: PAT_MRT4530_80656C.1
tcagtctccgtgcagttcaaccgtgttacgttccgcgacacgtgctttgtcggacaacctcgtctgatccacagtaacacagcccagcatcctcgtcgagagcgtgaagacacgctgcaggagtgcacggtctgccggcccctgccgcatccatgcggcagcgttattaggcttgccaaaatgctacctggtagccgtcgcatagaagcggctgaggccgaccttggtgccgacggccttgatgtcggcctgcacctgctcgcggaattccctgtaggagaagggcctgtagacgccgccgccgatgccgctgggggcctcgacgacggcgtcctcctgcgggaaggcgaagtagcagcacgacaccctctccgtggaggggcggctcgcgagcaccctgtggcgcacgctctggtacgagccgccgctgatggccgtcatcatgtcgcccaggttgacgaggagctcgccgggcgcgggggcgacgtcgcgccacgcgccgtcgcggatcacctgcaggccgccgacgtggtcctggccgaggatgatggagagcacggagctgtcggtgtggggctccatcccgaggcaggaggcggaggaagggcagggcgggtagcggtacaggcggaggaagccctggcgctcggcgaggtaggacgccgcctggtgatgatccaggcccagctcggcggccagggcgtcgaacagcttgcgggcgatgcgcgccatgtggtcgccgtactccgccatcagcgccctgatccgcatccagccatcatcatcatcatcatcgccatcgccgacctgcgacgacgacgacgacgagccggggacgagatcgacatggagtccctccagccagttgacctccttgacgcggagcgacttcagcgcagccgtgccccagaagtagcccggccgcgccttcttcagctcgaaggtgtcgcgacccagcagctgcttccccagctccagcagccgccgccggagctcgccggggacgccgtggttcaccacgcggaacgcgcccagatcccggcaggccgccaccagcgccgcccggtcctcgccgccgacgcgctccaggtccagcgtcggcagctccagcctgggcagacccggctgcagctgcagctgcagcggcagcggtggcgcctccggctgcgggaacggcgggcacgacgggtccatctgcgtggtcctcgtcgtcgtcgttgacgacgactcgcccccacctcctcctggttgaagcctgccgcacgtggcggcagccctgcaaccttcagagtgcccttttgcttgaaaggtcatcat

SEQ ID NO: 81096 - DNA, 2853 bp, Oryza sativa
  Clone ID: PAT_MRT4530_80657C.1
atggcacggggctccgctttgcttgatggtagcgtgctgccgccttcccgcatcgtgagcgagaggcagggcgggctgccgcgccgcttcatgccggaatctgccaccggccgggagatagttacgctgggcgagggacacccggcgccatgctacccggggcggtccgtcttcttcctcccttttgcaatggcagggctggttccgccattttcttctttcttcatggatgttctgaagttttacgatctccagatggcgcacctcacccccaacgcggtaatgacattggccatcttcgcgcacctgtgcgagatgttcatcggggtgcgcccatcccttcggctgttccggtggttcttcacaatacagtcggtgtcgccgccgtcggtggttggtggctgctacttccagccgcgggggccggtgttgaaccgctacattccctgcgtcctccgcaagaagtgggatgactggaagagcgactggttctacacccccctcgccgacgaagcgcgcctccgacttccgagccagcccccggcgcaggcctccagctggcgggcgccggtagatctgggagatggctatgacgccgtcctcgaccgcctggcgggcctgcgatccctggggctcacaggggccatggtgtacggtgactatcttcgtcgccggatcgcgccactccagcggcgcgcccggggtgcctgggagtacaccgggtccgaggactgtatgaggacccaccggggggtcaaatgggactgggctcctgaggacttcaagatagtggtccaacgggtgctgaatctcagctccgtggaggcatccctcattcctcaaggagtcctccccctctgcagtgatccagaccgcgcctccatcctgaccatcatgcaggcggtcggggcgtcggaggagcgggctcctcgaggccatgatggcgcgggcgggagccgcaggggggaacaatctaccccgggagggggtcgtgcttctgggccccgcgacgggggcccggggagcggccaccctgccgacgcccgggagaagaggaagcaggaaggaacccctcccccatctcctccccgagggggcggggcggcgcgtgccggcagcaggcgcccggagggggccacgccgacgtcgcagcccgagggggagcggaagaagaaacggctccgcaagatgggagggacagaaccatcccggggaaacctcatttcccctccaaggtggtcgatcccgtcgcgtccctcccgccattccaagtccggtcagtctgaggccgaggacccggcgaccacagaggcccagaggcgggaatctgaccggcgagaagccgcggatcgccttcgggaagccgagaaggccgcccaggtggccgtccgagctcgccaagctgaagaagccgctcgggaggaggccagacttcgccaggccgaggcggcgacgacttccgaggcagctcgcgacgaggccgcgggcgcatcgcttgggcccactccctcgggcgacgctcaggacaagccaggtccgggggacatccctgagtccggcacgtccatcggcgggccgagccgcgcggcatcctcaccgaggcggctcttccccacgccttccgttgctccactgagcgcagaaccccttctgcaggccttggccgttgcaaacaccacggtgttggacgggttaagtgcccaggtggaggccttgcaagcagagcgggcggagcttgacgccgcatgggcgcgtgtcgaagaggggcgacgctcggtggaggccatggtggaggtgggccgcaaggcacaccgccggcacgtctcagagctcgaaacccgtcggaaggtgctgggggagatcgccaaggaggtggaggaggagcggggggctgccctcatcgccaccaccgtgatgaacgaggcgcaggacaccctccgccttcaatacgggagctgggaggcggagctagggaaaaagctcgacgccgcccggggggtccttgacgctgccgctgcccgagaacggcgggcggcggagaccgaggtggcatcccggcggcgcgaagaaacccttgaggcccgtgccatggcgctggaagagcgtgccagcgccgtggagagggacctggcggatcgcaaggccgccgttgctattcgggaggtcacactggcggtgcacgaagccgcctgtgccgaagaagagtccgcgctccgcctccgcgaggacgcgctcaccgagcgggagcgagctcttgatgaggccgaggccgcggcgcaacggctggcggacagcctgtccctccgcgaggctgcgcaagaggaacaagcgcgccgtaatctggaagactcgtccgccggggaggtcgaggccctccgcttggcaggcgaggtagggcccggcatgcttcgggacgccgtctcccgtctagaccgcgccggccggcaggcgggcctctggggcgggcggactgcgaagtacgccgccaaccaggggggcctcgcccagcgcctctcggagatagccgggactctccaacggctccccgaggagctcgagaggacgattaagtcatcctcgagggacctcgcccgaggagcggtggagctcgtactggcgagttaccaagccagggatcccgacttctccccatggacggcgctggacgagttccctcccgagaccgaggatggcgcgcgcgcgcaggtttgggatgccgccgaccatatcgtccacagcttcgagggttcggcccctcggctcgcgttcgccctcaactccgacgaggaggacgatgacgacggagtgggcgatagtggcgacgaggctggcgacctgggtgcatcggagtga

SEQ ID NO: 81097 - DNA, 1290 bp, Oryza sativa
  Clone ID: PAT_MRT4530_80658C.1
atggctgacggcgagtctccgccatgggcggagctcgtccccgacatcgtccgcgagatcggccgccacctcctgtgcgagattgaccgccaccatgcggatggcctctgcaggtcctggcgcgacgcgctcctacaactccggcccccgcctccgccgctcccgcggctcgtcctcccggaagccgacgggcccgcgttctactgcgtccctagcggctgccgcccccaccccttcgtcctcccgcccgccgcgctccgcgcgcggtgcttcggctcgtacgacggagcctggatcttccaggccgtcgaccaggcggcgaaccacgtcctcctcaacctcatcacccaccagcagctcaacctccccaacctgctccgtttccactccttcatgcttccggcattgacatttgacttcgaggtcgccttcgtcgcggccaccctctctagccggccgactgatcagggatgcgtcggcgccggcatcatcagcttcaaccgcgtgccccacgacccaaggcacatcgcgttctggtgcatgggcgatgaggcgttctcgtggtccatccagatgacgaggaatattggcggggcactggaactggatgtggtggacctcctgtacagcagccatggcgctggcgccttcctcttcctcacccgacgggaagacatccatgtgtttcgtcaaccgatattccctcagggagacgtgatgcagtcgacaccgctctacttcgagcggcgcggtgacgacgacgacgacgacgggcggccggtccttgatcgctacctcgtggagtcccgagggaagctgctcatggtcgtcaggttaggagatcgtgagcctgcccgcttgccgaccacgacgttccgggtgttcgagagagaagacgagctgttcaacaactactggaccaagctgcccgaccttggcggccgcatgctgttcgtcggaagaggctgctccagatcatacgaagcggcggatgggtaccccggcatggagggcgtctacttcctggatgaccggagcttccacgacccgatggttgtgcacatgaatgccgccgatcggcagtatccctgcagcgacaacgggagatggtcgggagcacagccaccagcggaggtagagctctgcttcccggagcaagcccaaaaatgtctttctgctgacgatatactgaatgttgtctttggactacttgctttgatcggacgggaagatgcagatactgtagcacatccggcagaccgagccggctgtttctttttatcggcttaa

SEQ ID NO: 81098 - DNA, 366 bp, Oryza sativa
  unsure (1)..(366): unsure at all n locations
  Clone ID: PAT_MRT4530_80659C.1
agctcagatttttacgcagagactcaatttctctctcattttgaatagcctgcaaacgaataaactccatttcctcatcagctgactcccccaaaaatgagaggtccttattaataggatccttctcatgcataagtttccaatcgagtgcttccagtaacttatcttgtaaaacaattatctgctcatgcatcatttctcgttctccttcatcaacaaatgtttgtaaccttcgaatatcttccttcaattgtaagttttccatagcaaaccttgtgacttctggattgcgggtccagtaggncacggagaggcatctacttccttcacaaggtctttcattttcttggcaacagatgtgattta

SEQ ID NO: 81099 - DNA, 816 bp, Oryza sativa
  Clone ID: PAT_MRT4530_8065C.1
atggccgtgaacatttcgactggggtgatgaactcactcctggtgaagctggaagaggtgtgtcgatacgacttggcagagttccaattttctacccaatttgatttcaagaacaatatctggaacttgaaagaggagttgagctgcatgaatgctctactggagaagctgcctgacatggaggctctgaatattcaggagagggagctgaggaacaaggtacgtgagctggcctactttgtcgaggacaaaattgacatgttcatgcacagttttggcactgcagttgacaaggccaccttgctcactgacacgatggagctgatgctccctaacttgttcgccaaaatcgacgaaatcaaggattattatgctgtcgaggaattgctaatggaggacatggaaggagagtcaggacagcatcctaaggtgctctccattgtggggcttgggggtcttggtaaatcaactttggccatccagccagcgagaggagtcttggatgattcggaggtcgagagatcggtagtcattggctccggaggctgcgggttccgcttgggaggcgatggattgggggcttgccctcgcggctgtgggatcaacggcgggcggagatggacagggctggagccgagcgtgggggaggaggccgacgacgaggaaggggatagcgaggaggacgaggtcttggtgacggccggtggcgcagtgctgggaggcgtcgagggcggtggagcaggcgaggtcgtcaaggcggtgatgggagccgcggggttctctccgcatcggctccagatgcgcgattcagggtaa

SEQ ID NO: 81100 - DNA, 264 bp, Oryza sativa
  Clone ID: PAT_MRT4530_80660C.1
atgacaagccgtgaccggatgcctatctgttacgggctgcaatggacccataaaggtgaggccatccgtgacgagctcttcagcccatcactggtgggcataagacaacactcatatgtcttcaattattaccgtgtatataagaggacgtcaggcatgacgatggtcaaggaaacagacaacagggaaatgtttgcaagaagagaatcctgtggcatccatggaggtgtgagaagctcaggtggccttgctcggcacttgtag

SEQ ID NO: 81101 - DNA, 1704 bp, Oryza sativa
  Clone ID: PAT_MRT4530_80661C.1
atgccaagcagagggtgttcatgctggctcttaagcctggcactgctctgctccctggctgctgccaaggagcaataccatgagtttgtgatcagggagacaacagtgaagaggctgtgcaagagccacaacataatgacggtgaacggtcagttcccggggccgacgctggagataaacgaaggggactcgctgatcatcaacctgataaaccgtgggaggtacaacatgacgctgcactggcacggggtgcggcagatgaggacggggtggtcggacgggccggagtacgtgacgcagtgcccggtgaggcccgggcagagctaccggtatcgcttcacggtggcggcgcaggagggcaccctctggtggcacgcccactcctcctggctccgcgccaccgtctatggcgccctcctcatccgcccccgcgatggcaccagctaccccttcgacgtccagcccaccagagagctcgcccccatcctgctcggggagtggtgggacatgaaccccgtcgacgtggtgcgcgccgccacgcgcaccggcgctgctcccaacatctccgacgccctcaccgtcaacgcccagcccggcgacctctacagctgctcctcccacgacacggccgtcttccccgtcacctccggcgagaccaacctcctccgcttcatcaacgccgcgctcaacacggagctcttcgtctccctcgccggtcacaacatgaccgtcgtcgccgccgacgcctcctacaccaaaccgtacaccacctccctcctcctcctcgcccccggccagaccaccgacgtcctcgtcaccttcgaccaacctcccggccgctactacctcgccgcccgcgcctacgccagcgcccagggcgtccccttcgacaacaccaccaccaccgccatcttcgactacggcgccgccaacaacgcctccagcgccgccatcgccatgcctaccctcccggcgtacaacgacaccaccgccgccaccgccttcacgacgaacctgcgcggcctccgcaaggcggagctcccgtcgcgcgtggacgagagcctcttcttcaccgtcggcgtcggcctcttcaactgcaccaacgccacggcgcagcagtgcggcgggcccaacgggacgcggttcgcggcgagcatcaacaacgtctccttcgtgctcccctcctccacctccatcctccaggcgcaccaccacggcgcgcccggcggcgtgttcaccgccgacttcccggccaacccgccggtgcagttcgactacacggcgcagaacgtgagccgcgcgctgtggcagccggtggcgggcaccaaggtgtacaagctcaagtacggctccgccgtgcaggtggtgctccagggcaccaacatcttcgccggcgagaaccaccccatccacctccacggctacgacttctacatcctcgccgaggggttgggcaacttcgacgccggcgccgacacgggcaagttcaacgtggaggacccgccgatgaggaacacggtgggcgtgccggtgaacgggtgggcggtgatacggttcgtggcggacaacccgggggtgtggctgatgcactgccatctcgacgtgcacatcacctggggcctcgccatggccttcctcgtcgacgacggcgtcggcgagctgcagtcgctggaggcgcctccacccgacctgccgctctgctag

SEQ ID NO: 81102 - DNA, 3208 bp, Oryza sativa
  Clone ID: PAT_MRT4530_80662C.1
atggcacggggctccgctctgctcgacggtagcgtactaccgccttcccgcattgtgagcgagaggcaggctgggctgccgcgccgcttcatgccggaatccgccaccggccgggagatagtgatgctgggcgaggcacgcccagcaccagattacccggggcggtccatcttcttcctccccttcgcaatggccgggttggttcctcccttttcttctttctttatggatgttctggagttctacgatctccagatggcgcacctcactcccaacgcagtgatgactttggccatcttcgcgcacctgtgcgagatgttcattggggtgcgcccatctcttcggcttgttccggtggttcttcaccgtgcagtcggtgtcgccgccgtcggtggtcggcggctgctatttcctgccgcgggggccggtgttgaaccgctacatcccctgcgccctccgcaaaaagtgggatgactggaagagcgactggttctacacccccctcgccgacgaagcgcatctccgacttccgagccagcccccggtgcaggcttccagctggcgggcgccggtagatctgggggatggctatgacgccgtcctcgaccgcctcgcgggcctgcgatcccaggggctcaccggggccatggtgtacggcgactacctccgtcgtcggattgcgccgctccagcggcgcgctcgggccgcctgggagtacatcgggcccgaagactatatacggacccaccagggggtcagatgggattgggcccccgaggacttcaagatactgatccaacgggtgctaaatctcaactccgtggaggcgtccctcatcccccacggtatcctccccctctgcagcgacccggatcgcgtctccatcttgaccattatgacgacggtcggggcctcagaggagcaggctcctaagggccatggcggcgcaggtgggagccgccggggggatcaatctacccccggagggggtcgtgcttctgggccccgcgtcgggggctcggggagcaaccgccctaccgacgcccgggggaagaggaaactgggaggaacacctcccccatctcctccccgagggggcggggcggcgcgtgccagcagcaggcgcccggagggggccgcgccaacatcgcagcccgagggggagcgcaagaagaaacggctgcgcaagatgggggggacagaaccatcccagggaaacctaatttcccctccaaggtggtcatttaaccgaccccctcgcagcgatgtcccgtcgcgtccctcccgccatcccaagtccggccaatccgaggccgaagatccggcggccgcagaggaacggaggcgagaatctgaccggcgagaggccgcagatcgccttcgggaagctgaagaggccgcccgggaggccgctcgggctcggcaggcggaggataccgctcgggaggaggccgcccgggcccgccaagccgaggaagccgctcgggaggaggccgcccgggcccgccaagccgaggaagccgctcgggaggaggccgcccgggcccgccaaactgaggcgatggcgtctttcgaggcagcccacgacaaagctgctggcgcgtcgcttgggcctactccctcgggcgacgctcaggcgacagcctccggggcggctcgcgacgaggccgcgggcggatcgcctgggcccgctccctcgggcgacgcccaggaccaaacgggtccgggggacatccccgagctcagtgcgtcttctggcgggccgagccgcgtcgcattttctccaaggcggctcttctcctcatcttctgccgccccgctgagtgccgagccccttctgcaagccttggccgccgcaaacaccgcggtgctagatggattcagcgcccaggtggaggccttgcgagcggaacgagcggagctcgaggccgcatgggcgcgtgttgaggaggggcggcgctcggtggacgccatggtggaggtgggccgtaaggctcaccgccgccacatctcggagcttgaagcccgcaaggcggcgttggcggagatcgcccgagaggtggaggaggagcgagaggccgccctcatcgccaccaccgcgatgattgaggcgcaggactccctccgccttcaacacggacgctgggaggcggagctaaagaaaaagctcgacgccgcccagggggtccttgacgccgccgctgcccgagagcagcgagcaacggaggctgaagcggcgtcccggcggcgcgaagaggcccttgaagcccgtgccatggcgctggaagatcatgccggcgccgtggagaccagcttggcggaccgcgaggccgccgccgctatccgggaggcgacgctggcggcgcacgaggccgcctgcgccgaagaggagtccgcgctccggctccgcgaggacgcgcttgctgagcgggagcgagctcttgaggagtccgaggccgcgacacaacggctggcggacagcctgtccctccgcgaggcagcgcaggaggagcaggcgcaccgcaatctggaatgcgtccgcgccgagagagccgcgctggagcagcgggctgcctacctcgaggcccgagaaaaggagctggacgcgagggagcgcagcggcggggcggctacgggcgaaagcgacttagtcgcccgcctcgcagctgccgaacacaccgttgcggacatgcagtgcgccctggactcatccaccggggaagccgaagccctccgcttgtcgggtgagatagggcccggcatgctttgggatgcagtcttccggctggatcgcgccggtcgggaagcgggcctctggaaaagccagacaatttcgcgctccaccaatctggaaggcctcgccccgcaccttaggaggatggcctgggctgtccaacaactccccgaggagctcgagaagaccatcaagtcatcctcgagggacctcgcccaaggagcggtggaactcgtgctagcgagttaccaggccagggaccccggcttctccccatggatggcgctggaggagttccctcccgggaccgaggacgatgcacgcgcgcgggtccgggatgccgccaaccacgtcgtccaaagcttcgaggggtcggcccctcggctcgcgttcgcccccagctccgacgaggagggcgacgccagcggcgaggacgacggtggcgacgaggccagcgacccgggcgcattggaa

SEQ ID NO: 81103 - DNA, 1206 bp, Oryza sativa
  Clone ID: PAT_MRT4530_80663C.1
atggctgacggcgagtctccgccatgggcggagctcgtccccgacatcgtccgcaagatcggccgccacctcctgtgcgagatcgaccgccaccacgcggatggcctctgcaggtcctggcgcgacgcgcttctacaactccggcccccgcctccgccgctcccgcggcttgtcctcccggaagccgacgggcccgcgttctactgcgtccccagcggctgccgcccccaccccttcgtcctcccgcccgccgcgctccgcgcgcggtgcttcggctcgtacaacggcgcctggatcttccaggccgtcgaccaggcggcgaaccacgtcctcctcaacctcatcacccaccagcagctcaacctccccaacctgatccgtttcccctccttccggcttccgggattgacatttgacttcgaggtcgccttcgtcgccgccaccctctctagccagccgactgatcagggatgcgtcggcgccagcatcatcggcttcaaacgcaggcccctcaacccacggcacatcgcgttctggcgcatgggcgatgaggcgttctcgcagtccatcgagtcgaggtggattgacgaggagctggaactggatgtggtggacctcctgtacagcggccatggcgctggcgccttcctcttcctcacccgaggggaaaacatccgtgtgtttcgtcaaccgatattccctctcggagacatgcagacgacagtgctctacttcgagcggcgcggtgacgacgacgacgacgacgggcggccggtccttgatcgctacctcgtggagtcccgggggaagctgctcatggtcgtcaggttaggagatcgtgagcctggccgcttgccgaccacgacgttccgggtgttcgagagagaagacgagctgttcaacaactactggaccaagctgcccgaccttggcggccgaatgctgttcgtcggaagaggctgctccagatcgtacgaagcggcagatgggtaccccggcatggagggcgtctacttcctggacgaccggagcttccacgacccgatggttgtgtacaaggatgccgcccaacggcggtatccctgcagcgacaacgggagatggtcgggagcaccgccaccagcggaggtagagcgctgcttcccagagcaagcgctaatgatctgcagtgctgaatttagtagcactagctggcagaaatattaa

SEQ ID NO: 81104 - DNA, 3681 bp, Oryza sativa
  Clone ID: PAT_MRT4530_80664C.1
atggcacggggctccgcaccgctcgacggtagcgtgctgccgccttcccgcatcgtgagcgagaggcaggccgggctgccgcgccgattcatgccggaatctgccaccggccgggaggtggtcgcgctgggcgagggacgcccgacgccacactacctggggcggtccgtcttcttcctctctttcgcaatggcagggctggtcccgccattctcttcttttttcatggatattctggagttttatgatctccagatggcgcacctcacccccaacgcggtaatgacgttggccatcttcgcgcacctgtgcgagatgttcatcggggtgcgcccatctctctggctgttccggtggttcttcaccgtacagccggtgtcgccgccgtcggtagttggtggctgctacttccagccgcgggggcaggtgctgcaccgctacattccctgcgtcctccgcaaaaagtgggacgactggaagagcgattggttctacacccccctcgccgacgaagcgcgcctccgacttccgagccagcccccggcgcaggcctccagctggcgggcgacggtagatctgggaaacggctacgacgccgttcttgaccgcctggcgggtctgcgatcccaggggcttacgggggccatggtgttcggcgactaccttcgtcgccggatcgcgccgctccaacggcgcgcccggggcgcctgggagtacaccgggcccgaggactccatgaggacccatcaggggcgcaagtgggactgggtccctgaagacttcaagatggtggtccaacgggtgctgaatctcagctccgtggaggcatccctcatcccccaaggtgtcctccccctctgctgcgattcagagcgcgccaacatcctgaccacatgcaggcggtcggggcgtcgggggagcgggctcctcgaggccacgatggcgcgggcgggagccgtaggggggaacaatctaccccgggagggggtcgtgcttctgggccccgcgacgggggcccggggggcagccgccttgccgacgcccgggggaagaggaagcaggagggtaccccttccccatctcctccccgagggggcggggcgccgcctctccctcctcaccggagcgtcgtccggtcgcgccgtcgcctcctccagcatcgcagctgcctccccttccccggcttgccctccgtttcccgcggagacccccggagctgcgttcccgccgtcgcccttccctttcctccgcgtcggccgccttcagccgcctctatctccctgcctgagcgccggtcgacgtcgccaccacctccctcggctccgcgacgccgccctcatccccggcatcacctcctcctcgcccgaatttcgccggaacaccgtcgcccgcgccggcttctccttcctcctcggcggcatctcctccggctgcccctttcgccatgcccgtgcgtcagccggcgctgccgtcccctccctcggcacggtgaccggcaaggtcgtcctcggcatcgtttcccctccatccaaacccctccggggtccatcagcgtcgtctccgatcgttctcgtcgtcgacgtcccatcggtcgcccggctcgtcgtctcgcggcgccgcctccgtcgtcggcatcgcagcggcgtggtccgcgccatcctcgactacgtgcagccgctgacggcagccctcatcgcctactcgccggccccggacgatgtcgacgtagacgtcctctcgtcgcttccggtcgacgtggcgttcagccctccgacaggccgctctcgtacgtctagtgcgcgtccgacaagtgtgccgctgcagccccgtcatcgtcttcgtcctcggctccgcgtcgtcaagcctcgtgccggccgagtctcgccttcgtccaaggatggctgccgaagccgtcccctcgccgttcgtcttcgttgtgcccgtctgtctccgccgcgcccgttcgtcgttgtcgttcccacgcctcgtcgcgtggtggtaaggttccctctccctcgctgccccgtcctcgtcctttcggtgtcccccgtacccgttgtgcggttgtcgaccccgtcttcgtcgttccggaggttcccgaagcgtggttcgcggccgtcgccgaagaattggaacaacccagcaggggcaaccaacgttcaagtacctacagtccagcaacaatgcaagttatcagaatttctcaaaactgagcctccaacctttgccattgccgtcgatcctatggaagccagtgattggttgcgcacagtcgagaagaagctagggttgattcagtgcaccgaccaggagcgggttggcttcgcaactcatcagttggttggaccggcttcagagtggtgggatagctacgaagcatcacggccagaaggacataccatcacctgggacgagttttcatctgtattcaagagatcacatgttcccgtaggaatgatcacactaagaaaacgagagtttcgctacctgaagcaaggagatttgaccgtcacagagtacctgcacgagttctatcgtttggctcactatgcaccagaagatgtggaaacggatgaagacaaacaagagaagtttctccaggggttaaaagatgagcttgcagtgcaactactcctagaggattatgaagattttgagaaacttgtggacaaagccatgcaactcgaaagtgagcataatcggatgacgaactgcaagagaaggattgccaacgtcccagtatttccatgtggtaaccaaagacagcgcactgagccacttcagatcaccggagcttctgttgcgcatcaagagttcctaccccaagaagatggacacattgcagacaacaacattagcaatactaatgctgatgataccaccaacaaccatggttcttgccccattcatgaccacttagatcaagcgtgcaatgtcaacagcattcaccaagatatcgacgatagtatcaatgaaggcacccagaatgacaaccctagcaattttgacactgagaaagactccaatggtgatagcaactatggccaaaggacctcatcgccaccagaagtgtccgctacccaccttaaagagtaccacctgttagagatagcccgaaagatgattgatcaaagagattggcaaagatgttctctagcaggaaaagaagtaggccgaaagctcgcgccgtcgctctctctctccgccgtcgccgtcgagctccggtccgccgccgtcgtcgccccggaccacctcccacctcggcgccgcctccttcggcttcgccgcatcctcgccgacctcgtccacccctccgtttcgctcgccgaccgccggaacgccgtcgaccccgtccacccgagccgcgccgccgccttcctccgctccggtcgccgtttccgtcgtcgccgtcaacccggggtgagccgtggaccgccgcttcgtttccccctttccttcccctctctcggcctccgctccgccgtgcctatggccgccgccgacgaccataggggcgcgggcgcgccgcctcccgccgctacgccggcgtggccgcctccgggcgcgcctagcagctgccgtgtggggcccggccgtcagccgcccgcgccctcggactggggagatccacgtgtcgagactggccaggccgggagcgtggtgaccgagggttatggataa

SEQ ID NO: 81105 - DNA, 3096 bp, Oryza sativa
  Clone ID: PAT_MRT4530_80665C.1
atggcacggggctccgcactgcttgatggtagcgtgctaccgccttcccgcatcgtgagcgagaagcaggctgggttgccgcgccgcttcatgccggaatctgccaccggccgtgagatagtcatgctgggcgagggacgcccggcgccagactacccggggcggtccgtcttctttctcccctttgcaatggcagggctggttccgccattttcttctttcttcatggatgtcctggagttctacgatctccagatggcgcacctcacccccaacgcagtgatgacattagccatcttcgcgcacctgtgtgagatgttcattggggtgcgcccatctcttcggctgttccggtggttcttcaccgtgcagtcggtatcgccaccgtcggtggtcggtgggtgctacttcctgccgcgggggccggtgttgaaccgctacatcccctgcgtcctccgcaagaagtgggatgactggaagagcgactggttctacacccccctcgccgacgaagcgcgcctccgacttccgagccagcccccggcgcaggcctccagctggcgggcgccggtagatctgggggatggctatgacgccgtcctcgaccgcctggcgggcctgcgatcccaagggctcacaggggccatggtgtatggcgactatctccgtcgtcggattgcgccactccagcggcgcgctcggggcgcctgggagtacaccgggtccgaagactacatgcggacccaccagggagtcagatgggattgggctcccgaggacttcaagatattggtccaacgggtgctgaatctcaactccgttgaggcgtccctcattccccacggaatcctccccctctgcagcgatccagaccgcgcctccatcttgaccattatgacggcggttggggcctcagaggagcaggctcctaagggccatgacggcgcaggcgggagccgccgaggggaacaatctaccccaggagggggtcgtgcttctgggccccgcgttgggggctcggggagcaaccgccctaccgacgcccgggggaagaggaagctgggaggaacacctctcccatctcctccccgagggggcggggcggttcgtcccacgctcattgcgaccgtctttcttctatcccaaaagcaagttttctcttacccatcttgtttatcttctggtttttccttccgcttcagtgatgtcccgtcgcgttcctcccgccatcccaagtccggccagtgcgaggccgaagatctggcggccgcagaggcacggaggcgagaatctgaccggcgagaggccgcagatcgcctacgggaagctgaagaggccgcccgggctcgccaggctgaggataccgctcgggaggaggccgcacgggctcgccaagccgaagaagccgctcgggaggaggccgcccgggctcgccaggctgaggcgatggcgacttccgaggcagctcgcgacgaggccgcgggcgcgtcgcttgggcccacctcctcgggcgacgttcaggcgacagcttctggggtggctcgcgacgaggccgcgggcgcatcgcttgggcctactccttcgggcgacgcccaggaccaaacaggtccgggggacatccccgagtccggcacgtccattggcgggccgagccgcgcggcatcttcaccaaggcagctcttccccacgccttccgtcgccccgctgagcgccgagccccttctgcaggccttagccgccgcaaacaccgcggtgttggatgggttaagtgcccaggtggaggccctgcaggcggagcgtgcggagctcgacgccgcgtgggcgcgtgtcgaggaggggcggcgctcggtggaggccatggtggaagcgggccgcaaggcacaccgccggcatgtctcagatcttgaagcccgtaagacggcactggcggagatcgctcgagaggtggaggaggagcggggggctgccctcatcgccaccaccgtgatgaacgaggcgcaggacaccctccgccttcaatacgggagctgggaggcggagctaaagaaaaagctcgacgccgcccagggggtccttgatgccgccgctgcccgagagcagcgagcaacggagaccgaagcggcgctccggcggcgcgaagaggccctcgaggcgcgcgccatggcgctggaagagcgcgcctgcgtcgcggagaaggacctggcagaccgcgaggccgccgtcaccacccgagaggcaacgctggcggcgcacgagtctgcctgcgccgaagaggagtccgcactccgcctccgcgaggacgcgcttaccgagcgggagcgagctctcgaagaggccgaggccgcggcgcaacggttggcggacagcctgtccctccgtgaggcagcgctggcggagcaggcacgccgcaatctagaatgtgtccgcgccgagagggccgcactggaccagcgggccgctgacctcgaggcgcgggagaaggagctggactcgagggcacgcagcggtggggcggctgcgggcgaaagtgacttagccacccgcctcgcagctgccgaactcaccatcgccgacatgcagcgcgcgctagactcatccaccggggaagccgaggccctccgcttggcgggcgagatagggcccggcatgctttgggatgcagtctcccgcctagaccgtgcaggtcggcgggtgggcctttggagagggcagacaataaagtctgccgccaaccagggaggccttgcccagcgcctctcgaagatggccggggctctccagcagctccccgaggagctcgagaggacaattaagtcatcctcgagggacctcgcccaaggagcggtggagctcgtcctggcgagctaccaggccagggaccccaacttctctccgtggatggcgctggatgagttccctcctgggactgaagacagcgcgcgcgcgcaggtccgggatgccgccgaccacatcgtccacagcttcgagggctcggcccctcggctcgcgttcgcccccaactccgacgaggagggcgacgccagcggtgcagacgacagtgacgacgaggccggcgacccgggcgcatcggattga

SEQ ID NO: 81106 - DNA, 4569 bp, Oryza sativa
  Clone ID: PAT_MRT4530_80666C.1
atgtccaacaaatatacatttcaagtttaccatggctcaggaaacgtccgttacgggccaactggggtagatctgtcagaattttttgtaacaccaaagggaattgatagaccggctgagaggagtgtaccttctataaaaggatggttgatgagggggttgagagttgatccacaggcaagtgacataacaatcaatgttatagtaagtcgggcaactgagggtttttattgggaactaatgctaattcaaaactctcgaatgtggagatggtatgtggagaatgcattgcaacgcgggtagcctctaactacggttccgtttgttcacccgaaagatctaggtgtgcagatgaacatggaagatggcgagggactaagtgctgaagtaaatgagacttatgtggaagaggtcaacgcagcagaggaaggtggcgtagtagctccagtgggcattcaacccggtggagtggccgacgtgggggagactgttagtgccattgtggatgaaatggagagagaggattctgacaacgagcgtgtaaaggaaagtgattcgtcagatgatgagacggatattgatccagccgaatgggctagtgaggatttttctggtcttgtagtctctgaagaggatagtgtgagatgggagtacaaagaaaatgaagttattcagggagcgatttatactagagcagaagatatgaaggaggcggtaaagcattttgcagtgtcacttcatagagagttttgggttgctaagtccaaccggtcgcaatatgaagttcggtgtgttaaggaaaaagatgggtgtccctggagagtgcacccttataagcaaaaatggaaggattattggacagtgtcagtcgttaccaagcatacatgttttctacctggtgtttagaaataccacaggaacattacatgtgcatttgttgcatctgagatatgcgcatgtcatcgataatctgacatataaaccaaagtcaataatccgacatatcaaagagacatacaagtatactattagctatgcgaaggcgtggagggccatacagaaaataatagagatgagatttggaacttacgaaggttcgtatgacaatttgccacgcctgcttggtgttatcaaacaaagaaaccctgagagctcttacgcagtgaagaaattcccctcagttgaacatcctggcaagagtgtgctgcaaaggacgttcttagctctacatgcatgcaagatggcattcgtgcactgtcgtcctattctctgtattgatgggacattcttgactggaaagtaccggggccagatactaacagcaataggggtagatgggaataatcagatattgcccttggcatttgcttttgttgagagtgagaataccgacagctggtactggttcctaaaactggttaaaacagaagttgttggtatgaggccaatgtgtgcctgatacatgacaggcacgccggcatgctgcgcgcgatagaagagttgtagtttgggagtaaggatcgaggataccctggtgagtgggaagatgtacagagtaggtggtgcatgcgtcatatgggagctaattcttcaagcaattcaagaacaaagagctcatgaacatgttcaagaggctatgcaatcagaactaggagaaaaaattcaatgagctttggaagagattagatgagttgacagccaaatgcagtgatcagcgtgcagtgggaccagcgaccgccgttcctgaccctcctcaagctcttggacatctcccaatggatagtccaacattggttagaagaactggagtggagattcggaaattttctcagtggattctgcatgaaccaaaagagaaatgggccaaggcttatgacacaggtggtgctagatatgagataatgacaacaaatttggcagaagtttacaattgggtgatgcgcggttatccgtggactcccactagttggcatagtggagttcattttacatgggacatgtaggtattttagggatttgttctaggcagttcttccctctatgccgaacaacagcattttattcggaacttttatgcagaaaaagctagaggagtggtgtaaaaaggcgatgaaacatcgagctctagtgcaaggtacccaacagcacaggtttgagatactatgtcaagataagacaggcaggggtatctaccgcaagagagtgaagcaggaatgtgttctcaaagccgacgacacatgtcattgctcatgtgcaaagccgaagctgctccacaggccatgcacccatgtcattgctgccgcattggagtgtggcataccagatgcagtatatgtgtcacagtacttcagtaagcaagcaatatatcatacatagagcggcgagatttatgggttcgacatagctggggtgttcacacaaactaacaatgaagtaatcaatattcctgacccatggaagctccgaggcaaggctggaaggaggaagactcgtcgcatccgcaacgatatggacgagtcggaggcgggcagggtgaagcgttgcagcaaatgcgatgaacgtgggcacacctacaagcattgtcctaaagacaaggaaaaaccaagtgcggcggaggcaggactatcaggatcagcagcagatggagctcgccctacggagatggcaagtcaggacacacctgagttgttggacccagcgatagatcaccgacaccggtctcaccttactgcggtgcagggggctcagcttgggacgttccggcacggatgtgcggtgagctacttacggttcacgactccttcatcgagaggttgcgtgaggccggcctcctaccgttgtgtcggctggtggaggctgccaccggccacgcggacccgcccagacgctggaatgcggaccggtccctcctagcagctttggtcgaccgatggaggccagagacgcacacttttcacttgccgtgcggtgaggtagcccctaccctacaggacgtatcgtacttgttggggctaccgctcgcgggagacgctgtcgggccagttcacacgactgtggactggaaggacgatctgacggcacgcttcgcaccagtacagcgcgcaccacatctcccgctcgagccgttggcacaccaccataacaccggacctacaaagaagtggctgcttcagttcactgccgagcagcaacaggatgaggccgacgagtactcctacagccgctgtttgaaggcgtacttgctctggctttttggctgggtgatgttctgttgcggtcacgtgcacgcggtcgacaagggtcttgtgcactatgccaggagcatcgctgacgccgcggttggcgaggtccctcagtggagctggggttccgcgttgttggtggctcagtaccgtggcctttgtgaggcttgcacgaagatggatcccagcgcgaccttcggtgggtgccctctctttctttctatttgggcagctgaggggattgcgatcggccgtcctgaggtggaccagcacacatacgaggggtcactgtacgaggagcgaccggaggtcgactaccctacgatgggtactctgtggtgccgtcgtcagcgccgatgggctcacgtccaggttaggtggtcgtatcctgagtttgttatggagttcgatcgccttttgccgactgacgtagtgtgggagccctatagtgccgtggctacccagagtcgtgcgctgttggttcaacttccgtcagccctttccagtaccgtttccgacgaccgtcccagctgctgttcactggtactcgcgcaagggtcagcagttagttggcgactggcccgccaagttggggacttttgttgaggactggttgctcgcaaccgaggaggtcgtggagcacgagggagagccacacaccgaggaggcgtaccaggcctacctacgctggtaccagccacgcacccgtactagggtcaccttcgctcccttggagcaacaggcccatgttgcgagcactagagacctctacgccaggtaccacgaccaggacttcgctcgtgctgtcgtcgacatcaacagggtcgtcgttgacggttcaacaacgatccaacgtttaggcgcggggattccggtacctgtagaggagcacctgacgacgtacacgcggatggtggagtcaatgcgctcggttctccgactgctcacctgtcgtgcagacgacgttgctcgggcagacacagcggccacccctaccgactggtcctcgtccagctgtgcacgttgtcgctgtctaggtttcacccagttcgctacgacgcaggccgcccacttctcccaggcggtagggtcagcgtctcagctagctgcgtcgacctcgcactcaaggcagttctggcagtacaccgggacttcgtcacaggcagccggcacgtcgagtcagggtccaccactggaccatgctgggacctcgtcggactacggggtggcttccgccttgctcttctccatgagccacttcgacttcgctttaacctcgacagaggacgtcatcggcccctcacagctgggaggcgcaccgccggtg

SEQ ID NO: 81107 - DNA, 324 bp, Oryza sativa
  unsure (1)..(324): unsure at all n locations
  Clone ID: PAT_MRT4530_80667C.1
tntngacgatcggccgaatnanaangaganancacggngagccgcntacatngtncctccgtnntggcttcatcggccancaccnncgctcccttcgaggggctcanntncannnacngcntgnncgtcacccgccncnncngccactccanctncngcccntcaccaanngnggtaggatcangtacntncacgtntancccactcacggctntnnaactcccaganccgctnttngcnnnntntgcacgtcnantntgagttcntantcccgntanattnntgncaccnctccncatnngtnacccgncncgactanatctg

SEQ ID NO: 81108 - DNA, 4707 bp, Oryza sativa
  Clone ID: PAT_MRT4530_80668C.1
atatcgaacaaacaaatattccaagtttaccatggcccagaaaacgtccgttacgggccaactagggttgatctgtcagaatttattgtatcaaaaaggggaattgatagactggctgagaggagtgtacattctataaaaggatggttaatgaggggcttgagagttgatccacagacaagtgacataacaatcaatgttatagtaagtcgggcaactgagggtttttattgggaactaatgtcagttcaaaactctcgagtgtggagatggtatgtggaaaatgcattgcaacgcgggtggcctctagctatggttccgtttgttcacccgaaggatccaggtgtgcagatgaacatggatgatggtgagggaccaagtgctgaagtaaacgagacttctgtggaagaggtcaacgcacgagaggacgggggcgtagtagctccagtgggcattcaaccaggtggagtggccgacgagggggagactgtcggtgccattgtggatgaaatggagagggaggattctgacaacgagcgtgtagaggaaggtgattcgttagatgatgagacggatattaatccagcagaataggctagtgaggatttttctggtctggtcgtctctgaagaggatagtgtgagatgggagtacaaagaaaataaggatattcagggagcgatttatactagagcagaagatatgaaggaggcggtaaaacattttgcagtgtcacttcatagagagttttgggttgccaagtccaaccggtcgcaatatgaagttggatgtgttaaggaaaaagatggttgtccctggagagtgcacgcttataagggaaaatggaaggattattggacagtgtcagtcgttaccaagcatacatgttttctacctggtgttcagaaataccacaggaacattacatgtgtatttgttgcatctgagatgtatgcgcatgtcatcgataatctcacatatgaaccaaggtcaataatccgacacatcgaagagacatacaagtatactattagctatgccaaggcgtggagggccaaacagaaaataatagagatgagatttggaacttgcgaagcctcgtatgacaatttgccacgcctgcttggtgttatcgaagaaagaaaccctgggagctcttacgcagtgaagaaattcccctcaattgaacatcctggcaaaagtgtgctgcaaagggcgttcttagctctacatgcatgcaagatggcattcgtgaactgtcgtcctgttctctacattgatgggacattcttgactggaaagtgtcggggccagatactaacagcaataggggtagatgggaacaatcaggtattgcccttggcatttgctttttttgagagtgagaataccgacagctggtactggttcctgaaattggttaaaacaaaaattgttggtatgaggccaaatatgtgcttgatacatgacaggcacgctggcattctgtgagcgatagaagagttgcagtttggaagtatggaacgaggataccctggtgagtgggaagatgtacagagtaggtggtgcatgcgtcatatgggagctaatttcttcaagcaattcaagaacaaggatctcatgaacatgttcaagaggctatgcaatcagaaccaggagaaaaaattcaatgagctttggaagagattagatgagttgacagccaaatgcggtgatcagcgtgcagcggctccatcgaccgccgttgctgaccctcctcaagctcttggacctctcccaacggatagtccaacattggttagaaaaactggattggagattcggaaattttctcagtggattctacatgaaccaaaagagaaatgggccaaggcgtatgacacaggtggtgctagatatggaataatgacaacaaatttggcagaagtttacaactgggtgatgcgcggtgtccgtggactgccactagttggcatagtggagttcattttacatgggacatgcaggtattttagggatcggttccaggcagttcttccctctatgccgaacaacagcattttgtttggagctttcatgcagaaaaagctagaggagttgcgtaaaaaggccatgaaacattgagctgtagtgcaaggtacccaacagcacaggtttgagatactatgtcaagataaggcaagcaggggtatctaccacaagagagtgaagcaggagtgtgttctcaaagctgacggcacatgtcattgctcttgtgcaaagccgaagctgctccacaggccatgcacccatgtcattgctgccgcagcggagtgtggcataccagatgcagtatatgtgtcacagtacttcagtaagcaagcaatatatcatacatggagcggcgagatttatgggttcggcatagctggggagttcacagagactaacgatgaagtactcaatattcctgacccatcgaagctccgaggcaaggctggaaggaggaggactcgtcgcatccacaacgatatggacgagtcggaggctggcagggtgaagcgttgcagcaaatgcgatgaacatgggcacacctacaagcattgtcctaaagacaaggagaaaccaagtgcggcggaggcaggactattaggattagcagcagatggagctcgccctacggagatggcacgtcaggatacacctcagttgttggacccggcgatagatcaccgacaccggtctcaccttactgtggtgcagggggctcagcttgggacgttccgggcacggacgtgcggtgagctactcacggttcacgactcctttgtcgagaggctacgtgaggccggcctcctaccgatgtgtcgactggtggaggctgcggccggcgacgcggacccggccagacgatagactgtggacaggtccctcctagcagctttggtcgatcgatggaggccagagacgcgcacttttcacttgccgtgcggtgaggttgagcagctacaggcggaggccgacgagtactcctacagccgatgtttggaggcgtacttgctctggctttttggctgggtgatgttctgtggcggtcacgggcacgcggtcgacaagggactcgtgcactacgccaggagcatcgccgacgccgcggtaggcgaggtgcctcagtggagttggggttccgcgttgttggcggctctgtaccgtgcactttgtgagtcttgcacgaagacggatcccagcgcgacctttggtgggtgccctctctttctttctatctgggcagctgagaggattccgatcggccgccctgaggtggaccagcacgcgtaggaggagtcactgtacgaggagcgaccagaggtcgactaccctacgatgggtactctgtggtgccgtcgtcagcgccgatgggctcacgtccaggttaggcggtcgtatcctgagtttgttatggagttcgaccgccttctgccgactgacgtcgtgtgggagccctatagtgccgcggctacctaggctcgtgcgccgttgggtctgtccacactctgcaccagggaccaggcgtgctggatgactatggttccgatggtcttcgacatctgcgttgagcctcacgcccctttccgcgtgatgcggcagttcggcttccgtcagccctttccagtaccgtttccgaccaccgtcccagctgctgttcaccggtactcgcgcaagggtcagcagtcagctggcgactggcccgccaagttggcaacttttgttgaggactggttgctcgcaaccgaggaggtcgtggaccacgagggagagccacacactgaggagtcatactacgtctacctacgctggtaccagccacgcacccgtactagggtcaccttcgctcccttggagcagcagccccacgttgcgagcactagaatcctctatgccaggcaccgcgaccaggacttcgctcgtgctgtcgacgacatcaaccgggtcgtcgttgacggttcaacgacgatacaacgtttaggcgcggggattccggtacccgtagaggagcacctgaccacgtacacgcggatggtggagtcgatgcgctcgattctccgagtgctcacctgtcgtgcagacgacgttgctcgggcagacgcagctgtacagcggccacccgtaccgactagtccccgtccagctgcgcacgttcctaggccgactcccccactgcacggagggtttcgtgcaccgttcagcaccccgccttcctcggctaggccttctgttgtgccccccacaggttttgcccagttcgctatgacgcaggccgcccacttctcccaggctgcagggtcagcgtctcaggcagctgtgtcgacctcgcactcagcgcagttctggcagtacactgggacttcgtcacaagcagccggcacgtcgagtcagggtccaccactggaccatgctgggacctcgtcggaccgcttgctgccttccaccttgctcttcgacatcactgacttcgacttcgcttcaggctcgacagaggacgtctttggcccctcacagctgggaggcgcaccgccgttgcagacacaggaccagacgcaggccactcctccgcgggacactcatgctacccgtgctgtgccaccggatcgtttcacctactcccaggaccacgtgcgagcacaggcccggaggaccaagcgtggtcgcagcgcggggcagggccag

SEQ ID NO: 81109 - DNA, 4587 bp, Oryza sativa
  Clone ID: PAT_MRT4530_80669C.1
atgtcgaacaaacaaatattccaagtttaccatggcccaggaaacgtccgttacgggccaactggggtagatctgtcagattttattgtatcagaaaggggaattgatagaccggctgagaggagtgtaccttctataaaaggatggttaatgaggggcttgagagttgatccatagacaagtgacataacaatcaatgttatagtaagtcgggcaactgagggtttttattgggaactaatgccggttcaaaactctcaattgtggagatggtatgtggaaaatgcattgcaacgcgggtggcctctagctatggttccgtttgttcacccgaaggatccaggtgtgcagatgaacatggatgatggcgagggaccaagtgctgaagtaaatgagacttctgtggaggaggtcaacgcacgagaggacgggggcgtagtagctccagtgggcattcaaccaggtggagtggccgacgagggggaaactgtcggtgccattgtggatgaaatggagagggaggattctgacaacgagcgtgtagaggaaggtgattcgtcagatgatgagacggatattaatccagcagaatgggctagtgaggatttttctgggctggtcgtctctgaagaggatagtgtgagatgggagtacaaagaaaatgaggttatccagggagcgatttatagtagagcagaagatatgaaggaggcggtaaaacattttgtagtgtcacttcatagagagttttgggttgccaagtccaaccggtcgcaatatgaagttcggtgtgttaaggaaaaagatggttgtccctggagagtgcacgcgtataaggggaaatggaaggattattggatactgtcagtcgttaccaagcatacatgttttctacctggtgttcagaaataccacaggaacattacatgtgcatttgttgcatctgagatgtatgcgcatgtcatcgataatctcacatatgaaccaaggtcaataatccgacacatcgaagagacatacaagtatactattagctatgccaaggcctggagggccaaacagaaaataatagagatgagatttggaacttacgaagcctcgtatgacaatttgccacgcctgcttggtgttatcgaggaaagaaaccctaggagctcttacgcagtgaagaaattcccctcaattgaacatcctggcaagagtgtgctgcaaagggcgttcttagctctacatgcatgcaagatggcattcgtgaactgtcgtcctgttctctgcattgatgggacattcttgacaggaaagtatcggggccagatactaacagcaataggggtagatgggaacaatcaggtattgcccttggcatttgcttttgttgagagtgagaataccgacagctggtactggttcctgaaattggttaaaacaaaagttgttggtatgaggccaaatgtgtgcctgatacatgataggcacgctggcattctgcgagcgatagaagagttgcagtttgggagtatggaacgaggataccctggtgtttgggaagatgtacagagtaggtggtgaatgcatcatatgggagctaatttctttcttcaagcaattcaagaacaaggagctcatgaacatgttcaagaggctatgtaatcagaactaggagaaaaaaatcaatgagctttggaagagattagatgagttgacagccaaatgcagtgatcagcgtgcagcggctccatcgaccgccgttgctaaccctcctcaagctcttggacctctcccaacgaatagtccaacattggttagaagaactggattggagattcggaaattttctcagtagattatgcatgaaccaaaagagaaatgggccaaggcgtatgacacaggtggtgctagatatggaataatgacaacaaatttggcagaagtttacaactgggtgatgcgcggtgtccgtggactgccactagttggcatagtggagttcattttacatgggacatgcagttattttagggatcggttccaagcagttcttccctctataccgaacaacagcattttgtttggaactttcatgcagaaaaagctagaggagttgcgtaaaaaggccatgaaacatcgagctctagtgcaaggtacccaacagcacaggtttgagatactatgtcaagataaggcaggcaggggtatctaccgcaagagagtgaagcaggagtgtgttctcaaagccgacgacacatgtcattgctcttatgcaaagccgaagctgctccacaggccatgcacccatgtcattgctgccgcaacggagtgtggcataccagatgcagtatatgtgtcacagtactttaataagcaagcaatatatcatacatggagcggcgagatttatgggttcggcatagctggggagttcacagagactaacgatgaagtactcaatattcctgacccatcgaagctccgaggcaaggctggaaggaggaagactcgtcgcatccacaacgatatggacgagtcggaggctggcagggtgaagcgttgcagcaaatgcgatgaacgtgggcacacctacaagcactgtcctaaagacaaggagaaaccaagtgcggcggaggcaggactatcaggatcagcagcagatggagctcgccctacggagatggcacgtcaggatacacctcagttgttggacccggcgatagatcaccgacaccggtctcaccttactgcggtgcagggggctcagcttgggacgttccgggcacggacgtgcggtgagctacttacggttcacgactcctttgtcgagaggtacgaacagtgtattactataacttagttgcgctgtactaatttttataatgacatattaatttgttattacaggctgcgtgaggccagagacgcacacttttcacttgccgtgcggtggaggccagagacgcacacttttcacttgccgtgcggtgaggtagcccctaccctacaggacgtatcgtacttgttggggctaccgctcgcgggagacgctgttgggccagtgaccgcgggtgtggactggcaagacgatctgacggcatgtttcgcactagtacagcgcgcaccgcatctcccgctcgagccgttggcacaccaccgcaacaccggacctacgaagaggtgactgcttcagttcaccgtcgagcagctacaggcagaggccgacgagtactcctacagccgctgtttggaggcgtacttgctctggctttttggctgagtgatgttctgtggcggtcacgggcacgcggtcgacaagggactcgtgcactaggccaggagcatcgccgacgccgcggtaggcgaggtgcctcagtggagctggggttccgcgttgttggcggctctgtatcgtggcctttgtgaggcttgcacgaagacggatcctagcgcgacctttggtgggtgccctctctttcttcctatctggacagctgagaggattgcgatcggtctgaggtggaccagcacgcgtacgaggagtcactgtacgcggagcgaccagaggtcaactaccctacgatcggtactctgtggtgccgtcgtcagcaccgatgggctcacgtccaggttaggcggtcgtatcctgagtttgttatggagttcgaccgccttctgccgattgacgtcgtgtgggagccctacagtgtcgcggctacccaggctcgtgcgccgttggttcggcttccgtcagccctttccagtaccgtttccgacgaccgtcccagctgttgttcaccggtactcgcgcaagggtcagcagtcagctggcgactggcccgccaagttggcgacttttgttgaggactggttgctcgcaaccgaggaggtcgtggaccacgagggagagccacacactgaggaggcgtaccaggcctacctacgctggtaccagccacgcacccgtactagggtcaccttcgctcccttggagcagcagccccacgttgtgagcactagagacctctacgccaggcaccgggaccaggacttcgctcgtgctgtcgacgacatcaaccgggtcgtcgttgacggttcaacgacgatccaacgtttaggcgcggggattccggtacccgtagaggagcacctgacgacgtacacgcagatggtggagtcgatgcgctcgattctccgagtgctcacctgtcgtgcagacgacgttgctcgggcagacgtagctgtacagcggccacccgtaccgactggtccccgtccagctgcgcacgttcctaggccgactccccctccgcacggaggtttcgcccagttcgctatgacgcaggccgcccacttctcccaggctgcagggtcagcgtctcaggcagctgcatcgacctcgcactcagcgcagttctggcagtacaccgggactttgtcacaggcagccggcacgtcgagtcagggtccaccactggaccatgctgggacctcgtcggaccgcttggtgccttccaccttgctcttcgacatcactgacttcgacttcgcttcaggctcgacagaggagcgtggtcgcgacgcggggcagggccagta

SEQ ID NO: 81110 - DNA, 342 bp, Oryza sativa
  Clone ID: PAT_MRT4530_8066C.1
atggcgccgctggcttcgcgcgctcgcgccctctccgcccctcgccggcgcgccctagccttggcggctgggcctgcccaccttagcgccttcccgtcgcgactcgcgccgccgcgctgtgtcccgcatgaccgtgtccaactggcggccttccgcccgacgcgcgtgcccgccgtggcgccgccagcgcccggcgtcactccctcttcgatgagcaccatcgtccaggcctccagggcttcaaacattgataacgagatgccaatcacatttaacctgattgatttttctcccgaaaagaagactttgactgaccgtactaatgttgttctcacgatctaa

SEQ ID NO: 81111 - DNA, 4371 bp, Oryza sativa
  Clone ID: PAT_MRT4530_80670C.1
atgtcatggcacagggccggtgtcctgctgctagggggctcaatcctgcctgcctgtcccgggggttccggccttggcctgggttggcttgggacgagctgggacccagggtcgggttgccagttcggtctgaatcatcgtaggccttgggttaaggcaggaaacgtccgttacgggccaactggggtagatctgtcagattttattgtatcagaaaggggaattgatagaccggctgagaggagtgtaccttctataaaaggatggttaatgaggggcttgagagttgatccacagacaagtgacataacaatcaatgttatagtaagtcgggcaactgagggtttttattgggaactaatgccagttcaaaactctcgagtgtggagatggtatttggaaaatgcattgcaacgcgggtggcctctagctttggttccgtttgttcacccgaaggatccaggtgtgcagatgaacatggatgatggcgagggaccaagtgctgaagtaaacgagacttctgtggaggaggtcaacgcacgagaggacgggggcgtagtagctccagtgggcattcaaccaggtggagtggccgacgagggggagactgtcggtgccattgtggatgaaatggagagggaggattctaacaacgagcgtgtagaggaaggtgattcgtcagatgatgagatggatattaatccagcagaatgggctagtgaggatttttctggactgatcgtctctgaagaggatagtgtgagatgggagtacaaagaaaatgaggttattcagggagcgatttatagtagagcagaagatatgaaggaggcggtaaaacattttgcagtgtcacttcatagagagtttagggttgccaagtcgaaccggtcgcaatatgaagttcggtgtgttaaggaaaaagatggttgtccctggagagtgcacgcgtataaggggaaatggaaggattattggacagtgtcagttgttaccaagcatacatgttttctacctggtgttcagaaataccacaggaacattacatgtgcatttgttgcatctgagatgtatgcgcatgtcatcgataatctcacatatgaaccaaggtcaataatccgacacatcgaagagacatacaagtatactattagctatgccaaggcctggagggccaaacagaaaataatagagatgagatttggaacttacgaagcctcgtatgacaatttgccacgcctgcttggtgttatcgaggaaagaaaccctgggagctcttacgaagtgaagaaattcccctcaattgaacatcctggcaagagtgtgctgcaaagggcattcttagctctacatgcatgcaagatggcattcgtgaactgtcgtcctgttctctgcattgataggacattcttgacaggaaagtatcggggccagatactaacagcaataggggtagatgggaacaatcaggtattgcccttggcatttgcttttgttgagagtgagaataccgacagctggtactggttcctgaaattggttaaaacaaaagttgttggtatgaggccaaatgtatgcctgatacatgataggcacgctggcattctgcgagcgataggagagttgcagtttgggagtatggaacgaggataccccggtgtttgggaagatgtacagagtaggtggtgcatgagacatatgggagctaatttcttcaagcaattcaagaacaaggagctcatgaacatgttcaagaggctgtgcaatcagaaccaggagaaaaaattcaatgagctttggaagagattagatgagttgacagccaaatgcagtgatcagcgtgcagcggctccatcgaccgccgttgctgaccctcctcaagctcttggacctctcctaacggatagtccaacattggttagaagaactggattggagattcggaaattttctcagtggattctgcatgaaccaaaagagaaatgggccaaggcgtatgacacaggtggtgctagatatggaataatgacaacaaatttggcagaagtttacaactgggtgatgcgcggtgtctgtggactgccactagttggcatagtggagttcattttacatgggacatgcaggcagaaaaagctagaggagttgcgtaaaaaggccatgaaacatcgagctctagtgcaaggtacccaacagcacaggtttgagatactatgtcaagataaggcaggcaggggtatctaccgcaagagagtgaagcaggagtatgttctcaaagacgacggcacatgtcattgctcttgtgcaaagccgaagctgctccacaggccatgcacccatgtcattgctgccgcagcggagtgtggcataccagatacagtatatgtgtcacagtacttcagtaagcaagcaatatatcatacatggagcggcgagatttatgggttcggcatagctggggagttcacagagactaacgatgaagtactcaatattcctgacccatcgaagctccgaggcaaggctggaaggaggaggactcgtcgcatccgcaacgatatggacgagtcggaggctggcagggtgaagcgttgcagcaaatgcgatgaacatgggcacacctacaagcattgtcctaaagacaaggagaaaccaagtgcggcggaggcaggactatcaggatcagcagcagatggagctcgccctacggagatagcacgtcaggatacacctcagttgttggacccggcgatagatcaccgacaccggtctcaccttactgcggtgcagggggctcagcttgggacgtttcgggcacggacgtgcggtgagctactcacggttcacgacgccgcggtaggcgaggtgcctcagtggagctggggttccgcgttgttggcggctctgtaccgtgcactttgtgagtcttgcacgaagacggatcccagcgcgacctttggtgggtgccctctctttctttctatctgggcagctgagaggattgcgatcggccgccctgaggtggaccagcacgcgtacgaggagtcactgtacgaggagcgaccagaggtcgactaccctacgatgggtactctgtggtgccgtcgtcagcgccgatgggctcacgtccaggttaggcggtcgtatcctgagtttgttatggagttcgaccgccttctgacgactgacgtcgtgtgggagccctacagtgccgcggctacccaggctcgtgcgccgttgggtctgtccacactctgcaccagggaccaggcgtactggatgactacggttccgatggtcttcgacatctgcgttgagcctcacgcccctttctgcgtgatgcgtcagttcggcttccgtcagccctttccagtaccgtttccgaccaccgtcccagctgctgttcaccggtactcgcgcaagggtcagcagtcagctggcgactggcccgccaagttggcgacttttgttgaggactggttgctcgcaaccgaggaggtcgtggaccacgagggagagccacacactgaggagtcgtaccaggcctacctacgctggtaccagccacgcacccgtactagggtcaccttcgctcccttggagcagcagccccacgttgcgagcactagagacctctacgccaggcaccgcgaccaggacttcgcttgtgttgtcgacgacatcaaccgggtcgtcgttgacggttcaacgacgatccaacgtttagacgcggggattccggtacccgtattggagcacctgacgacgtacacgcggatggtggagtcgatgcgctcgattctccgagtgctcacctgtcgtgcagacgacgttgctcgggcagacgcagctgtacagcggccacccgtaccgactggtctccgtccagctgcgcacgttcctaggccgactccccttccgcacggagggtttcgtgcaccgttcagcaccccgccttcctcggctaggccttctgttgtgccccccacaggtttcgcccagttcgctatgacgcaggccacccacttctcccaggctgcagggtcagcgtcacaggcagccggcacgtccagtcagggtccaccactggaccatgctgggacctcgttggaccccttcctgtcttccaccgtgctcttcgacatcactgacttcgacttcgcttcaggctcgacagaggacgtcatcggctcttcacagctgggaggcgcaccgccggtgcagacgcaggaccaggcgcaggccactcctctgcgggacactcgtgctacccgtgctgtgccaccggatcgtttcacctactcccaggaccacgtgcgagcacaggcccggaggaccaagcgtggtcgcggcgcggggcagggccagtag

SEQ ID NO: 81112 - DNA, 4995 bp, Oryza sativa
  Clone ID: PAT_MRT4530_80671C.1
caacgagagaaatcgtattacagctgggtgagccagtgagactcactaccgggtcgtcagccgcagcgagttcacgcggctcgggcggctggttaaatggctagcgcctcctctcaattctcattaccgaagcacaccttgcctggcagcatcacgagagcggcggcggggcattcatctggggtagtagctgagatgaaggccgggtacgtgccggtgctggtcgggaagagcggcggcggcggcggcgaggcggcgacgaggtttcttgtgccggtggggctactgaacgacccgtgcatggaggcgctgctggagctcgccgccgacgagatggggtacgggcaggagggcgtcctcatcatcccctgcgacgccgacttcttccgcagggtcgtcacggccatcccgtcggccaacaaggcgaacctcatctgtagcccaaacagccaaactgactgctatgaagtggatccaggtgtgcagatgaacatggatgatggcgatggaccaagtgctgaagtaaatgagacttctgtggaagaggtcaacgcacgagaggacgggggcgtagtagctctagtgggcattcaaccaggtggagtggccgacgagagggagactgtcggtgccattgtggatgaaatggagagggaggattctgacaacaagcgtgtagaggaaggtgattcatcagatgatgagtcagatattaatccagcagaatgggctagtgaggaattttctggtctggtcgtctctaaagaggatagtgtgagatgggagtacaaagaaaatgaggttattcagggagcgatttatagtagagcagaagatatgaaggaggcggcaaaacattttgcagtgtcacttcatagagagttttgggttgccaagtccaaccggtcgcaatatgaagttcggtgtgttaaggaaaaagatggttgtccatggagagtgcacgcgtataaggggaaatggaaggattattggacagtgtcagtcgttaccaagcatacatgttttctacctggtgttcagaaataccacaggaacattacatgtgcatttgttgcatctgagatgtatgcgcatgtcatcgataatctcacatatgaaccaaggtcaataatccgacacatcgaggagacatacaagtatactattagctatgccaaggcctggagggccaaacagaaaataatagagataagatttagaacttacgaagcctcgtatgacaatttgccacgcctgcttggtgttatcgaggaaagaaaccctgggagctcttacgaagtgaagaaattcccatcaattgaacatcctggcaagagtgtgctgcaaagggcgttcttagctctacatgcatgcaagatggcattcgtgaactgtcgtcctgttctctgcattgatgggacattcttgacaggaaagtatcggggccagatactgacagcaataggggtagatgggaacaatcaggtattgcccttggcatttgcttttgttgagagtgagaataccgacagctggtactggttcctaaaattggttaaaacaaaagttgttggtatgaggccaaatgtgtgcctgatacatgataggcacgctggcattctgcgagcgatagaagagttgcagtttgggagcatggaacaaggataccctggtgtttgggacgatgtacagagtaggtggtgcatgcgtcatatgggagctaatttcttcaagcaattcaagaacaaggagctcatgaacatgttcaagaggctgtgcaatcagaaccaggagaaaaaattcaatgagctttggaagagattagatgagttgacagccaaatgcagtgatcagcgtgcagcggctccatcgaccgccgttgctgaccctcctcaagctcttggacctctcccaacggtagtccaactttggttagaagaactggattggagattaggaaattttctcagtggattctgcatgaaccaaaagagaaatgggccaaggcgtatgacacagaaaaagctagaggagttgcgtaaaaaggccatgaaacatcgagctctagtgcaaggtacccaacaacacaggtttgagatactctgtcaagataaggcaggcaggggtatctaccacaagagagtgaagcaggagtgtgttctgaaagccgacgacacatgtcattgctcttgttcaaagccgaagctgctccacaggccatgcacccatgtcattgctgccgcagcggagtgtagcataccagatgtagtatatgtgtcacagtacttcactagggagttcacagagactaacgatgaagtactcaatattcctgacccatcgaagctccgaggcaaggctggaaggaggaggactcgtcgcatccgcaacgatatggacgagtcggaggctggcagggtgaagcgttgcagcaaatgcgatgaacgtgggcacacctacaagcattgtcctaaagacaaggagaaaccaagtgcggcggaggcaggactatcaggatcagcagcagatggagctcgccctacggagatggcacgtcaggatacacctcagctgttggacccggtgatagatcaccgacaccggtctcaccttactgcggtgcagggggctcagcttgggacgttccgggcacggacgtgcggtgagctactcacggttgacgactcctttgtcgagaggctgcgtgaggccagcctcctaccgatgtgtcggctggtggaggctgccgccggccacgcggacccggccagacgatggactgtggacaggtccctcctagcagctttggtcgaccgatggagaccagagacgcacacttttcacttgccgtgcggtgaggtagcccctaccctacaggacgtatcgtacttgttggggctaccgctcgcgggagacgctgttgggccagtgaccacggctgtggattggcaggacgatctgacggcacgtttcgcactagtacagcgcgcaccgcacctcccgctcgagccgttggcacaccaccgcaacaccggacctacgaagaggtggctgcttcagttcaccgtcgatcagctacaggcggaggctgacgagtactcctacagccgctgtttgaaggcgtacttgctctggcttttcggctgggtgatgttctgtggcggtcacgggcacgcggtcgacaagggactcgtgcactacgccaggagcatcgccgacgccgcggtaggcgaggtgcctcagtggagctggggttccgcgttgttggcggctctgtaccgtggactttgtgaggcttgcacgacgacggatcccagcgcgacctttggtgggtgccctctctttctttctatctgggcagctgagaggattgcgatcggccgcccggaggtggaccagcacgcgtacgaggagtcactgtacaaggagcgaccagaggtcgactaccctacgatgggtactctgtggtgccgtcgtcagcgccgatgggctcacgtccaggttaggcggtcgtatcctgagtttgttatggagttcgaccgccttctgccgactgacgtcgtgtgggagccctacagtgccgcggctacccaggctcgtgcgccgttgggtctgtccacactctgcaccagggaccaggcgtactggatgactacggttccgatggtcttcgacatctgcgttgagcctcacgcccctttccgcgtgatgcggcagttcggcttccgtcagccctttccagtaccttttccgacgaccgtcccagctgctgttcagcggtactcgcgcaagggtcagcagtcagctggcgactggcccgccaagttggcgacttttgttgaggactggttgctcgcaaccgaggaggtcgtggaccacgagggagagccgcacactgaggaggcgtacaggcctacctacgctgacgacgttgctcgggcagacgcagctgtacagcggccacccgtaccgactggtccccgtccagctgcgcacgttcctaggccaactccccctccgcacggagggtttcgtgcaccgttcagcaccccgccttcctcggctaggccttctggtgtgccccccacaggtttcgcccagttcgctatgatgcaggacttctcccaggctacagggtcagcgtctcaggcagctgtgtcgacctcgcactcagcgcagttctgccagtacaccggtacttcgtcacaggcagccggcacgtcgagtcagggtccaccactggaccatgctgggacctcgtcggatcgcttgctgccttccaccgtgctcttcgacatcactgacttcgactccgcttcaggctcggcagaggacgtcatcggcccctcacagctgggaggcgcaccgccgacccgcactatggcttgcacatacatcgagtgggtcgatacagaaaatcccgttctcgacctaaccacttgtttacaagaaggtcgctggtatttcgcatccgaaagtaccgagcaatacttacagagaaaagcggtttatgaacgacaatatcgtgaacaacagagcgactggcgggtgctaactacggcactccctccatgggaagcccgtccaagatgcaggtgtggtgatcgttgtcaggttcttcgttctataaatcctacaacattgggtcgaaggttctttgtttgtccaaatattcttgacgacgatttcatggaaccaccaaggagatgtcaatacagagaatggatagacaccagaagggttctaactccacctagccgtgttgtgcagcttgaactaccagagcaatacaggaaaaatcttttgaccgtactttttacatctgggtcccttgccgccctctattggccgcaaaaagtacggccgcaagctctgagggggcgtccaaaattgcaattagccccttgccgccctctgtatgggcggcaagggtctaatcgcaattttggccgacggcggcagacggcgcggtcgacccaccgtctgccatgttag

SEQ ID NO: 81113 - DNA, 342 bp, Oryza sativa
  Clone ID: PAT_MRT4530_80672C.1
ctgagttcttttttccttttttgagtatatacaaaattccatttcaattggcataacaccacctgattcaatcagatggatctgacctccaacgctgcaaaacaccctcttacagaacatgcatttcacatcctgaaaataactgcacttcaagatcaactaccggtttcgatgtttattgacatgtaaaattccaggggaaactactcccaccaacgaacaaaaataaaaatcaaagcggatgaagctgccaaataccatttgcccaatacttcagtttctcccggagtgtacacaaaactggaccttattctctacaacgctaacttgaaatggtaaatc

SEQ ID NO: 81114 - DNA, 4125 bp, Oryza sativa
  Clone ID: PAT_MRT4530_80673C.1
atgaggggcttgagagttgatccacagacaagtgacataacaatcaatgttatagtaagtcgggcaactgagggtttttattgggaactaataccagttcaaaactctcaagtgtggagatggtatgtggaaaatgcaatgcaacgtgggtggcctctagctttggttccgtttgtgcacccgaaggatccaggtgtgcagatgaacatggatgatggcgagggaccaagcgctaaagtaaatgagacttctgtggaggaggtcaacgcaggagtggacgggggcgtagtagctccagtgggcattcaaccaggtggagtggccgacgagggggagactgtcgcagccattgtggatgaaatggagagggaggattctgacaatgagcgtgtagaggaaggtgattcgtcagatgaggagacggatattaatccagcagaatgggctagtcaggatttttttgggctgatcgtcaatgaagaggatagtgtgagatgggagtacaaagaaaatgaggttattcagggagcgatttatagtagaacagaagatatgaaggaggcgaaataccacaggaacattacatgtgcatttgtcgcatctgagatgtatgcgcatgtcatcgataatctcacatacgaaccaaggtcaataatccgacacatcgaggagacatacaagtatactattagctatgccaaggcctggagggccaaacagaaaataatagagatgagatttggaacatacgaagcctcgtatgacaatttgccacgcctgcttggtgttatcgaggaaagaaaccctgggagctcttacgaagtgaagaaattcccatcaattgaacatcctggcaagagtgtgctgcaaagaacgttcttagctctacatgcatgcaaaatggcattcgtgaactgtcgtccagttctctgcattgatgggacattcttgacaggaaagtatcggggccagatactgacagcaataggggtagatgggaacaatcaggtattgcccttggcatttgcttttgttgagagtgagaataccgacagctggtactggttcctgaaattggttaaaacaaaagttgttggtatgaggccaaatgtgtgcctgatacatgataggcacgctggcattctgcgagcgatagaagagttgcagtttgggagcatggaacgaggataccctggtgtttgggacgatgtacagagtaggtggtgcatgcgtcatatgggagctaatttcttcaagcaattcaagaacaaggagctcatgaacatgttcaagaggctgtgcaatcagaaccaggagaaaaaattcaatgagctttggaagagattagatgagttgacagccaaatgcagtgatcagcgtgtagcggctccatcgactgccgttgatgaccatcctcaagctcttggacctctcccaacggatagtccaactttggttagaagaactggattggagattcggaaattttctcagtggattctgcatgaaccaaaagagaaatgggccaaggcatatgacaccggtggtgctagatgtggaataatgacaccaaatttggcagaagtttacaactgggtgatgcgcggtgtccgtggactgccactagttggcatagtggagtttattttacatgggacatgcaggtattttagggatcggttccaggcagttcttctctctatgccgaacaacagcattttgtttggaactttcatgcataaaaagctagaggagttgcgtaaaaaggccatgaaacatcgagctctagtgcatggtacccaacaacataggttcgagatactatgtcaagataaggcaggcaggggtatctaccgcaagagagtgaagcaggagtgtgttctcaaagccgacggcacatgtcattgctcttgttcaaagccgaagctgctccacaggccatgcacccatgtcaatgctgccgcagcggagtgtggcataccagatgcagtatatgtgtcgcagtacttcagtaagcaagcaatatatcatacatggagcggcgagatttacgggttcggcatagctggggagttcatagagactaacgatgaagtactcaatattcctgacccatcgaagctccgaggcaaggctggaaggaggaggactcgtcgcttccgcaacaatatggacgagtcggaggctggcagggtgaagcgttgcagcaaatgcgatgaacgtgggcacacctacaagcattgtcctaaagacaaggagaaaccaagtgcggcggaggcaggactatcaggatcagcagcagatggagctcgccctacggagatggcacgtcaggatacacctcagctgttggacccggcgatagatctccgacactggtctcaccttactgcggtgcagggggctcagcttgggacgttccgggcacggacgtgcggtgagctactcacggttcacgactccttcgtcgagaggctgcgtgaggccggcctcctaccgatgtgtcggctggtggaggctgccgccggccacgcggacccggccagacgatggactgtggacaggtccctcctagcagctttggtcgaccgatggaggccagagacgcacacttttcacttgccgtgcggtgaggtagcccttaccctacaggacgtatcgtacttgttggggctaccgctcgcgggagacgctgttgggctagtgaccacggctgtggactggcaggacgatctgacggcacgtttcgcactagtacagcgcgcaccgcacctgccgctccagccgttggcacaccaccgcaacaccggacctacgaagaggtggctgcttcagttcaccgtcgatcagctacaggcggaggccgacgagtactcctacagccgctgtttggaggcgtacttgctctggctttttggctgggtgatgttctgtggcggtcacgggcacgcggtcgacaagggactcgtgcactacgccaggagcatcgccgacgccgcgcgccgatgggctcacgtccaggttaggcggtcgtatcctgagtttgttatggagttcgaccgccttttgctgactgacgtcgtgtgggagccctacagtgccgcggctacccaggctcgtgcgccgttgggtctgtgcacactctacaccagggaccaggcgtactggatgactacggttccgatggtcttcgacatctgcgttgagcctcacgcccctttccgcgtgatgcggcagttcggcttccatcagccctttccagtaccgtttccgacgaccgtcccagctgctgttcaccggtacacgcggaagggtcagcagttagctggcgactggcccgccaagttggcgacttttgttgaggactggttgctcgcaaccgaggaggtcgtggagcacgagggagagccacacactgaggaggcgtaccaggcctacctacgctggtaccagccacgcacccgtactagggtcaccttcgctcccttggagcagcagccccacattgcgagcactagagacctctacgccaggcaccgcgaccaggacttcgctcgttgtgtcgacgacatcaaccgggtcgtcgttgacggttcaacgacgatccaacgtttagacgcggggattccgacgacgttgctcgggcagacgcagctgtacggcggccacccgtaccgactggtccccgtccagctgcgcacgttcctaggccgactccccctccgcacggagggtttcgtgcaccattcagcaccccaccttcgcccagttcgctatgacgcaggccgcctacttctcccacgctgcagggcagccggcacgtcgagtcagggtccaccactggaccatgctgggacctcgtcggaccgcttgctgtcttccaccgtgctcttcgacatcactgactttgacttcgcttcaggctcggcagaggacgtcatcggcccctcacagctgggaggcgcaccgccggtgcagacgcaggaccaggcgcaggccactcctccacctgacactcgtgctacccatgctgtgccaccggatcgtttcacctactcccaggaccacgtgcgagcacaggcccggaggaccaagcgtggtcgcggcgcggggcagggccagtag

SEQ ID NO: 81115 - DNA, 4071 bp, Oryza sativa
  Clone ID: PAT_MRT4530_80674C.1
atgtcgaacaaacaaacattccaagtttaccatggaccaggaaacgtccgttatgggccaactggggtagatctgtcagattttattgtatcagaaaggggaattgatagaccggctgagaggagtgtaccttctataaaaggatggttaatgaggggcttgagagttgatccacagacaagtgacataacaatcaatgttatagatccaggtgtgcagatgaacatggatgatggcgagggaccaagtgctgaagtaaacgagacttctgtggaggaggtcaacgcacgagaggacgggggcgtagtagctccagtgggcattcaaccaggtggagtggccgacgagggggagactgtcggtgccattgtggatgaaatggagagggaggattctgataacgagcgtgtagaggaaggtgattcgtcagatgatgagacggatattaatccagcagaatgggctagtcaggatttttctggactgatcgtctctgaagaggatagtgtgagatgggagtacaaaaaaaatgaggttattcagggagcaatttatagtagagcagaagatatgaaggaggcggtaaaacattttgcagtgtcacttcatagagagtttagggttgccaagtcgaaccggtcgcaatatgaagttcggtgtgttaaggaaaaagatggttgtccctggagagtgcacgcgtataaggggaaatggaaggattattggacagtgtcagttgttaccaagcatacatgttttctacctggtgttcagaaataccacaggaacattacatgtgcatttgttgcatctgagatgtatgcgcatgtcatcgataatctcacatatgaaccaaggtcaataatccgacacatcgaagagacatacaagtatactattagctatgccaaggcctggagggccaaacagaaaataatagagatgagatttggaacttacgaagcctcgtatgacaatttgccacgcctgcttggtgttatcgaagaaagaaaccctgggagctcttacgaagtgaagaaattcccctcaattgaacatcctggcaagagtgtgctgcaaagggcgttcttagctctacatgcatgcaagatggcattcgtgaactgtcatcctgttctctgtattgatgggacattcttgacaggaaagtatcggggccagatactaacagcaacaggggtagatgggacaatcaggcacgctggcattctgcgagcgataggagagttgcagtttgggagtatggaacgaggatacactggtgtttgggaacatgtacagagtaggtggtgcatgcgtcatctgggagctactttcttcaagcaattcaagaacaaggagctcatgaacatgttcaagaggctgtgcaatcagaaccaggagaaaaaattcaatgagctttggaagagattagatgagttgacagccaaatgcagtgatcagcgtgcagcggctccatcgaccgccgttgctgaccctcctcaagctcttggacctctcccaacggatagtccaacattgaaaaagctagaggagttgcgtaaaaaggccatgaaacatcgagttctagtgcaaggtactcaacagcacaggcggagtgtggcataccagatacagtatatgtgtcacagtacttcagtaagcaagcaatatatcatacaatggagcggcgagatttatgggttcggcatagctggagagttcacagagacaaacgatgaagtactcaatattcctgacccatcgaagctccgaggcaaggctggaaggaggaggactcgtcgcatccgcaacgatatggacgagtcggaggctggcagggtgaagctttgcagcaaatgcgatgaacatgggcacacctacaagcattgtcctaaagacaaggagaaaccaagtgcggcggaggcaggactatcaggatcagcagcagatggagctcgccctacggatggcacgtcaggatacacctcagctgttggacccggcgatagatcaccgacaccggtctcacctactgcggtgcagggggctcagcttgggacgttccgggcacggacgtgcggtgagctactcacggttcacgactcctttgtcgagaggctacgtgaggccggcctcctaccgatgtgtcggctggtggaggctgcggccggcgacgcagacccggccagacgatggactgtggacaggtccctcgtagcagctttggtcgatcgatggaggccagagacgcacacttttcacttgccgtgcggtgaggtagcccctaccctacaggacgtatcttacttgttggggctaccgctcgcgggagacgctgttgggccagtgaccacggctgtggactggcaggacgatctgacggcacgtttcgcactagtacagcgcgcaccgcacctcccgctcgagccgttggcacaccaccgcaacaccggacctacgaagaggtggctgcttcagctcaccgttgagcagctacaggcggaggccgacgagtactcgtacagccgatgtttggaggcgtacttgctctggctttttggctgggtgatgttctgtggcggtcacgggcacgcggtcgacaagggactcgtgcactacgccaggagcatcgccgacgccgcggtaggcgaggtgcctcagtggagctggggttccgcgttgttggcggctctgtaccgtgcactttgtgagtcttgcacgaagacggatcccagcgcgacctttggtgggtgccctctctttctttctatctgggcagctgagaggattgcgatcggccgccctgaggtggaccagcacgcgtacgaggagtcactgtacgaggagcgaccagaggtcgactaccctacgatgggtactctgtggtgccgtcgtcagcgccgatgggctcacgtccaggttaggcggtcgtatcctgagtttgttatggagttcgaccgccttctgacgactgacgtcgtgtgggagccctacagtgccgcggctacccaggctcgtgcgccgttgggtctgtccacactctgcaccagggaccaggcgtactggatgactacggttccgatggtcttcgacatctgcgttgagcctcacgcccctttccgcgtgatgtggcagttcggcttccgtcagccctttccagtaccgtttccgaccaccgtcccagctgctgttcaccggtactcgcgcaagggtcagcagtcagctggcgactggcccgccaagttggcgacttttgttgaggactggttgctcgcaaccgaggaggtcgtggaccacgagggagagccacacactgaggagtcgtaccaggcctacctacgctggtaccagccacgcacccgtactagggtcgacgacatcaaccgggtcgtcgttgacggttcaacgacgatccaacgtttagacgcggggattccggtacccgtagaggagtacctgacgacgtacacgcggatggtggagtcgatgcgctcgattctccgagtgctcacctgtcgtgcagacgacgttgctcgggcagacgcagctgtacagtggccacccgtaccgactggtccctgtccagctgcgcacgttcctaggccgactccccctccgcacggagggtttcgtgcaccgttcagcaccccgccttcctcggctaggccttctgttgtgccccccacaggtttcgcccagttcgctatgacgcaggccgcccacttctcccaggctgcagggtcagcgtcacaggcagccggcacgtcgagtcagggtccaccactggaccatgctgggacctcgtcggaccccttcctgtcttccaccgtgctcttcgacatcactgacttcgacttcgcttcaggctcgacagaggacgtcatcggcccctcacagctgggtggcgcaccgccggtgcagacgcaggaccaggcgcaggccactcctccgcgggacactcgtgctacccgtgctgtgccaccggatcgtttcacctactcccaggaccacgtgcgagcacaggcccggaggaccaagcatggtcgcggcgcggggcagggccagtag

SEQ ID NO: 81116 - DNA, 156 bp, Oryza sativa
  Clone ID: PAT_MRT4530_80675C.1
atgggagctgaagcagcccgcggcggatgcatacacaccgctggctatggcgaaacctcagcgaacatgtcttggcttcaggaactgacggagctgctgttgcagcaacacactgtggcggttctagggactgaatgcaagctttatagattgtag

SEQ ID NO: 81117 - DNA, 750 bp, Oryza sativa
  Clone ID: PAT_MRT4530_80676C.1
atggcggcggcgccctgtctctacgcgggggacgcggcgtccgcaagtggcagtgggatctccaggctgggcggcgacagatctgggcccgtcgtcgccagatccgaagacggcggcgtcgggcggcgcttcgaggcgggggtgcggccgtcaaacgctgggtcggtgctgtgccctggcgcatggcggctcggcgggtgcggcggcactcccgtggcggcgggcatgtgcagcagtgcggctgccggcgcgcgggcggcagaattcgccggtgctcgcatggtggcgttgcggcgcctgccggcttcggtggttggtggtgcgtcagccttccagggcgccggcgactctggtcttcggcctcttctatctccggcggttgctgagccccccccccttcctcctttgctctctgcgccgtcccccggcgaaagaaaggggcgtgtgcttgtgccggcgcccccgctcccccattccttcccctcaccaaggtttcttcttagttgctcttctgctcacccccagcacgcccctctctgcgctggtggtttagttgaaggtggttgttcaattgtttggtttgtctcacgaagcctggagaacctcgccggattaatggaagacaccgacgtctttgttgccctgtctcagctctcagttcctctccaggcggcccaagcctccttcatctttgcgctcttgggcctcgtcgtgtttcaagtgccctgtgtctgtgtaaacctgtcgtag

SEQ ID NO: 81118 - DNA, 4101 bp, Oryza sativa
  Clone ID: PAT_MRT4530_80677C.1
atgtcgaacaaaaaaatattccaagtttaccatagaccaggaaatgtccgttacgggccaactggggtagatctgtcagattttattgtatcagaaaggggaattgatagaccggctgagaggagtgtaccttctataaaaggatggttaatgaagggcttgagagttgatccacagacaagtgacataacaatcaatgttatagtaagtcgggcaactgagggtttttattgggaactaatgccagttcaaaactctcgagtgtggagatggtatttggaaaatgcattgcaacacgggtggcctctagctttggttccgtttgttcacccgaaggatccaggtgtgcagatgaacatggatgatggcgagggaccaagtgctgaagtaaacgagacttctgtggaggaggtcaacgcacgagaggacgggggcgtagtagctccagttggcattcaaccaggtggagtggccgacgagggggagactgtcggtgccattgtggatgaaatggagagggaggattctgacaacgagcgtgtagaggaaggtgattcgtcagatgatgagacggatattaatccagcagaatgggctagtgaggatttttctgggctgatcgtctctgaagaggatagtgtgagatgggagtacaaagaaaatgaggttattcagggagcgatttatagtagagcagaagatatgaaggaggcggtaaaacattttgcagtgtcacttcatagagagttttgggttgccaagtcgaactggtcgcaatatgaagttcggtgtgttaaggaaaaagatggttgtccctggagagtgcacgcgtataaagggaaatggaaggattattggacagtgtcagtcgttaccaagcatacatattttctacctggtgttcagaaataccacaggaacattacttgtgcatttgttgcatctgagatgtatgcgcatgtcatcgataatctcacatatgaaccaaggtcaataatccgacacatcgaagagacatacaagtatactattagctatgccaaggcctggagggccaaacagaaaataatagagatgagatttggaacttacgaagcctcgtatgataatttgccacgcctgcttggtgttatcgaggaaagaaaccctgggagctcttacgaagtgaagaaattcccctcaattgaacatcctagcaagagtgtgctgcaaagggcgttcttagctctacatgcatgcaagatggcattcgtgaactgtcgtcctgttctctgcattgatgggacattcttgacaggaaagtatcggggccagatactaacagcaataggggtagatgggaacaatcaggtattgcccttggcatttgcttttgttgagaatgagaataccgacagctggtactggttcctaaaattggttaaaacaaaagttgttggtatgaggccaaatgtgtgcctgatacatgataggcacgctggcattctgcgagcgatagaagagttgcagtttgggagtatggaacgaggataccccggtgtttgggaagatgtacagagtaggtggtgcatgcgtcatatgggagctaatttcttcaagcaatttaagaacaaagagctcatgaacatgttcaagaggctgtgcaatcagaaccaggagaaaaaatttaatgagctttggaagagattagatgagttgacagccaaatgcagtgatcagcgtgcagcggctccatcgaccgccgttgctgaccctcctcaagctcttggacctctcccaacggatagtccaacattggttagaaaaactggattagagattcggaaattttctcagtggattctgcatgaaccaaaagagaaatgggccaaggcgtatgacacaggtggtgctagatatggactaatgacaacaaatttggcagaagtttacaactgggtgatgcgcggtgtccgtggactgccactagttggcatagtggagttcattttacatgggacatgcaggtattttagggatcggttccaggcagttcttccctctatgccgaacaacagcagtttgtttggagctttcatgcagaaaaagctagaggagttgtgtaaaaaggccatgaaacatcgagctgtagtgcaaggtacccaacagcacaggtttgagatactatgtcaagataaggcaggcaggggtatctaccgcaagagagtgaagcaggagtgtgttctcaaagccgacggcacatgtcattgctcttgtgcaaagccgaagctgctccacaggccatgcacccatgtcattgctgccgcagcggagtgtggcataccagatacagtatatgtgtcacagtacttcagtaagcaagcaatatatcatacatggagcggcgagatttatgggttcggcatagctggggagttcacagagactaatgatgaagtactcaatattcctgacccatcgaagctccgaggcaaggctggaaggaggaggactcgtcgcatccgcaacgatatggatgagtcggaggctggcagggtaaagcgttgcagcaaatgcgatgaacatgggcacacctacaaacattgtcctaaagacaaggagaaaccaagtgcggcggaggcaggactatcaggatcagcagcagatggagctcgccctacggctgagaggattgcgatcggccgccctgaggtggaccagcacgcgtacgaggagtcactgtacgaggagcgaccagaggtcgactaccctacgatgggtactctgtggtgccgtcgtcagcgccgatgggcttacgtccaggttaggcggtcgtatcctgagtttgttatggagttcgaccgccttctgccgactgacgtcgtgtgggagccctacagtgcagcggctacccaggctcgtgcgccgttgggtctgtccacactctgcactagggaccaggcgtactggatgactacggttccgatggtcttcgacatctgcgttgagcctcacgcccatttccgcgtgatgcggcagttcggcttccgtcagccctttccagtaccgtttccgaccaccgtcccagctgctgttcaccggtactcgcgcaagggtcagcactcagctggcgactggcccgccaagttggcgacttttgttgaggactggttgctcgcaaccgaggaggtcgtggaccacgagggagagccacacactgaggagtcgtaccaggcctacctacgctggtaccagccacgcacccgtactagggtcaccttcgctcccttggagcagcagccccacgttgcgagcactagagacctctatgccaggcaccgcgaccaggacttcgctcgtgctgtcgacgacatcaaccgggtcgtcgttgacggttcaacgacgatccaacgtttaggcgcggggattccggtacccgtagaggagcacctgacgacgtacacgcggatggtggagtcgatgcgctcgattctccgagtgctcacttgtcgtgcagacgacgttgctcgggcagacgcagctgtacagcggccacccgtaccgactggtccccgtccagctgcgcacgttcctaggccgactccccctccgcacggagggtttcgtgcaccgttcagcaccccgccttcctcggctaggccttctgttgtgccccccacaggtttcgcccagttcgctataacgcaggccgcccacttctcccaggctgcagggtcagcgtctcaggtagctgtgtcgacctcgcactcagcgcagttctggcagtacaccgggacttcgtcacaggcagccggcacgtcgagtcagggtccaccactggaccatgctgggacctcgtcggaccgcttgctgccttgcaccttgctcttcgacatcactgacttcgacttcgcttcaggctcgacagaggacgtcattggcccctcacagctgggaggcgcaccgccggtgcagacgcaggaccaggcgcaggccactcctccgcgggacactcgtgctacccgtgctgtgccaccggatcgtttcacctactcccaggaccacgtgcgagcacaggcccggaggaccaagcgtggtcgcggcgcggggcagggccagtag

SEQ ID NO: 81119 - DNA, 324 bp, Oryza sativa
  Clone ID: PAT_MRT4530_80678C.1
aaaaaaaaaaaaaaaaaaaaataaaaaaaaaaaaaaaaaaaaaaaaagggcggccgatgaggggatccaatttacatacaatacatacaactaataactattattaaagcacctagttcaattactgtccgtgttttcaacgtttgactgaaaaaacccttctttcccaacttaataccttgcacacatccccctttctcagctggcttaatacaaaataccccgttcccatcccttttccacttttgcccatccttatttgctaatgggacccaccctgtaacggcccattaatctctcctttttgaatattacccccatttt

SEQ ID NO: 81120 - DNA, 3825 bp, Oryza sativa
  Clone ID: PAT_MRT4530_80679C.1
atgtcgaacaaacaaatattccaagtttaccatggaccaggaaacatccgttacgggccaactggggtagatctgtcagattttattgtatcagaaaggggaattgatagaccggctgagaggagtgtaccttctataaaaggatggttaatgaggggcttgagagttgatccacagacaagtgacataacaatcaatgttatagtaagtcgggcaactgagggtttttattgggaactaatgccagttcaaaactctcgagtgtggagatggtatttggaaaatgcattgcaacgcgggtggcctctagctttggttctgtttgttcacccgaaggatccaggtgtgcagatgaacatggatgatggcgagggaccaagtgctgaagtaaacgagacttctgtggaggaggtcaacgcacgagaggacgggggcgtagtagctccagtgggcattcaaccaggtggagtggccgacgagggggagactgtcggtgccattgtggatgaaatggagagggaggattctgacaacgagcgtgtagaggaaggtgattcgtcagatgatgagacggatattaatccagcagaatgggctagtgaggatttttctgggctgatcatctctgaagaggatagtgtgagatgggagtacaaagaaaatgaggttattcagggagcgatttatagtagagcagaagatatgaaggaggcggtaaaacattttgcagtgtcacttcatagagagttttgggttgccaagtcgaaccggtcgcaatatgaagttcggtcaataatccgacacatcgaagagacatacaagtatactattagctatgccaaggcctggagggccaaacagaaaataatagagatgagatttggaacttacgaagcctcgtatgacaatttgccacgcctgcttggtgttatcgaggaaagaaaccctgggagctcttacgaagtgaagaaattcccctcaattgaacatcctagcaagagtgtgctgcaaagggcgttcttagctctacatgcatgcaagatggcattcgtgaactgtcgtcctgttctctgcattgatgggacattcttgacaggaaagtatcggggccagatactaacagcaataggggtagatgggaacaatcaggaagatgtacagagtaggtggtgcatgcgtcatatgggagctaatttctttaagcaattcaagaacaaggagctcatgaacatgttcaagaggctgtgcaatcagaaccaggagaaaaaattcaatgagctttggaagagattagatgagttgacagccaaatgcagtgatcagcgtgcagcggctccatcgaccgccgttgctgaccctcctcaagctcttggacctctcccaacggatagtccaacattggttagaagaactggattggagatttggaaattttctcagtggattctgcatgaaccaaaagagaaatgggccaaggcgtatgacacaggtggtgctagatatggaataatgacaacaaatttggcagaagtttacaactgggtgatgcgcggtgtccgtggactgccactagttggcatagtggagttcattttacatgggacatgcaggtattttagggatcggttccaggcagttcttccctctatgccgaacaacagcattttgtttggagctttcatgcagaaaaagctagaggagttgcgtaaaaaggccatgaaacatcgagctctagtgcaaggtacccaacagcacagatttgagatactatgtcaagataaggcaggcaggggtatctaccgcaagagagtgaagcaggagtgtgttctcaaagccgacggcacatgtcattgctcttgtgcaaagccgaagctgctccacaggccatgcacccatgtcattgctgccgcagcggagtgtggcataccagatgcagtatatgtgtcacagtacttcaataagcaagcaatatatcatacatggagcggcgagatttatgggttcggcatagctggggagttcacagagactaacgatgaagtactcaatattcctgacccatcgaagctccgaggcaaggctggaaggaggaggactcgtcgcatccgcaacgatatggacgagtcggaggctggcagggtgaagcgttgcagcaaatgcgatgaacatgggcacacctacaagcattgtcctaaagacaaggagaaaccaagtgcggcggaggcaggactatcaggatcagcagcagatggagctcgccctacggagatggcacgtcaggatacacctcagttgttggacccggcgatagatcaccgacaccggtcttaccttactgcggtgcagggggctcagcttgggacgttccgggcacggacgtgcggtgagctactcacggttcacgactcctttgtcgagaggctatgtgaggccggcctcctaccgatgtgtcggctggtggaggctgcggccggcgacgcggacccggccagacgatggactgtggacaggtccctcctagcagctttggtcgatcgatggaggccagagacgcacacttttcacttgccgtgcgctgagaggattgcgatcggccgccctgaggtggaccagcacgcgtacgaggagtcactgtacgaggagcgaccagaggtcgactaccctacgatgggtactctgtggtgccgtcgtcagcgccgatgggctcacgtccaggttaggcggtcgtatcctgagtttgttatggagttcgatcgccttctgccgactgacgtcgtgtgggagccctacagtgccgcggctacccaggctcgtgcgctgttgggtactcgcgcaagggacagcagtcagctggcgacttttgttgaggactggttgctcgcaaccgaggaggtcgtggaccatgagggagagccacacactgaggagtcgtaccaggcctacctacgctggtaccagccacgcacccgtactagggtcaccttcgctcccttggagcagcagccccatgttgcgagcactagagacctctatgccaggcaccgcgaccaggacttcgctcgtgctgtcgacgacatcaaccgggtcgtcgttgacggttcaacgacgatccaacgtttaggcgcggggattccggtacccgtagaggagcacctgacgacgtacacgcggatggtggagtcgatgcgctcgattctccgagtgctcacctgtcgtgcagacgacgttgctcgggcagacgcagctgtacagcggccacccgtaccgactggtccccgtccagctgcgcacgttcctacgccgactccccctccgcacggagggtttcgtgcaccgttcagcaccccgccttcctcggctaggccttctgttgtgccccccacaggtttcgcccagttcgctatgacgcaggccgcccacttctcccaggctgcagggtcagcgtctcaggcagctgtgtcgacctcgcactcagcgcagttctggcagtacaccgggacttcgtcacaggcagccggcacatcgagtcagggtccaccactggaccatgctgggacctcgtcggaccgcttgctgccttccaccttgctcttcgatatcactgacttcgacttcgcttcaggctcgacagaggacgtcatcggcccctcacagctgggaggcgcaccgccggtgcagacgcaggaccaggcgcaggccactcctccgcgggatactcgtgctacccgtgctgtgccaccggatcgtttcacctactcccaggaccacgtgcgagcacaggcccggaggaccaagcgtggtcgcggcgcggggcagggccagtag

SEQ ID NO: 81121 - DNA, 765 bp, Oryza sativa
  Clone ID: PAT_MRT4530_8067C.1
ctaaggggacagaaagggatagaggcagtacatggcgcggcgatgtatcttgaatcgcccccacgaggtcagcgcaccagcttcaccaacaccgcccaggctccccctcttctttgtcacttctcctctgtgatgttggcgttgggcatggctgggcaagcggcagtgggcacagatgggtggctccggttggcggcaggcacggatggggagggggaataggttggcggcgagctgcgacaggcgcgaatggggggactctccaggcggcggcgggagcagcgggaagggggtgcggctgggagtaagctccagatgacgacgaggcggcggggaggaagcttcggtcgagcggagcgcgatgacgggcatgactggaatgacggtggtgaaggtcgcctcatcggtattcgcatcacacctcggggggacgtgcgccaaggctctgtcgaggtggggactctcatggtcgtggacgtgcgcgatctgtcgctgctgctccttgccacgccctctaccgctcccgccgcgcctgccgccgcttggcgctggcatgctcccacaaatccgccactgccgccgcttcccgtgcctgccctggagggcgacgacaccgccgtcacttcccccgctcgccccgccctgcgcgccccctcccggcccgccctggagagcaccaccgccacgtcgctttctatctgccccgaggatcaactctttattcgggtaccactctcgatgctgcaccgtgacgaacttacgcat

SEQ ID NO: 81122 - DNA, 2088 bp, Oryza sativa
  Clone ID: PAT_MRT4530_80680C.1
tggattctgcatgaaccaaaagagaaatgggccaaggtgtatgacaccggtggtgctagatatggaataatgacaacaaatttggcagaagtttacaactgggtgatgcgcggtgtccgtggactgccactagttggcatagtggagttcattttacatgggacatgcaggtattttagggatcggttccaggcagttcttccctctatgccgaacaacagcattttgtttggaactttcatgcagaaaaagctagaggagttgcgtaaaaaggccatgaaacatcgagctctagtgcaaggtacccaacaacataggttcgagatactatgtcaagataaggcaggcaggggtatctaccgcaagagagtgaagcaggagtgtgttctcaaagccgacagcatatatcattgctcttgttcaaagccgaagctgctccacaggccatgcacccatgtcattgctgccgcagcggagtgtggcataccagatgcagtatatgtgtcgcagtactttagtaagcaagcaatatatcatacatggagcggcgagatttacgggttcggcatagctggggagtttatagagactaacgatgaagtactcaatattcctgacccatcaaagctccgaggcaaggctggaaggaggaggactcgtcgcatccgcaacaatatggacgagtcggaggctggcagggtgaagcgttgcagcaaatgcgatgaacgtgggcacacctacaagcattgtcctaaagacaaggagaaaccaagtgcggcggaggcaggactatcaggatcagcagcagatggagctcgccctatggatggcacgtcaggatacacctcaactgttggatccggcgatagatctccgacaccggtctcaccttactgcggtgcagggggctcagcttgggacgttccgggcacagacatgaggctgcgtgaggccggcctcctaccgatgtgtcggctggtggaggctgccgccggccacgtggacccggccagacgatggactatggacaggtccctcctagcagctttggttgaccgatggaggcctgagacacacacttttcacttgccgtgcggtgaggtagcccctaccctacaggacgtatcgtacttgttggggctaccgctcgcgggagacgctgttgggccagtgaccacggctgcggactggcaggacgatctgatggcacgtttcgcactagtacagcgcgcaccgcacctcccgctccagccgttggcacaccaccgcaacaccggacctacgaagaggtggctgcttcagttcaccgggcacgcggtcgacaagggactcgtgcactacgccaggagcatcgccgacgccgcggtaggcgaggtgcctcagtggagctggggttccgcgttgttggcggctctgtaccgtggactttgtgaggcttgcacgaagacggatcccagcgcgacctttggtgggtgccctctctttctttctatctgggcagctgagaggattgcgatcggccgcccggaggtggaccagcacgcgtacgaggagtcactgtacgaggagcgaccagaggtcgactaccctacgatgggtactctgtggtgccgtcgtcaggccgcctacttctcccacgctgcagggtcagcgtctcagccagctgcgtcgacctcgcactcagcgcaattccagcagtacaccggggcttcctcacaggcagccggcacgtcgagtcagggtccaccactggaccatgctgggacctcgtcggaccgcttgctgtcttccaccgtgctcttcgacatcactgacttcgacttcgcttcaggctcggcagaggacgtcatcggcccctcacagctgggaggcgcaccgccggtgcagacgcaggaccaggcgcaggccactcctccgccagacactcgtgctacccgtgctgtgccaccggatcgtttcacctactcccaggaccacgtgcgagcacaggccggaggaccaagcgtggtcgcggcgcggggcagggccagtagagcagtcttctctttgtttatttgcttcactttccagtactgtatgcttgtgtaa

SEQ ID NO: 81123 - DNA, 480 bp, Oryza sativa
  Clone ID: PAT_MRT4530_80681C.1
cctctctctcccagtgggtgcgtttgtgcgagacttgaggctgagcgagaggggaggagagatcgtgctccgcgagggaacggcggcgaggagctgggtgcatctcggttggacttttcctactggaactgcagtactttcaacatgctttttgcaaatgcctgcattaaggatgaataaaatgttaagcaccgactatttagggacgcaggagcttcattcattttgcaagaccaccgaaatattggaagactcacagtctcaagagattgcactcgatagaacagcggtggggtcaacacttctaagtcatcaaaatggatgaatatgatgcagaaaccaccggtgtactgccaccatcatttttgtcctgtggctctagatctatgctccctatatcagtaccatcatcatcatcatctagtctggagactgtcctcttttctgactcaacgtacagtgatcttcaggtaaaagaga

SEQ ID NO: 81124 - DNA, 471 bp, Oryza sativa
  Clone ID: PAT_MRT4530_80682C.1
gcacactagggcggtcgactggtgcgtatcagaggaaatatggaactccaaagatgagatgaaccattccatgcattgtcgagtaaaattaagttacacgcaacttatccggttatgttacgaggagtggagatcgtgtaggggccctgaccaagcgtcctaatatctctacataagttgagctgccgcttccatgaaacatacgtgaaatcaataatctagggtttgcctcctctgtactacgccgttacttgtagtctaaaccatcctgctcgtcggcgtgcaccggcgatcgagagagcaggtctccggaaccttcgtcttcgatgtcttacaccaggagaaggtggtaataagatttttgggaagcgcttcgctcgaatgctccctgttttgtccacaatggctcatcttcctcttcgctcgcatgctgcgcactgtcgttaacgcacgggaccgcgagtccttcct

SEQ ID NO: 81125 - DNA, 2012 bp, Oryza sativa
  Clone ID: PAT_MRT4530_80683C.1
atggccgcacgcgctccggcccccggcttcccgttccacgcgtcgggtagccagtggacgcagccgcaaaggaggagcaaaagatcaagcgccgtccacgtgtaccccaccaactccatgaattcccagggcctccaggtcgtcaccgatccgacgtcgcttacagccgggcccggaatctacctcctctctctcccagtgggtgcgtttgtgcgagacttgaggctgagcgagaggggaggagagatcgtgctccgcgagggaacggcggcgaggagctgggtgcatctcggttggacttttcctactggaactgcagtactttcaacatgctttttgcaaatgcctgcattaaggatgaataaaatgttaagcaccgactatttagggacgcaggagcttcattcattttgcaagaccaccgaaatattggaagactcacagtctcaagagattgcactcgatagaacagcggtggggtcaacacttctaagtcatcaaaatgtttgctctacttctgaagtatcagggggaaactttggaatcgctgaagtcagttttttacaggatgaatatgatgcagaaaccaccggtgtactgccaccatcatttttgtcctgtggctctagatctatgctccctatatcagtaccatcatcatcatcatctagtctggagactgtcctcttttctgactcaacgtacagcgatcttcaggtaaaagagacgaaccacaatactacagcaatggatgaaaacaatgagttccttcagctgattcttagtagcaatgatgaaggatacaatgctggaagtgaattccaagtttgggatgttctggacttctacttctcagaaagcttttcagctgtgcagtttgatagcttgatgggttttacaaatgatgttagttcttcccatcacgattgtatgaatcttgttgacatggtagagcggcctgttgcgctcctgtccctaaatgataccgaggagcaaaataactctactgatgagttccctgatgatacatcatcataccttcaaatgaaaccctcagattccgaaactgaaagtaattatgcctctcgagatgttgcggtaactgaatatgttgatgaaaagccactttctagaggcctgcctgatttaatggatgtcgactcacccggtcgtctatcaaaatcagcaagatcaaaacaaatcactcttgttctggatttggacgagactcttgtacattcaacattggatcattgtgacaatgttgatttcacccttcaagttttctttaatatgaagaaccatacagtttatgttaggcaaagacctcatctgaagatgtttcttgagaaggtagctcagatgtttgatcttgtcattttcacagctagccagagaatttatgccgagcaactaatagatagactcgaccctgatgggaggttgatttcacaccgtatttatcgtgagtcatgtatattctctgagggttgctatacaaaggatctgacaattcttggagttgacctggcaaaagttgtaatagttgacaatactccacaggttttccagttgcaagtggacaatggtataccaataaagagctggtttgatgacccctcagaccaggaattggtcgagttactcccattcctggagacacttgttggtgtggaggacgttaggccaataatctcgaagacattccaccatacacttgagcagaattagatctagagaattcatgattttcctcgactgagcctgtcactgaagcttactaggttcactccataaggtgcaccccactattgggggggaattaggcataggatcaagattcaccatttatgttatgttagctgttacaaatagcgagcataaactgcagtcgtcgccatggcttgtatatgtgtgcatcagttttctgtttcagatccttgtacaggaacaatagtgttgaataaaacggttctgaatcaaaaaaagctctgtcaccgttccaaaaaaaa

SEQ ID NO: 81126 - DNA, 445 bp, Oryza sativa
  Clone ID: PAT_MRT4530_80684C.1
cccacgcgtccggcgagggtgggcggcggcggcggaagggacccgagcaataacccggcggtggggaggctgcgggagctcgtgcagcgcggggacgcggcagatggctgggagaagtcgtgggaggccgccgtaaccccgtgggatttggggaagccaacacctatcatcgaacatctggttaaatcaggaactctcccgaaggggagagctctggttccaggatgcggcacgggatatgatgtggttgctctggcaagccctgagcgatttgttgttggcttggatatttctagtacagctgtggagaaggctaagcaggttcttttgtgcacttgatccaagcttgaggttggcttgggcagaaacagttagtgggcttctaaaacctcatggagagctaatcacccttatatatttgatcagtgaccaagaaggaggacca

SEQ ID NO: 81127 - DNA, 1098 bp, Oryza sativa
  Clone ID: PAT_MRT4530_80685C.1
ttattcttgtgggcctggtcttataagtctcatcttctaattgaccatttggaattgttggaatttatacgcagacgatgcagcggtcttcatgaacacgaccaagagcgatgtaagggctttcattgaccttctgactcgcttcggcaaggtatcgggtctttgcacaaatctgcaaaaatcgcaggtagcgccaatcaggtgtgatggcctggaccttgatgacatcttggacggaatactagctactagagcctcctttccagtaaagtacctaggactccctctttccaccggaaggttgcgtaaatgtgacttccagccgctcttcgacaaatctatgaactatatagaaggatggcgagggaggcatgttggtctcgcaggtcgatcaaccttggtaaaagtcgtccttacgtcccaaccaatcttcctgctgacgggcttgaaagcatctaaggaatcccttgaaattctggacaaacaacgaaggcaatttctgtgggttgggaatgaaaccgtcactgggggaagtgcaaggtaaattggacgcgtacctgcctacctactgcctcgagagggcttggcatcctaaatctcaagaaatttgcaagggccctccgtctgaaatggctctagcacgaatggaagtcaccagaaaaggcttgggtggggttagaaacgccttgcgatgaaacagacatgctgttgtttgctgctgcaacaacaatacaagttggcgacggagcaaaagcaagtttctgggacttggcttggctataggggagaagactaaaggatgtcgcaccactagtctacgtagcctccagaaaaaagagcaggactctccaacaggccgctcagatggaccaatggctgcttgaccttgctctaccaacaaccgaagggtggacaacggagctaatcgaccaagtcattgccgtttggagcgccattcgaagtgtgcaatttacggatcaagaagactagatcacttggaagctaaacaaccacggtgaatacacagcctcctcagcctataaggcacaaatccttggtacaacatcgtcaaattttgacaacctgatttggagacct

SEQ ID NO: 81128 - DNA, 279 bp, Oryza sativa
  Clone ID: PAT_MRT4530_80686C.1
atgcctcgtgcgatgtacgcacgtcctggtttaggtagtacgttgatgcacgcttattacggtgaagaatatcgatataaccaaagcatttcggcacaagctaccttgcccaaaacaggatacacagtcaaacagccaatttcagatatggtttatgaaggaaaaggtaaaactcgaattgccacagtggaagacctgagtccttacatctacaatgttggtctgatcggatcacagaattgcatgcaaacaaagcaattgaagttaccgcgcgcaaag

SEQ ID NO: 81129 - DNA, 339 bp, Oryza sativa
  Clone ID: PAT_MRT4530_80687C.1
atggaaggtgtgaagagtttgatcatgtgtgctctggtgctaggcttagtcctgcagcaggagaagatccatgtggaagctaagagctgctgcccatccacctcggtaagaaacgtctataactcatgccgtttcgcgggtggctcaagggaagcctgtgctaaactctctacctgcaaacactttgatgggagctgccagccaccttacgatcacctcacccttcactctgatacggttgctgccaatgaaggagtgaatgctgccgtggagcgttgcgaggatgcatgcgatcgcttctgcacaaatgaagctcagactgtcaccgttgtgtcctaa

SEQ ID NO: 81130 - DNA, 414 bp, Oryza sativa
  Clone ID: PAT_MRT4530_80688C.1
atgccggacgcgtgcgccatggcaactaacagcaaaataggagaggagaacaaaggaaacaagacaaagaagaagaacaagaaaaagacgccaatggagacgtcggccactgcatgggccacgccactacaccgaactccacggcgtcacgaccggtcgtcgctcagccgcgcctgcacagaggccgccgctagcagcacccacgccgacccgaaccccgcgggcgaccgcaccgccgtgcgccgagccgccccgccgggcgaccccggcgcgccaccctgcagcgcccggtcaccgcgctacgctgccacctcgcctggctgcgtcgtcgacatccgccgccgctcggccgcacctcgcgccaacccggccgcgcccgccgctggccgaaccgccgcctggccgcgccgctga

SEQ ID NO: 81131 - DNA, 3030 bp, Oryza sativa
  Clone ID: PAT_MRT4530_80689C.1
atgccggaatctgccaccggccgggagatagtcacgctgggcgagggacgcccggcgccagactacccggggcggtccgtcttctttctcccttttgcaatggcagggctggttccgccattttcttctttcttcatggatgttctggagttctacgatctccagatggcgcacctcacccccaacgcggtgatgacattggccatcttcgcgcatctgtgcgagatgttcattggggtgcgcccatctcttcggctgttccggtggttcttcaccgtgcagtcgctgtcgccgccatcggtagtcggtggctgctacttccagccacgggggccggtgctgaaccgctacatcccctgcgccctccgcaagaagtgggacgactggaagagcgactggttctacactcccctcgccgacgaagcgcgcctccgacttccgagccagcccccggcgcaggcctccagctggcgggcgccggtagatctgggggatggctatgacgccgtcctcgaccacctggcgggcctgcgatcccaggggctcacaggggccatggtgtatggcgactacctccgtcgtcggattgcgccgctccagcggcgcgctcggggcgactgggagtacaccgggtccgaagacttcatgaggacccaccagggagtgagatgggactgggctcctgaggacttcaagatattggtccaacgggtgctgaatctcaactccgtggaggcggccctcattccccaaggaatcctccccctctgcagcgatccagaccgcgcctccatcctaaccattatgatgggggtcggggcctctgaggagcgagctccaaagggccatgacggcgcaggcgggagccgccggggggagcaatctaccccgagagggggtcgtgcttctgggtcccgtgtcaggggcccggggagcagccgccctgccgacacccgggggaagaggaagcagggagggacacctcccccatctcctccccgagggggcggggcggcgcgtgccagcagcaggcgcccggagggggccgcgccaacatcgcagcccgagggggagcgcatgaagaagcggccccgcaagatgggggagacggaaccatctcggggaaacctcatttcccctccaaagtggtcgtttaaccgaccccctcgcagcgagatcccgtcgcgtccctcccgccattccaagtccggccagtctgaggccgaggatccggcggccgcagaggcccgcaggcgggaagctgaccggcgagaggccgtggatcgcctacgggaagccgaggaggccgcccaggaggccgcccgggctcgccaggccgaggaaatcgctcgggagggagccgcccgggcccgccaggccgaggaagctgctcgggaggaggccgcccgagcccaccaggccgaggaaaccgctcgggaggaagccggatttcgccaggacgaggcgatggcgacttccgaggcagctcgcgacgaggccgcgggcgcgttgctcgggcccactccctcgggcgacgctcaggcgacaacttccggggcagctggcgacgaggcagcgggcgcgtcgcttgggcccactccctcgggcgacgctcaggcgacaacttccggggcagctggcgacgaggctgcgggcgcgtcgcttgggcccactccctcgggcgacgctcagggaccaaacggtgcccaggtggaggccctgcaggcagagcgggcggagctcgacgccgcgtgggcgcgtgtcgaagaggggcgacgctcggtggaggccatggtggaggtgggccgtaaggctcaccgccggcatgtctcggagcttgaaacccgtaagaaggtgttggcggagatcgccaaggaagtggaggaggagcggggggctgccctcattgccaccaccgtaatgaacgaggcgcaggacaccctccgccttcaatacgggagctgggaggcggagctagggaagaagctcgacgccgcccagggggtgcttgacgctgccgctgcccgagaacagcgggcggcggagaccgaagcggcgtcccggcggcgcgaagagaccctcgaggcgcgcgccatggcgctggaagagcgcgcctgcgccgtggagagggatctggcggaccgcgaggccgctgtcaccatccgggaagcaacgctggcggcgcacgaggctgcctgcgccgaagaagagctcgcgctccgtctccgcgaggacgcgctcaccgagcgggagcaagctctcgagggggccgaggccgcggcgcaacagctggcggacagcctgtccctccgcgaggcagcgcaggaggagcaggcgcgccgcaatctggaaggtgcccgcgccgagagggccgcactgaaccaacgggccgctgagctcgaggcgcgggcgaaggagctggacacgagggcgcgcagcagcggggcggccgcgggcgaaagcgacttagccgcccgcctcgcagatgccgaacacaccatcgccggtctgcagggcgcgctggactcatccgccggggaggtcgaagccctccgcttggcaggcgaggtcgggcccggcatgctttgggacgccgtctcccgcctagatcgcgccggtcggcaagtgggcctctggagagggcggaccgtaaagtacgccgacaaccagggaggcctcgcccagcacctttcgaagatggccggggccctccaacggctccccgaggagctcgagaagacaattaagtcatcctcgagggacctcgcccaaggagcggtggagctcgtcctggcgagttaccaggccagggaccccaatttctctccatggatggcgttggatgagttccctcctgggaccgaggaccgcgcgcgcgcgcaagtccgggatgccgccgactatatcgtcgacagcttcgagggctcggcccctcggcttgcgtttgcccccaactccgacgaggagggcaataccggtggtgcagacgatagtgacgtcgaggccggcgatccgggcgcatcggaatga

SEQ ID NO: 81132 - DNA, 198 bp, Oryza sativa
  unsure (1)..(198): unsure at all n locations
  Clone ID: PAT_MRT4530_8068C.1
tgtgtacaaaagaaaaagttcgtcccgttctaactgtccttcaggtagncaggtttgggtgtgctgaatgtgccaggatcatgtcgacgtaggtcttgttttctggtaaagtggtacatgtaatgggagtcctgaccagtttgtcttgcagtatggtggaagtatatatctggtgcataaaaaaaaaaaaaaaaaaaa

SEQ ID NO: 81133 - DNA, 252 bp, Oryza sativa
  Clone ID: PAT_MRT4530_80690C.1
atggcgcgtgagctctccgtggccaagcgacttgttctcttgagcgggagcaacaagtcgtcctctggtgactcccgctctgccgtctttgcatcctcgagctcctccgtaaacgccccaccggtgacagcgtgggtcatgccccatcctgccgaggattaccacagcgatgaggagctagaagatgattcccaagaggtgcctgggattcagaggaggacgtggctctaccgctacatatttgagatctaa

SEQ ID NO: 81134 - DNA, 3141 bp, Oryza sativa
  Clone ID: PAT_MRT4530_80691C.1
atggcacggggctccgctccgcttgacggtagcgtgctgccgccttcccgcatcgtgagcgagagacaggccgggctgccgcgccgcttcatgccggaatttgccaccggccgggagatagtctcgctgggcgagggatgcccggcaccacgctacccggggcggtccgtcttcttcctcccttttgctatggcagggctggttccgccattttcttctttcttcatggatgttctggagttttacgatctccagatggcgcacctcacccccaacgcggtaatgacattggccatcttcgcgcacctgtgcgagatgttcatcggggtgcgcccatcccttcggctgttccggtggttcttcaccgtacagccggtgtcgccgccatcggtggttggtggttgctacttccagccgcgggggccggtgctgaaccgctacattccctgcgtcctccgcaagaagtgggatgactggaagagcgactggttctacacccccctcgccgacgaagcgcgcctccgacttccgagccagcctccagcgcaggcctccaactggcgggcgccggtagatctgggagatggctacgacgccgtcctcgaccgcctggcgggcctgcgatcccaggggctcacaggggccatggtgttcggtgactatcttcgtcgccggatcgcgccactccagcggcgcgcccggggcgcctgggagtacaccgggtccgaggactgtatgaggacccaccggggggtcaaatgggactgggtccccgaagacttcaaggtaatgatccaacgggtgctgaatctcagctccgcggaggcatccctcatcccccaaggagtcctccccctctgcagcgatccagatcgcgccaacatcctgtccatcatgatggcggtcggggcctcagaggaacgagctcctaagggccatgacagtgcgagcgggagccgcaagggagatcaatctaccccaggagggggttgtgcttccggtccccgtgatgggggctcggggggcagccgccctgccgacgcccgagggaagagaaagcaagagggtacttcctccccatctcctccccgagggggcggggcggcacgtgtcagcagcaggcgcccggagggggccgcgccgacgccgcagcccgagggggagcggaagaagaaacggctccgcaagatggggggacagaaccatcccggggaaacctcatttcccctccaaggtggtcgtttaaccgaccccctcgcaggttcgtcccacgcccattgtggctatattcattcttccaacacaagttttcattcacccatcttgtttgtcttctggcttttcttctgcttcagcgagatcccgtcgcgtccttcttgccaattcaagtccggccaatctgaggccgagaatgcggcgaccacggaggctcggaggcgggaatctgaccggcgagaagccgcggatcgcctacgggaagccgaggaggccgcccaggtggccatccgagctcgccaagctgaagaagccgctcgggaggaggccaaacttcgccaggccgaggcggcgacgacttccgaggcagctcgcgacgaggccgcgggcgcatcgcttgggcccactccctcgggcgacgctcaggacaagccaggtccgggggacatccctgagtccggcacgtccatcggcgggccgagccgcgcggcatcctcaccgaggcggctctcccccacgccttctgctgccccactgagcgcagagcctcttctgcaggccttggccgttgctaacaccacggtgttggacgggttaagtgcccagatggaggccttgcaagcagagcgggtggagctcgacgccgcatgggcacgtgtcgaagaggggcgtcgctcggtggaggccatggtggaggtgggccgcaaggcacaccgccggcacgtctcagagctcgaagcccgtcggaagatgctgggggagatcgccagggaggtggaggaggagaggggggctgccctcatcgctactaccgtgatgaacgaggcgcaggacgacctccgccttcaatacgggagctgggaggcggagctagggaagaagctcaatgccgcccggggggtccttgatgctgccgctgcccgagaacggcgggcggcggagaccgaggtggcatcccggcggcgcgaagaaacccttgaggcccgtgccatggcgctggaagagcgtgcctgcgtcgtggagagggacctggcggaccgcgaggccgccgttgctattcgggaggtcacactggcggtgcacgaagctgcctgtgccgaagaagagtccgcactccgcctccgcgaggatacgctcaccgagcgggagcgagccctcgaggaggccgaggccgcagcacagaggctagcggagagcgcgtccctccgcgaagctgcgcaagaggaacaagcgcgtcgcaatctggaaagtgcccgcgccgagagggccgcattgaaccagcgggccgctgaactcgaggcgcaggcaagggagctggatgcaagggcgcgtagcggcggggcggccacgggcgacagcgacttagccgcccgcctcgcagttgccgaacacaccatcgcggatctgcagggcgcgctggattcgtccaccggggaggtcgaggcccttcacctggcaggcgagatagggcccagcatgcttcgcgacgccgtgtcccgtttagaccgcgccgggcggcaggcgggtctctggggcgggcggactgtgaagtacgccgccaaccaggggggcctcgcccagcgcctctcggagatggccgggactctccagcggctccccgaggagctcgaggggacgattaagtcatcctcgagggacctcgcccgaggagcggtggagctcgtactggcgagttaccaggccagggaccccgatttctccccatggacggcgctggacgagttccctcccgggaccgaggacggcgcgcgcgcgcaggtccgggatgccgccgaccatatcgtccacagcttcgagggttcggcccctcggctcgcgttcgccctcaactccgacgaggagggcgatgacggcggtgtgggcgacagtggcgacgaggctggcgacccgggtgcatcggagtga

SEQ ID NO: 81135 - DNA, 279 bp, Oryza sativa
  Clone ID: PAT_MRT4530_80692C.1
atggagggcaacagagcagcagcagtggccctctgctgcatgatcagcctgctgtcagatgctacagggagctctacccagagtgcaggaagaacctacctcggttcatctgcgtgcatggatgactgcagccccaacaagaacaaggttgtcgcctgcgactgcgccaccttttgccagctcgcaatctgcggcacggcgtcgaacggggcagctgatgttgcatcgtgtgtagatggttgcaccaagaaccgaaacctatacaccaagttcctttaa

SEQ ID NO: 81136 - DNA, 2589 bp, Oryza sativa
  Clone ID: PAT_MRT4530_80693C.1
atggcacggggctccgctctgctcgatggtagcgtgctgccgccctcccgcatcgtgagcgagaggcaggctgggctgccgcgccgcttcatgccggaatctgccaccggccgggagatagtcacgctgggcgagggacgcccggcgccagactacccggggcggtccgtcttctttctcccttttgcaatggcagggctggttccgccattttcttctttcttcatggatgttctggagttctacgatctccagatggcgcacctcacccccaacgcggtgatgacattggccatcttcgcgcatctgtgcgagatgttcattggggtgcgcccatctcttcggctgttccggtggttcttcaccgtgcagtcggtgtcgccgccatcggtagttggtggctgctacttccagccacgggggccggtgccgaaccgctacatcccctgcgccctccgcaagaagtgggacgactggaagagcgactggttctacaccccccttgccgacgaagtgcgcctccgacttccgagccagcccccggctcaggcctccagctggcgggcgccggtagatctgggggatagctatgacgccgtcctcgaccgcctggcgggcctgcgatcccaggggctcacaggggccatggtgtacggcgactacctccgtcgtcggattgcgccgctccagcggcgcgctcggggcgcctgggagtacaccgggtccgaagacttcatgaggactcaccagggagtgagatgggactgggctcctgaggacttcaagatattggtccaacgggtgctgaatctcaactccgtggaggcggccctcattccccaaggaatcctccccctctgcagcgatccagaccgcgcctccatcctgaccattatgatggcggtcggggcctcagaggagcgagctccaaagggccacgacggcgcaggcgggagccgccggggggaacaatctaccccgagagggggtcgtgcttctgggtcccgcgacaggggcccggggagcagccgccctgccgacgcccgggggaagaggaagcagggaggaacacctcccccatctccccgagggggcggggcggcgcgtgccagcagcaggcgcccggagggggccgcgccaacatcgcagcccgagggggagcgcaagaagaagcggccccgcaagatgggggagacagaaccatctcggggaaacctcatttccccccccctaaagtggtcgtttaaccgaccccctcgcagtgcccaggtggaggccctgcaggcagagcgggcggagctcgatgccgcttgggcgcgtgtcgaagaggggcgacgctcggtggaggccatggtggaggtgggctgtaaggctcaccgccggcacatctcggagcttgaaacccgtaagaaggtgctagcggagatcgccaaggaagtggaggaggagcggggggctgccctcattgccaccaccgtgatgaacgaggcgcaggacaccctccgccttcaatacgggagctgggaggcggagctagggaagaagctcgacgccgcccagggggtgcttgacgctgccgctgcccgagaacagcgggcggcggagaccgaagcggcgtcccggcggcgcgaagaggcccttgaggcgcgcgccatggcgctggaagagcgcgcctgcgtcgtggagagggatctggcggaccgcgaggccgccgtcaccatccgggaagcaacgctggcggcgcacgaggctgcctgcgccgaagaagagctcgcgctccgcctccgcgaggacgcgctcaccgagcgggagcgagctctcgagggggccgaggccgcggcgcaacagctggcggacagcctgtccctccgcgaggcagcgcaggaggagcaagcgcgccgtaatctggaaggtgcccgcgccgagagggccgcactgaaccaacgggccgctgagctcgaggcgcgggcgaaggagctggacgcgagggcgcgcagcggcggggcggccgcgggcgaaagcgacttagccgcccgcctcgcagctgccgaacacaccatcgccgatctgcagggcgcgctggactcgtccgccggggaggtcgaagccctccgcttggcaggcgaggttgggcccggcatgctttgggacgccgtctcccgcctagattgcgccggtcggcaagtgggcctctggagagggcggaccgtaaagtacgccgccaaccagggaggtctcgcccagcgcctctcgaagatggccggggctctccaacggctccccgaggagctcgagaagacaattaagtcatcctcgagggacctcgcccaaggagcggtggagctcgtcctggcgagttaccagaccagggaccccaatttctctccatggatggcgctggaagagttccctcccgggaccgaggaccgcgcgcgcgcgcaagtccgggatgccgccgaccatatcgtcgacagcttcgagggctcggcccctcggctcgcgttcgcccccaactccgacgaggagggcaatgccggtggtgcagacaacagtgacgacgaggccggcgacccgggcgcatcggattga

SEQ ID NO: 81137 - DNA, 3207 bp, Oryza sativa
  Clone ID: PAT_MRT4530_80694C.1
atggcacggggctccgctctgctcgatggtagcgtgctgtcgccttcccgcatcgtgagcgagaggcaggccgggctgccgcgccgcttcatgccggaatctgccaccggccgggagatagtcatgctgggcgagggacgtccggcgccagactacccggggcggtccgtcttcttccttccttttgcaatggcagggctggttccgccattttcttcttttttcatggatgttctggagttttacgatctccagatggcgcacctcacccccaatgcggtaatgacattggccatcttcgcgcacttgtgcgagatgttcatcggagtgcgcccatcccttcggctgttccggtggttcttcaccgtacagtcggtgtcgccgccgtcggtggttggtggctgctacttccagccgcgggggccggtgctgaaccgctacatcccctgcgtcctccgcaagaagtgggatgattggaagagcgactggttctacactcccctcgccgacgaagcgcgcctccgacttccgagccagcccccggcacaggcctctagctggcgggcgccggtagatctgggagatggttatgacgccgtcctcgaccgcctggcaggcctgcgatcccaggggctcacaggggccatggtgtacggcgactaccttcgccgccggattgcgccgctccaacggcgcgcccggggcgcctgggagtacaccgggtccgaagactacatgaggacccatcagggagtcagatgggactgggctcctgaggacttcaagatagtggtccaacgggtgctgaatctcagctccgtggatgcatccctcattcctcaaggagtcctccccctctgcagcgatccagaccgcgcctccatccggaccatcatgatggcggtcggggcctcagaggagcgggctcctaagggccatgacggcgcgggcgggagccgcaggggggaacaatctaccccaggagggggtcgtgcttctgggccccgcgacgggggcccggggagcagccgccctgccgacgcccgggggaagaggaagcagggaggaacccctcccccatctcctccccgagggggcggggcggcgcgtgccagcagcaggcgcccggagggggccacgccgacgtcgcagcccgagggggagcgaaagaagaagcggctccgcaagataggggggacagaaccatcccggggaaaccttatttcccctccaaggtggtcgtttaaccgaccccctcgcagcgagatcccgtcgcgtccctcccgtcattccaagtccggccagtctgaggccgaggatccggcggccgcagaggcccggaggcgggaatctgaccggcgagaagccgcggatcgcttacgggaagccgaggaggccgcccaggaggccgcccgggctcgccaggctgaggaaaacgctcgggaggaggccgcccgggctcgccaggccgaggaagccgctcgggaggaggccgcccgggctcgccaggccgaggaagccgctcgggaggaggccggatttcgccaggacgaggtgatggcgacttccgaggcagctcgcgacgaggccgcgggcgcgtcgcttgggcccactccctcgggcgatgctcaggcgacgacttccggggcagctggcgacgaggccgcgggcgcatcgcttgggcccactccctcgggcgacgctcaggaccaaccaggtccgggggacatccccgagtccggcatgtccatcggcgggccgagccgcgcggcatcctctccaaggcggcttttccccacgccttctgtcgccccactgagcgcaaagccccttctgcaggccttggctgccgcaaacaccgcggtgttggacgggttaagtgcccaggtggaggccctgcaagcagagcgggcggagctcgacgccgcatgggcgcgtgttgaagaggggcgacgctcggtggaggccatggtggaggtgggccgcaaggcacaccgccggcacgtctcagagattgaagcccgtcagaaggtgctggcggagatcgccaaggaggtggaggaggagcggggggctgccctcatcgccaccaccgtgatgaacgaggcgcaggacaccctccgccttcaatacgggagctgggaggcggagctagggaagaagctcgacgccgcccagggggtccttgatgctgccgctgcccgagaacggcgggcggcggagaccgaggtggcatcctgtcggcgcgaagaaacccttgaggcccgtgccatggcgctggaagagcgtgcctgcgtcgtggagagggacctggcggaccgcgaggctgccgtctccatccgagaggcaacgctagcggttcacgaggccgcctgcgccgaagaggagtctggactccgcctccgtgaggacgcgctcaccgagcgggagcgagctctcgaggaggccgaggccgcaacgcaacggctggcggacagcctgtccctccgcgaggcagcgcgggaggagcaggcgcgccgtaatctggaaggtgtccgcgccgagagggccgcactgaaccagcgggccgctgagctcgaggcgcgggcggaggaactggacgcgagggcgcgcagcggcggggcggccgcgggcgaaagcgacttagccgcccgcctcgcagctgccgaacacaccatcgccgacctgcagggcgcgctagactcgtccgccggggaggtcgaggccctccgcttggcaggcgaggtagggctcggcatgcttcgggacgccgtctcccatctagaccgcgccgggcggcaggcgggcctctggggcgggcggactatgaagtacgccgccaaccaggggggcctcgcccagcgtctctcggagatggccgggactctccaacggctccccgatgagctcgagaggacgattaagtcatccttgagggacctcgcccgaggagcggtggagctcgtactggcgagttaccaagctagggaccccgacttctccccatggatggcgctggatgagttccctcccgggaccgaggacgacgcgcgcgcgcgggtccgggatgccgccgaccacatcgtccacagcttcgagggttcggcccctcggctcgcgttcgccctcaactccgacgaggaggacgatgacggcggagcgggcgacagtggcgacgaggctggcgaaccgggcgcatcggattga

SEQ ID NO: 81138 - DNA, 6084 bp, Oryza sativa
  Clone ID: PAT_MRT4530_80695C.1
gaggaaaataccaaaaaatagtgcctaagcataaaaacgacggagatgctcgatattccaagagttgtcaacatgagtactgtcttcacgcttgagtcggtatgaatctggccgagtaacttcagaaattatgaacggtccttcccataaaggagataacttgtgccgatctcgtgtagtttgaattttcctcaaaaccaggtctccgactaagaaagctcgtgatcgaacgttgcagttgtgataacgtcgcatcccttgtaaataccaagccgactggattaaggctgcttcacgggcttcctccaatcggttgagatcatccactcggttttcttcgtagcgctcctctctggagttacgaaatcataaagactcaaattctacctcagtcggcaacattgcttccgcaccataaaccaaaaagaatggtgactggcccgtagcccgactgggtgtagtgcgtagggaccaaagtacagacggcagctgatccacccatttgccagcgtagggacgcagttggtcaaaaactcgtgcttttattccttggagtaccataccattggcgcgttcgacttgtccattgctcataggatgcgctacggaggcatagcagattttaataccaaagtcttcatagaaatctttaaatactccgccagtgaactgagtaccattatcggtgatgatccaattggatactccaaacctgtgcacaatgttaatgagaaaatctctagccttgtctgctgtaattgtgacgactggtttggcttcgatccagttggagaatttatcaatagctacaaagagatgagtataaccaccggttgcctttttgaacgggccaaccatatcgagccgccaaaccgcgaacggccaggataatgggatggtttgcaactcctgagctggtagatgagtctgtcgggcaaaaaattgacaaccctcacacgtccgcacaatcttgtcagcatcggatatggcggtaggccagaaaaaaccctgccgataagccttgccaatgatggttcgcgcagctgcatgattgccgcagatgcccgaatgtatgtccgttagcaattgcctcccttcctccaaagacacgcaacgttgcagaatccctgacggacttttcttgtacagttcagccctatgcatgatgtaaagtttgcttcacctggaaattcgcttggcttcgtctttatcttgagggagttcttgcttagttaaaaatttgatgaagggctctctccagtcggcttcgagcatgttcacttcttgagtgtccgtggcatcggttgtttcttttcttggtacggtcagttcataaagatgttcaacgaacacatcggaaggagctgcttctcgttttgaaccaaagttggctagtctatcggctgcctcattattgtgtcggagaacatgagttagctcaaggccatcgaacttgtcttctagtttgcgtacctcttgccaataggcagtcatattatcatcgaggcaggaccactctttcatgacttgattaacaaccaattgagaatctccatgaactgtcagacgccgaattcccaaagaaatcgcaatccttaatccatgaagaagcacctcatattctgccacgtaatgggacgcagaaaaatgtatccacaacacgtacctcagccgttctccagtcggggaaatcatgacaactcctgctcctgtgcctgaaagcctttttgacccgtcaaaatgcatagtccagtactcctccttttccacagttgtgtcttcctggcattcggtccactcggcaacaaaatctgctagggcttgggacttgatcgaagttcgtggcttgaaggataaatcaaaagacattaattctaaagcccactttgtgatccgtccatttgcctcacgattgtgaagtatgtctccgagtgggaacgatgtgaccaccgtgaccgagtgactttgaaaatagtgagataacttcctaacggtaattaaaacaccatataacagcttttgtacctgaggatatctggtcttggagttggctaaaacttcgctgatgaaataaatcggccgctggactttttgaacatgtccatcttcttcgcgctcaacaaccaggaccgtgctcacaacctgagaagttgccgatacgtataacaacaacggctcttgtgggtgtggtgaagctaagaccggtggagtggtgagaagtttcttgaagtcttcaaaggctttttgcgcttcgggtccccactggaaattgtcggttttcttcaatagcttgaaaaagggcatcccccgctcgccgagtcgtgagacaaatcggcagagcgccaccatgcacccagttagcttttgcacgtctttctgggaactcggcggtttcatgttgaggatggcattgatcttctccgggttccctatgggataccataaagccaagcagcttccctgacggtactccgaagatgcatttttcaggattcaacttcatcctgaatgtgcggatgctcacaaaggtttcttctagatccgcagtcaaatcgtccttctgcttggttttgacgactacatcataaacataagcttcaacgttgcgaccaatctgtcttgaaaagcatctctgaatcatgcgttgataaattgctcctgcgttctttaatccaaaaggcatggtgatgtagcagtaggccccgaagggtgtgatgaatgaagtcttcaggcagtcggactcctttagtcggatctgatgatatcccgagtagcaatccaaaaagctgagtaactcgcagctggccattgaatcaaccacctggtcaatgcgaggtaatccaaaaggatctttgggacaagattagttgaggtcggtataatcaacacacatatgccattgtcccttcttcttccgaaccaggactgggtttgccaaccagtcaggatgtaggacttccttgatgaagcctgctgctaacagcttggtcaattcctccttgattgcatccttcctatcctgtgcaaaacggcggagtcattgcttaatgggtttagcgtcttccttaacatgtaaagagtgctcaatcacctctctgggaatactaggcatatcagatggtttccatgcaaagatatctttattattagcagtcttagtaggatcagagggatctagaggaattttcttggtcttggtgtcgctttctccgctctttgacatcttggttgcaggcacttctccttcggttgcagttgacgcggccagtcggatttcttcttgagcgagcgtgatctcacggttctgggccatctcacaactttccttatcgccggtaacggcttgcttgatatcgctctgcagggatataactcctcgaggacctggcatcttcatcatcatgtaggtgtaatgtgggacagccatgaacttggctaacgcggggcgtccgagtatggcgtggtacgctgtctcgaaatctgcgacttcaaagcaaatgttctctgtgcgaaagtctcccgagtgccaaaggtgactggcagagtgatctggccgagtggagtagcagatagcccggggatgactccgtgaaagggcgcactactcggcttcagctccgtccgagggatctgcatgtcgtccagagtcttggcgaaaaggatgttgagtgcgctgccaccatcgatgagagatcgtcggagcttgacgttgcaaaccactgggtctagtactagggggtaccgccccgggtggaccactcggtcagggtgatctgagcggtcaaacttgatagttgtctctgaccaccgaagatattggggcatatcgggctaaacagcattgatctcccgctcggtgagcttttgcttccgcttggattcataagctagaggtccgccaaagatgtggttgagctccttgcgggagtcttgaaaaccagtcggggcatcatctccatcgtccttcttcttcgacatgccttggtctccatcagtcggcttgcgtgcgttcttggcgtattgctctgcgacctgtttgtagacgaagcaatctttggccgcgtgattggaatttgggtgatgtggacattgggagttcatgatcttgttgaaagtgttgacgcgcgaacgttgccgggaggatggtgtggtagttgctacaagttcctcgggcttacgcttgtgatccttgtgattggtacttccactcccccctgtagtcggcgcatctttctttggcttccaggtgctgcccgactgcttggatgcagtgaccgcgtcttcggctttggcatactcattggctttctcaaacatctacttgactgtcctaggaggtttgcggccgaatttgccgactaaaagctcatgacgaatgcccttggtgaaggcggcgatgatgacgtcatcggtgatgttgaagatcttgttgcgttgcttagaaaaacgacggatgtaatctcgaagggattctccgagcttctggataatgttatagagatcaaactgggtgccagggcgttcaaaggtgccttggaagttggcgatgaagtggtcgtgaagctccgcccaagatccgattgtgccacggggtagcccgtggagacaggaccgggtagaatctgctagagccacaggcaggtagtttgccatggctttgttgtctcctcctgctgcgcggattgcgagaccgtagacggtgagccaagattcagggttagtggtgccgtcatacttctcgattccagtcggcttgaagccagccggccaatccactcgacgcaggtcgtttgtgaaggcagcaactccatccacatcgtcatcgtaacgatctggtgaatggtgggggttgtagcctcttgtcgcgcgacgctggttgatggtctcgcgaagatcgatgggacgcctgcggtgtggggagtgggcacgttcagctcgacgctccctatgccggtcagggggcgagtggacagatcgttcgctgtgatccctgctcctgcgattggatccctcgccgacgacactaaggcttggttggtgatagtcttgagatcgaagaggtggaactcggctgccggtcggcgtgcggatgctcgtggagttaactgggaccgagacggtgatcatggccttggtctagttcaagatgttgacgacgtgatcggcctgattgagtgcgccttccttgaggagggtatcgaggagggtgatcgctgcaaccgtgttctgctgaggggtgcgaaaaaccatcgtcccctcgacatcttgttgcctgatgagttctcgtgctcgtcgcccggattccaaggtgcgctgtcgtcgatcctcagcctccttcgcagcccgctcgcgatcttgttgttcacgctgcaatcgttctcgctcttgtcgttgtcgttcttcctccagtcggtgacgttcagcttcttgtcgtgtgcactcttcttccgcttctcgggttcaccactgttccgccgtctcgttgtcggccatgaatacgccaaagaagagaggcgtgtagtcgtcttcgtagctttcgtcgaagtcgtcgaagttgctgaagtcatagcgatagccgaagtcgtcgtactcgaggatctccgttggtcgagaactgacgccgggggagctgaggtagccgtccaattcttccgtcgagaccgtcccgagaggttggagtataacgccgacttccctagagttagattggattgaagccgaagctgggtcccgtctaggccttcggggagaagacgccttggtggtgaagacagcggccagatcattggggagtctcatcaggattgagggatagggcccatcgtcttgatcaggtcgtgctggagtagattggatctcgtccaagtggtttgaagccgactcgatcgagatgatcttggggtagatctcggccgagttcggaataccgaacggggcggagacctagcctctcctcgactggttcggatccgagtcaaggagagaaatcttgccgaagtcgttggtgatgaagtcgaggctgccaaaccggaacgcctgcctgggagggaagacaaagtcgtcgatgccggagacgaaacccat

SEQ ID NO: 81139 - DNA, 387 bp, Oryza sativa
  Clone ID: PAT_MRT4530_80696C.1
atggctgggcacctcctgacccgtcatgtcccttatacagcagggacatataacaaagatgttgatgaagaagtcagtgtagatagcagtcggatgaacgtggctttggcacctccttcggatgatggatctactattgatccggttgatatgataacgagcccacgagcgacgcttcgatacacggacgagcggcgacatagatctagacaaagagggagagaatcacggacggacgacatcgaagagcggagagcatcacggacgaacaacatcaatcttgatttagagggagagcaccacggacggatgacatctcatcttagcatgacgaagagagaacgcatcatgaacgaacagcacgacgacttcggcttgccgagatga

SEQ ID NO: 81140 - DNA, 3066 bp, Oryza sativa
  Clone ID: PAT_MRT4530_80697C.1
atggcacggggctctgctctgctcgacggcagtgtactgccgccttcccgcatcgtgaatgagaggcacgccggactgccgcgccgcttcatgccggagtccgccaccggtcgggagattgtgatgctgggcgaggggcgcccggcaccagactacccggggcggtccatcttcttcctccccttcgcaatggctgggctggtcccgccattttctcatttcttcatggatgtcctggagttctacgatctccagatggcgcacctcacccccaatgcggtgatgacattggccatcttcgcacacctgtgcgagatgttcattggggtgcgcccctctcttcagctgttccggtggttcttcaccgtgcagtcggtgtcaccgccatcggtggttggcggctgctacttccagccgcgggggccggtgttgaaccgctacatcccctgcgtcctccgcaagaagtgggacgactggaagagcgactggttctacacccccctcgccgacgaagcgcgcctccgacttccgagccagcccccggcgcaggtctccagctggcgggcgccggtagatctgggggaggagtacgacgccgtcctcgaccgcctggcgggcctgcgatcccaggggctcaccggggccatggtgtacggcgattacctccgtcggcggattgcgccgctccaacggcgcgcccggagcgcctgggagtacactgggcctgaagactacatgcggacccaccagggagccagatgggattgggctcctgaggacttcaagatcgtagtccaaagggtgctgaatcttagctccgcggaggcgtctcgccttcctcaggagatcctccccctctgcatcgatcccgaccgcgtctccattctaaccattatgctgggggtcggggcctcagaggagagagcccctaagggccacgacggcgcgggcgagagccgcccggggaaaaaatctgccccaggagggggtcgtgcttctgggccccgcgtcgggggctcggggagcagccgccctgccgacgccccggggaagaggaagctgggaggaacacctcccccatctcctccccgagggggcggggcagtgcgtaccagcggtcggcgcccggagggggctgcgccgacgtcacagcccgagggggagcgcaagaagaagcggctccgcaagatgggggagacggaaccagcccggggaaacctaatttcccctccaaggtggtcattcaaccgaccccctcgcagcgatgtcccgtcgcattcctcccgccgccccaagtccggccagtccgaggtcgaagatccagcggccgcagaggagcggaggcgggagtctgaccggcgtgaagccgcagcccgccttcgggaagctgaagaggccgcccgggaggccgcccgggttcgccaagcggaggaggctgctcgggaggaggccgcccgggctcgccaagccgaagaagctgcccaggaggaggccgcccgggctcgccaggctgaagcggcagctgctgctggcgcgtcactcgggcccactccctcgggcggccctcaagcgacatccttcgaggcggctcgcgacgagggccggggcgcgtcgcctgggcctacctcaccgggcgacgcccaggaccaaacgggcccgggggacatccccgagccagcgcattctcggggggccaaagccgggtggcctttttcacaggcggtttttctcttttcttcttgtcgcccagtgaggcgcgaagccaatatggaaggctttggccgccgaaacaccggggtgctagatggatttagcgcccaggtggaggccttgcgagcggaacgagcggagctcgaggccgcatgggcgcgtgtcgaggaggggcggcgctcggtggacgccatggtggaggtgggccgtaaggcccaccgccgccacatctcggagctcgaagcccgcaaggcggcgctggcggagatcgcccgggaggtggaggaggagcgagaggccgccctcgtcgccaccaccgcgatggtcgaggcgcaagacaccctccgtcttcagcacgcaagctgggaggcggagctgaagagcaagctcgacgccgcccaaggggttctcgactccgccgctgcgcgagagcggcgggcaacggaagccgaagcggcgtcccggcggcgcgaggaggcccttgaggcccgtgccatggcgctggaagaacatgccggcgccgtggagaggggcttgatggaccgcgaggccaccactgctctccgggaggcgacgctggcggcgcacgaggccgcctgcgccgaggaggagtccgcgctccgccttcgcgaggatgcactcgccgagcgggagcgggctctcgaggaggccgaggccacgacgcgacggctggcggacagcctctccctccgcgaggcggcgcaagaggagcaggcgcgccgcaaccttgaaagcgtccgcgccgagagagccgcgctggagcagcgggttgctaacctcgaggcacgggagaaagagctggccgcgggggcgcgcatcgcgcgcgctggactcctccacgggggaggccgaggcccttcgcttggcgggcgagattgggcccggcatgctttggacgcggtctcccgcatgaagcgcgccggtcggcaagcaggcctctgggaaggccagacgacggtgccccccaccaatctggaaggcctcgctccgcacctcaacaggatggcttgggttctcgagcgactccccgaggagctcgagaagaccattaaggcatcctcgagggacctcgcccggggggcggtcgaactcgtgctggcgagttaccaggcccgggatcccaacttctccccatggatggcgctggaggagttccctcccgggaccgaggacgaggcgcgcgcgcgggtcggggatgctgctgaccacatcgtcaacggcttcgagggctcggcccctcggcttgcgttcgcccccagctccgacgaggaaggcgacaccagcagcgaggacggcggtggcgacgaggccggcgacccgggcgcatatgaatga

SEQ ID NO: 81141 - DNA, 114 bp, Oryza sativa
  Clone ID: PAT_MRT4530_80698C.1
ctgcaggtgaacacaagacttattctatttcgctccaagaaccaattcagacaagattaacgccgttggatcggaaggaagctattagggttcttccggcgacgggagaaaaat

SEQ ID NO: 81142 - DNA, 2490 bp, Oryza sativa
  Clone ID: PAT_MRT4530_80699C.1
ctaagcataaaatcgacgaaggtgttcaatattccaagaattgttgatgagagtaccgtcttcgcgcttgagtcgataagaacccggccgagtgacttcagcaattatgaacggtccttcccataagggagataatttatgccgatcctgtgttgtttgaattttccgcagaaccaggtcaccgactaaaaaggctcgcgatcgaacattccgattatgataacggcgcaacccttgcaaatatcgagtcgactgaattaaagctgcttctcgggcttcttctagtcggttgatgtcgtctactcggccctcttcatagccctccgcattgaagttccgaaatcgtagtgattcaaattccacttcactcggcaacattgcttcgttagcacgctcgacttgtccgttactcatagggtgtgccacggaggcgtaacaaattttaatgctgaagtcttcacagaagtctttaaatgctccgccagtgaattgagtgccattatcagtgatgatccgattaggtaccccaaaccgatgcacaatgttgatgaaaaaatctctagctttatctgctgtgatcgtaatgaccggtttagcctcaatccacttggagaatttgtcgatagccacaaagagatgcgtgtaaccaccgactgcccttttaaatgggccgaccatgtcaagcccaatcttgtccgcatcgaacacagctgtaggcgagaaaaaaccttgccggtaagctttgccgacaatggtccgtgcagcagcatgattaccacaaataccagaatgtatatccttcaacaattgtctcccttcctccaaagatacacagcgctgcagtattcctgatggacttttcttatacagttcagcttcatgaataatgtaaagtctgctgcgcctggaaatccgctcgccttcatttttgtcttgagggagttcttgtttggtcaaaaattttatgaggggttctctccagtcggcttcaatcatgcttacgccttgagtatccatggcttcaattgcttcttttctgggcacggttggttcataaagatgctcaacgaacacatcagaaggggctgcttcccattttgaaccaaaattggccagtctatgagctgcctcatttttatgtcgaaggacatgggtgagctcgagtccatcgaatttatcttccagcttgcgtacctcttgtcgataagcggtcatattatcatctagacatgaccactctttcatgacttgattaacaaccaactgagagtctccacggacgattaatcggcgaatgcctaaagagattgtaatccttaatccatggagtagcgcctcgtattccgccacattatgggacgcagaaaaatgtatccacaatacgtagctcaatctttctccagtcggggaaatcaagatgaccccagctccagtgcctgtgagcctcttcgacccatcaaaatgcatagtccaatagtccaggcccacttcgcgatccgtccatttgcttcgcgattgtgaagtatatccccgtgtggaaacgatgtgactaccgtgaccgggtgactttgaaagtagtgagataatttcctgaggatatcttgtcttggagtcggctaaaacctcgctaacgaaataaattggacgttggactttttgaacatggccttcctcttcacgctcgacaaccaggaccgcactcacaacctgggaggtcgccgacacatataacagtagcggctcttgcggatgtggcgaggccaaaactggtgaagtggtgaggagtttcttgaagtcttcaaaggctttctgtgcttcgggcccccacgggaaattgttagtcttcttcagcagcttgaagaaaggcatccctcgcttgccgagtcgtgaaacgaaccggctgagcgccgccatgcaaccagtctgcttttggatgtctttttgggagcttggcggtttcatgttgaggatggcgttgattttctccgggttggcctgtatacctctttgagataccataaatccgagcaatttccccgacggtactccgaagatgcacttttccaggtttagtttcatcttgaaagcacgaatgcttgaaaatgtttcttctaaatccgcaatcaggccatccttctgcttgatcttgacgactacatcatcaacataagcttcaacattgcgaccgatctgagttgaaaaacatctttgaattatgcgttgataggtcgctcgttcctgatgttttgctcgtgatcgaattgcaatccccaaccacaaaatcgggtttaactcctccccccatctttgagaaccggtgtaaatcaactccttcagtgctttgagaagtggtttcgtcttccccctctctcctccatctatctcgacggcgctgtacccaagcacgaagacctgccaccaagagttggagctcatggctccggcggcggcagccacggccaaccgcagcacggaccacacgtgacacat

SEQ ID NO: 81143 - DNA, 828 bp, Oryza sativa
  Clone ID: PAT_MRT4530_8069C.1
atggcgggcgtcgaggcggcactgcttcctccgccaccgccgccgccgcaggcgaggtgggcctccgtggcggcgaccctgctccggctcctcgcgctggccgctgacgtcctggtgtacggcctcctcgccgcgatgtggctgaacaacgccgccttcgccgccgccatcttctcgcgctgggccagcggcgagggctccaccaccgtggccatcttgtcgtgctcggccagaggcgagggctccgccgccgtcgccgtcgccgccgccacgaaggtcttctgggcctcctttctcgccgtgggggtgttcttcccgtttgctggccctctactgatgtggcgccttgggatcgggcctccgcctccccccgagacccgtgagagtgggagtggaggacgcgccgccgcgcagcgtggtcgtcgtggcagcactggcccggcgagccgccgtcaggagggaggcgggcgacccgtcgcccttctcttcatgttcttctcttggtgggtcgcgttcgccggtatcctgctgcaagagctcgcgcctgagaaggcgtcctgtcaggagaaggttggctccgtgcttactgacatcggaggcttcgctaactctgttctgttctggaacacatggtttttttgtgtagtacaaagtgctttgagctgtttctcgagaaatctgatgtgtgactgcaagaagctactacctgttgcagtttaccttctgaagtgcagttttaccttcacgaacttcagttttgattttatttggaacgtgaactcaaaatgctctgcatatgggcatatggccgtctttaaaccctactga

SEQ ID NO: 81144 - DNA, 231 bp, Oryza sativa
  Clone ID: PAT_MRT4530_806C.1
ggggcgggggccgggtggagcagcgggcgagcggcggcagcaggcggcgtggacgccggtgaggaggaggggggcggcgagccacgcccagagcgagccgacggccgccgccgccgccggcgggagcccctccgctccaaatgcccctgtatctctctgttcgtcgcggaactttgccgtcctgatctctcccttgggggaaacatcttgttgcagatctcctacgccgcc

SEQ ID NO: 81145 - DNA, 893 bp, Oryza sativa
  Clone ID: PAT_MRT4530_80700C.1
atgagggcctactggacagtgacttggccgaaggagagggggaaagacggtgccaggggaatagggttgatctgcaccggcaagatcagcaacccacggagagggatacgcaagataattggggatagctgcgctcaacatcgacatcttcgtcgagacatgaggagggatcaacatgaccattatgaggaagtgcataatcatgaaaaggaggagagagatatgaaagagccgccagtcccattgatcacactcaaagtcgaggcacctccattatctgaagagggcatcaaagagcaaccattagtggaaccaactgctgagattcctttgtcacaaattgatttgtttgctgttccttgtgataaagaagagttatgcgataatgcttcacttatatccatgccacaacttgtgaatgaacatgctattcctactgttaattcatactgcactgattttaagcatgttgttcacattgctaatgaagtagaggagcgtgaattgagatcttctttaaataatttaggctatgttcagtttgatgatttttgtgagctcgataatttcaaggagaaattatttgctaagtctgatttgccatatccaaccaatgttatatttcacatctttggtgaatataatgatcttggaatatattttgtgcatagagtttacatctgctcggatttagaacctcatgttgttgtaaatggactacgcaaagagcaccatatggaaaaaccgaggacggttttccgtgaagaaggggaggatgatgtgaccatggctaccacggatgcaaccattgctcacatcatggatgaacaagaagatatcgagatcaagaatagggttgatctgcaccggcaagatcagcaacccacggagag

SEQ ID NO: 81146 - DNA, 1059 bp, Oryza sativa
  Clone ID: PAT_MRT4530_80701C.1
atgcatcctcgaggctcttctcccctcctgcatcctcccgcttcctccgtcctgtcactgcggaaccctggagaaaagaggagaggggaagaggaagaagaagggctcacctcggatctcgagaatggaggcgcagaggcggcgtctgagggggagggagaggcctggatgagacgtcttgccggaggaggaggctcggcggcgccggcggtggcggtggctcacgagagcggcggcgccggcggtggcggagaacagaaaggtgtatgtgtttcgcctggtggacgattccctgccttctcatctgaaggtaagcgtcctggaagagcagctaaggggcgcagagatctggcactatgtagagtattccggcagaacacgtgttgcgatgtgtcccagacattttctgccctgctctcagtgagaaagcttgcatcgactggtgaaggtagtcaagaatgccttcatctgtgggaactgctcgagtgttcgatttgtgatccacgggtgggtgttaggcctggacctccagttatatgtgcatcattctgtgacatggttttcaaagcttgctcagaggcgtacttcgctatcgatgtgaaaacacagaactgtgacatcctttgtggcaaagcacataaatgggtctctaatggcacagagctatgtcgctctgctggtttctctgtgcaagctttggagaccacctcgggtggagtggatgacactttctgctatggtgggaaagcaagttttgatgccatctctagttcatggacatcttcaaaagagcgtccagtattaagtgatgtggcctcttggaatcttgaagattttcgcagatgggcaagagaaatgcctgctagtgaaagagtttcatgggcaattggaggaatggttcttacagcaggccttatatttatcagtttgtgcagtaaacggaagagctacattcctggccaaaagcaagctgctatcgcccgcaataaaagctccttgaacaaactgagaacaggcacagcagctgctttccccgtagggcaaccacgagagttgtaa

SEQ ID NO: 81147 - DNA, 3159 bp, Oryza sativa
  Clone ID: PAT_MRT4530_80702C.1
atggcacggggctccactctgcttgatggtagcgtgctgccgccttcccgcatcgtgagcgagaggcaggccgggctgccgcgccgcttcatgccggaatctgccaccggccgggagatagtcacgctgggtgagggacgcccggcgccatgctacccggggcggtccgtcttcttcctcccttttgcaatggcagggctggttccgccattttcttctttcttcatggatgttctggagttttacgatctccagatggcgcacctcacccccaacgcggtaatgacattggccatcttcgcgcacctgtgcgagatgttcatcggggtgcgcccatcccttcggctgttccggtggttcttcaccgtacagtcggtgtcgccgccgtcggtggttggtggctgctacttccagccgcgggggccggtgctgaaccgctacatcccctgcgtcctccgcaagaagtgggatgactggaagagcgactggttctacaccccccttgccgacgaagcgcgcctccaacttccgagccagcccccggcgcaggcctcctactggcgggcgccggtagatctgggagatggctatgacgccgtcctcgaccgcctggcgggcctgcgatcccaggggctcacaggggccatggtgtacgacgactaccttcgtcgccggattgcgccgctccagcggcgcgcccggggcgcctgggagtacaccgggtctgaagactacatgaggacccatcagggagtcagatgggactgggctcctgaggacttcaagatagtggtccaaagggtgctgaatctcagctccgtggaggcatcccttattccccaaggagtcctccccctctgcagcgatccagaccgcgcctccatcctgaccatcatgcaggcggtcggggcgtcggaggagcgggctcctcgaggccacaatggcacgggcgggagccacaggggggaacaatctaccccaggagggggtcgtgcttctgggccccgcgacgggggcccggggagcagccgccctgccgacgcccgggggaagaggaagcaggaaggaacccctcccccatctcctccccgagggggcggggcggcgcgtgccagcagcaggcacctggagggggccacgccgacgtcgcagcccgagggggagcggaagaagaaacggctccgcaagatgggggggacagaaccatcccggggaaaccttatttcccctccaaggtggtcgtttaaccgaccccctcgcagcgagatcccatcgcgttcctcccgccattccaagtccggccagtctgaggccgaggattcggcggccgcagaggcccggaggcgggaatctgaccggcgagaagccgcggatcgccttcgggaagccgaggaggccgctcgggagaccgcccgggctcgccagaccgaggaagccgctcgggaggaggccggactccaccaggccgaggcgacgacatcttccgaggcgacccgtgaaactgaccggcaagaggctgcggatcgccttcgggaaaccgaggaagctgcccaggtggccgtccaagctcgccaagctgaagaagccgctcgggaggaggccagacttcggtcggccgaggcgacgacgacttccgaggcagctcgcgacgaggccgcgggcgcatcgcttgggcccactccctcgtgcgacgctcaggaccaaccaggtccgggtgacatccccgagtccggcacgtccatcggcgggctgagccgcgcggcatcctctccaaggcggctcttccccacaccttccgttgccccactgagcgcagaaccccttctgcaggccttggccgtcgcaaacaccacggtgttggacgggttaagtgcccaggtggaggccctgaaagcagagcgggcggagctcgatgccgcatgggcgcgtgtcgaagaggggcgacgctcggtggaggccatggtggaggtgggccgcaaggcacaccgccggcacgtctcagagctcgaagcccgtcggaaggtgctaggggagatcgccaaggaggtggaggaggagcggggggctgccctcatcgccactaccgtgatgaacgaggcgcaggacaccctccgccttcaatacgggagctgggaggcggagctagggaagaagctcgacgccgcccggggggtccttgacgctgccgctgcccgagaacggcgggcgacggagaccgaggtggcatcccggcggcgcgaagaagcccttgaggcccgtgccatggcgctggaagagcgtgcctgcgtcgtggagagggaccttgcggaccgcgaggccgccgtctccatccgggaggcaacgctggcggcgcacgaggccgcctgcgccgaagaggagtccacactccgcctccgcgaggacgcgctcaccgagcgggagcgagctctcgaggaggccgaggccgcggcgcaacggctggcggacagtctgtccctccgcgaggcagcgcgggaggaggccgcactgaaccagcgggtcactgaactcgaggcgcaggcaaaggagctggacgcgagggcgcgcagcggcggggcggccgcgggcgaaagcgacttagccgcccgcctcgcagctgccgaacacaccatcgccgatctgcagggcgcgctagactcgtccgccggggaggtcgaggccctccgcttggcaggcgaggtagggcccggcatgcttcgggacgccgtctcccgtctagaccgcgccggccggcaggcgggcctctggggtgggcggatcgcgaagtacgccgccaaccaggggggcctcgcccagcgcctctcggagatagccgagactcttcaacggctcctcgaggagctcgagaggacgattaagtcatcctctagagacctcgcccggggggcagtggagcttgtactggcgagctaccaggccagagacccggacttctccccatgggcggcgctagacgagttccctcccggaaccgaggacgatgcgcgcgcgcaggtccgggacgccgccgaccacatcgtccacagcttcgagggttcggcccctcggctcgcgttcgccctcaactccgacgaggaggacgatgacggcggagtgggcgacagtggcgacgaggctggcaacccgggtgcatcggagtga

SEQ ID NO: 81148 - DNA, 1416 bp, Oryza sativa
  Clone ID: PAT_MRT4530_80703C.1
atggcagggatacgcaagataattggggatagctgtgctcaacatcgacatcttcgtcgagacatgaggagtgatcaacatgaccattatgaggcaagtgatgatgctctaggtaagatcaaatctgcactgccttatttcgagggaaactatgatcctcatgcttacattaattgggagctagcggttgatagtgaatttcaaaagcatgtcttgtctgagaaacaaaaggttatgtgtgcctctagtgttttaattaaacatgcttctaatgattggaaacatctttgtaggcataacaaaataccacaatcttggaaagacctgaaacgatattttagagatgtttatgttcccatgtattatgctgacattttgttcaacaaactacaatgtttaaaacaagataccagaactgttacttcatactatcatgatatgcaagcttgtttattacgttgtggtttagatgaatgcgaagaagctaaagaattgaggtttttacgtgggcttaacaaagaaattcaggacatgcttgattgtcaaagatatacatctctttctcatttgttacaacttgcttgcaatgctgaaagtaaaatagaggaggacatgaagaagcaacatgctatgtttttgtcttctattactaaccatttgcaggaagtgcataatcatgtaaaggaggagagagacatgaaagagccgccaatcccattgttcactctcaaagtcgaggcacctccatcatctgaagagggcatcaaagaagagcaaccattagtggaaccaactgctgagattcctttgtcacaagttgatttgtttgctgttccttgtgataaagaagagttatgtgataatgcttcacttatatccatgccacaactagtgagtgaacatgctattcctactgttaattcatactgcgttgtttacattgctaatgaagtagaggagcgtgaattgagagcttctttaaatactctgggctatgttcagtttgatgatttttgtgagctcgataatttgaaggagaaattatttgctaagtctgatttgccatatccaaccaatgttatatttcatatctttggcgaatataatgatcttggaatatattttgtgcatagagtttacatctgctcggatttagaacttcctgtacatgtggataaaacatacaagctagagagaaatgttattgctaaccaaattgtctcgagtttgccttgttttgattggaagaaacatgttgttgtaaatggactacgcaaagagcaccatatggaaaaaccgaggacggtttaccgtgaagaaggggaggatgatgtgaccatggctaccacggatgcaagcattgctcacatcatggatgaacaagaagatatcgagatcacatcgtccaagagctag

SEQ ID NO: 81149 - DNA, 263 bp, Oryza sativa
  Clone ID: PAT_MRT4530_80704C.1
atgtccgagggagcggcggccgccgcgccgtcgccggcagagatgtacggtgacgaactaggcgacctcgagaacaaggtgccgatcaatttcgtgctcctgatcagccgccagggcaaggtgaggcttaccaagtggtactcgccttacacccagaaggagaggactaaggttatccgtgagctcagtgggctcattctaacacgcgggccaaaactctgcaactttgttgagtggaagggttacaaggttgtgtacagaag

SEQ ID NO: 81150 - DNA, 2499 bp, Oryza sativa
  Clone ID: PAT_MRT4530_80705C.1
atggtgtacggcgattacctccgccgccggattgcgccgctccaacggcgcgcccggagcgcctgggagtacactgggcctgaagactacatgcggacccaccagggagccagatgggattgggctcccgaggacttcaagatcgtggtccaaagggtgctgaaccttagctccgcggaggcgtctcgcattcctcaggagatcctccccctctgcagcgatcccgaccgcgcctccattctaaccattatgatgggggtcggggcctcagaggagagagcccctaagggccacgacggcgcgggcgagcgccgccggggggaacaatctgccccaggagggggtcgtgcttctgggccccgcgtcggggtctcggggagcagccgccctgccgacgccccggggaagaggaagctgggaggaacacctcccccatctcctccccgagggggcggggcgacacgtgccagcagtcggcgcccggagggggccgcgccgacgtcgcagcccgagggggagcgcaaaaagaagcggctccgcaagacgggggagacggagccatgccggggaaacctgatttcccctccaaggtggtcattcacccgtccccctcgcagcgatgtcccgtcgcattcctcccgccaccccaagtccggccagtccgaggccgaagatccggcggccgcagaggagcggaggcgagaagctgaccggcgtgaagccgcagatcgccttcgggaagctgaagaggccgcccgggaggccgcccgggctcgccaagccgaagaagctgctcgggaggaggccgcccgggctcgccaagccgaagaagctgctcgggaggaggccgcccgggctcgccaggctgaggcgacagctgccgctggcgcatcacttgggcccactccctcgggcggccctcaagcgacatcctccgaggcggctcgcgacgaggctgctggcgcatcgcctgggcctacctcaccgggcgacgcccaggaccaaacgggcccgggggacatccccgagcccagcgcatcctccggggggccaagccgcgtcgccttttccccaaggcggctcttctcctcttcttctgtcgccccgctgagcgccgagccccttctgcaggccctggccgccgcaaacaccgcagtgctggatgggttcaacacccaagtggaggccctgcgggcggaacgagcggagctcgaggccgcatgggcgcgtgtcgaggaggggcggcgctcggtggacgccatggtggaggtgggccgtaaggcccaccgccgccacatctcggagcttgaagcccgcaaggcggcgctggcggagatcgcccgtgaggtggaggaggagcgggcggccgccctcatctctaccaccgcgatgatcgaggcgcaagacactctccgccttcagcacgcaagctgggaggcggagctgaagaaaaagctcaacgccgcccaaggggtccttgactccgccgctgcccgagagcggcgggtaacggagactgaagcggcgtctcggcggcgcgaggagacccttgaggcccgtgccatggcgctagaagaacacgccggcgccgtggagaggggcttgacggaccgcgaggtcgccgctgctctccgggaggcgacgctggcggcgcacgaggccgcctgcgccgaggaggattgcgcgctccgcctccgcgaggacgcactcgctgagcgggagcgagctctcgaggatgctgaggccacgaccagacggctggcggacagcctgtcccttcgcgaggcggcgcaggaggagcaggcgcgccgcaatcttgagtgcgtccgcaccgagagagccgcactggagcagcgggctgctgacctcgaggcacgggaaaaggagctggacgcgaggacgcctgtcggcggggcggccgcgggcgaaagcgacttagccgcccgcctcgcagctgccgaacacaccgtcgcggagatgcagcgagcgctggactcctccaccggggaggccgaggcccttcgcttggcgggcgagattgggcccgacatgctttgggatgcggtctcccgcatgaagcgcgccggtcggcaagccggcctctggagaggccagacgacggtgccccccaccaatctggaaggcctcgctccgcacctcaacaggatggcctgggtcctcgaacgactccccgaggagctcgagaagaccatcaagtcatcctcgagggacctcgcccggggggcggtcgaactcgtgctggcgagttaccaggcccgggaccccagcttctctccctggatggcgctggaggagttccctcccgggaccgaggacgacgcgcgcgcgcgggtcggggatgctgccgaccacatcgtcaacagcttcgagggctcggcccctcggctcgcgttcgcccctgactccgacgaggagggcgacgccagcggtgaggacgacggtggcgacgaggccggcgacccgggcgcatcggaatga

SEQ ID NO: 81151 - DNA, 2817 bp, Oryza sativa
  Clone ID: PAT_MRT4530_80706C.1
atggaggcgcttgtcggcggatatactccgcaccttgccgaaggtcggcaagctgcccaaacccttctagattgggacagtacgttagaattggatgatttccgggtggctagtaccgtctcgattgatatagttattaccaggacaatggcagaagggcatgagcaaaaagttatagaaattgcgattactatccatgataatgactacactgatcaactaatcagcttgatgactaagctgaagataaatgagaagccggaattctattcacatgcctatcaatggggagaacgttgggagtgtgatatgactgtgaagatcaatcccccaagaggtgaacgtgatatgtattacttccgaacacgtcatagggaggcttttctacgtcttaatcatatctatcaagataagctgcaacactctcgctattcttaccatcctatgcgaaagccgggcgaagattactgtactcttcaagacgtggattatcatgaacaaccagtaaaagcaactatgtctatctggatggaagctgcagatgacatgtatgaagaagccctagaacacatggatgtacaacgtaaacgtttggaggaagctgaacgcagagaagctgttctcaaacacaaatatcgtatacttcacgaattatatgaggaaagagaaaaacataattctatcctcaatatttgtgttgcaagagcagccttctgtcttcaccaaatcccaaatatgggtagtgatgacgatgatgatgatgatggtatggaaggacatatctcaccagtacgtgaagatgaaccacatcctcaggataatggtgaaggagttttacaaggtttaccaccatcaccaccaccgttgtatcctatttattctgatgatgaagcagaagaaatgcattcagctatcgatatcagtgaacctagccaagaacctgaagtactcaggccaaatcgggacatagcaaaaaatcaaggaaataaaggttatagtgcacatgcagaatttctgaggattaaaccaccagttttctcaaaatccaaagaacctatggatgccgaagactggctaagggctattgaaaagaaactaaccttggtcagaacaaacgaacaagagaaggtaacctttgcaacccatcaactagaaggaccagccaatgaatggtgggaagcatatcaagcttctatagaagatcctacccatatcattacatggatggaatttaccatagctttcagaaatgcttttatacctacagctgtgatcaggatgaaaaagaatgaatttcgaggattaagacaagacattcaagatgagaaagagaggattgaaaggtttatagaaggattacgtgatgaacttcgaggaccaatgattagtcaagatcatgaaagttttcaaagcctagtcaataaagtggttaggctagaaaatgatcgtagaatggtggaaggattccgtaagagaagaatgaatttacaacgacaatcaccaactagaagttcactacaagttcggaggccttatccatttaagccatctctatccaatgcaaggccgggcatgccaccaatactatcaagacctggattaaggatggaagactctccatgctatgtttgtgggaagtttggacattttgcaagactatgccctaatcgtcaaaatatgggtggccaaacttcttatcagaaaccatctactacaggttttataaagaaaaatcctccaattattaagagtggacctaatcttggacgtggtcaagtacatcatattaaagcagaacaagctcaacaagatcctaatatattgatgggaatagggttgatctgcaccggcaagatcaacaatccacggagagttgttgagttgcatcttgggtttgctgactgggcgttcttctattttggccgtgcctgtgtcgtgcatgagaggaggaaggctcgcgtctctaggatacgcaagataattggggatagctgtgctcaacatcgacatcttcgtcgagacatgaggagtgatcaatatgaccattatgaggaagtgcataatcatgaaaaggaggagagagacatgaaagagccgccagttccattgttcacactcaaagtcgaggcacctccatcatctgaagagggcatcaaagcagagcaaccattagtggaaccaactgctgagattcctttgtcacaagttgatttgtttgcagttccttgtgataaagaagagttatgtgataatgcttcacttatatccatgccacaactagtgaatgaacatgctattcctactgttaattcatactgcgctgattttaagcatgttgttcacattgctaatgaagtagagaagcgtgaattgagatcttctttaaatactttgggctatgttcagtttgatgatttttgtgagctcgataatttgaaggagaaattatttgctaagtctgatttgccatatccaaccaatattatatttcacatctttggcgaatataatgatcttggaatatattttgtgcatagagtttacatctgctcggatttagaacttcctgtacatgtggataaaacatacaagctagagagaaatgttattgctaaccaaattgtctcaactttgccttgttttgattggaagaaacaggcacaaggtgctgcgtcacctataatgggcctatgggcttgtaacttcatttgggaccccggcccaggtggggcccatgtggggtgtgccccaaccaggaatagggttgatctgcaccggcaagatcaacaacccacggagaggtgtattgatcgctaa

SEQ ID NO: 81152 - DNA, 309 bp, Oryza sativa
  Clone ID: PAT_MRT4530_80707C.1
atggacaagcgcgccatgccgcatttaatgcagcacggcgcacgcatatccgacaaccgtgctcccacgttgcatctgcttccggcggagtggagggtgatcccctgtgtccgacgagtgacggcgctgggcatcactcaaggacaagcggctccaaatgatggttggaggcatgggaaattaccaaaataccctgcaaccgcctttgggaaggaatccaagccatccacgtggaagcagatggcgagaagcggcaggaaaggttcggccgaacccaaaaacactcctcctggcctctccttcggctag

SEQ ID NO: 81153 - DNA, 1171 bp, Oryza sativa
  Clone ID: PAT_MRT4530_80708C.1
atggccaggatcgccgccgtcgccgcgactcttctcctcgccgccgccgtcgccgcgacaaccttgccgacgacgtcgccggcgcgcggcatccgccttctggagggaggaagatcaagccccgccgccgccgtcgacgacgaggaggtcgcgaccgcggccgtggccccgacgtcggcgggcgccgcctcggaggcccccttgtcgctgatgtggtggctggtcatggcgcttcgtgacggaggcagcgccgccgccatgtccgagggagcggcggccgccgcgccgtcgccggcagagatgtacggtgacgaactaggcgacctcgagaacaagaaatattataccgacgaaaatatttacagaaatagaccctgccatccaagtatagagcagcaaggtgacatggcacacggcgccgttttttgcctgctcagcggcctccccgagggcggtaggatcaatttcgtgctcctgatcagccgccagggcaaggtgaggcttaccaagtggtactcgccttacacccagaaggagaggactaaggttatccgtgagctcagtgggctcattctaacacgcgggccaaaactctgcaactttgttgagtggaagggttacaaggttgtgtacagaaggtatgcgagcctgtatttctgcatgtgcattgatgctgaggacaatgagctcgaggtccttgaaattatccatcacttcgttgaagtactggaccgatattttggcagcgtatgcgagctggatttgatattcaatttccacaaggcctactacatacttgatgaaattctcatcgctggtgagcttcaagaatctagcaagaaaaatgttgcaagactaattgctgcacaggattcattggtagaggcagctaaagaggaagctagctctataagcaacatcattgcccaggctacaaaataaaattctactccagtctgatgtttgctctcttttgttgtgttatattggtaaatgcaatgtactagtccatttggtctgttcagttttctaagatacgtctttcaaggtgccaggattaagaatgaacatgatgtaactacactgtatccgctattttgaaccgaagtccgattttccttattgataaaaatgtgcatgagaagttgatcgtgggaaaaaaaaaaaaaat

SEQ ID NO: 81154 - DNA, 3222 bp, Oryza sativa
  Clone ID: PAT_MRT4530_80709C.1
atggcacggggctccgcactgcttgatggtagcgtgctgccgccttctcgcattgtgagcgagaagcaggctgggttgccgcgccgcttcatgccggaatccgcctccggccgtgagatagtaatgctgggtgagggacgcccggcgccagactacccggggcggtccgtcttctttctccccttcgcaatggcggggctggttccgccattttcttctttcttcatggatgtcctggagttctgcgatctccagatggcgcaccttacccccaacgcagtgatgacattgggcatcttcgcacacctgtgcgagatgttcattggggtgcgcccatctctccggctgttccggtggttctttaccgtgcagtcggtatcgccaccgtcggtggtcggcggctgctatttcctgccgcgggggccggtgttgaaccgctacatcccctgcgtcctccgtaaaaagtgggatgactggaagagcgactggttctacacccccctcgccgacgaagcgcgcctccgacttccaagtcagcccccggcgcaggcctccagctggcgggcgccggtagatctgggggatggctatgacgccgtccttgaccgcctcgcgggcctgcgatcccaggggctcaccggggccatggtgtacggcgactacctccgtcgtcggattgcgccgctccagcggcgcgctcgggccgcctgggagtacaccgggtccgaagactacatgcggactcaccagggagccagatgggattgggcccccgaggacttcaagatactggtccaacgggtgctaaatctcaactccgtggaggcgtcccttatcccccacggtatcctccccctctgcagcgacccagatcgcacctccatcttgaccattatgacggcggtcggggcctcagaggagcaggctcctaagggccatgacggcgcaggtggaagccgccggggggatcaatctacccccggagggggtcgtgcttctgggccccgcgttgggggctcggggagcaaccgccctaccgacgcccgggggaagaggaaattgggaggaacacctcccccatctcctccccgagggggcggggcggtgcgtgccagcagcaggcgcccggagggggccgcgccaacatcgcagcccgagggggagcgcaagaagaagcggctgcgcaagatgggggagacagaaccatcccggggaaacctaatttcccctccaaggtggtcatttaaccgaccccctcgcagtgatatcccatcgcgttcctcccaccatcccaagtccggccagtccgaggccgaagatccggcggctacagaggcacggaggcgggaatctgaccggcgggaggccgcagaccgcctacgggaagctgaagaggccgcccgggaagccgcccgggcccgccaggctaaggataccgctcgggaggaggccgcccgggcccgccaagccgaggaagccgctcgggaggaggccgcccgggttcgcctggccgaagaagccgctcgggaggaggccgcccgggcccgccaagccgaggaagccgctcgggaggaggccgcccgggaggaggccgcccgggaagccgcccgggaggaggccgcccgggttcgccgggctgaggcgatggcggcttccgaggcagttcacgatgaggccgtggacgcctcgcttgggcccaccccttcgggcgacgcccaagaccaaacaggtccgggggtggcccgcgatgaagccggcgcgtccatgggcgggttgagccacgcggcgtcttcttcaaggcagctcttccccacgccttccgccgccccgctgagcgcagagccccttctgcaggccttagccgccgccaataccgcggtgttggacgggctcaatgcccaggtggtggccctgcaggcggagcgcgcggagctcgacgccgcatgggcgcgtgtcgaggaggggcggcgctcggtggaggccatggtagaagcgggccgcaaggcacaccgccggcacgtctcagatcttgagacccgcaagacggcactggcggagatcgcccgagaggtggaggaggagcggggggctgccctcatcgccacctctgtgatgatcgaggcgcaggactccctcctccttcagcacgggaactgggaggcggagctgaagaaaaagctcgacgccgcccagggggttcttgatgccgccgctgcccgagagcagcgagcgacggagaccgaagcggcgctccggcggcgcgaagaggtcctcgaggcgcgcgccatggcgctggaggagcgcgcctgcgtcgcggagaaagtcctggcggaccgcgagaccgccgtcacctcccgggaggcaacgctggcggcgcacgagtctgcctgcgccgaagaggagtccgcactccgcctccgcgaagacgcgcttgccgagcgggagcgagctctcgaagaggccgaggccgaagcgcaacggttggcggactccctgtccctccgtgaggcggcgctgacggaacaggcgcgccgtaatctagaatgtgtccgcgccgagagggccgcactggaccagcgggccgctgacctcgaggcgcgggagaaggaggtggacgcgagggcgcgcagcggcggggtggccgcaggcgaaagcgagttaactgcccgcctcgcagctgccgaacacaccatcgccgatctgcagggcgcgctggactcgtccgccggggaggccgaggccctccgcctggcaagcgaggtagggcccggcatgcttcgggacgccgtctcccgtctagaccgcgccggtcggcaggcgggcctctggggcaggcggactgcgaagtacgccgccaaccaggggggcctcgcccagcgcctttcggagatagccgggactctccaacggctccccgaggagctcgagaggacgattaagtcatcctcgagggacctcgcccaaggagcggtggaactcgttctagcgagttaccaggccaggaaccccaacttctccccatggatggcgctggatgaattccctcccgggaccgaggacgacgcgcgcgcgcgggtccgggatgccgccgaccacatcgtccacagcttcgaggggtcggcccctcggctcgcgttcgcccccaactccgacgaggagggcgatctcagcggtgcagacgaccgtgacgacgaggccgacgacccgggcgcatcggactga

SEQ ID NO: 81155 - DNA, 387 bp, Oryza sativa
  Clone ID: PAT_MRT4530_8070C.1
actagtggatccccgcgcggctggcttcttgcttgtgcttggctctcctctctggaagctcaagactttgtgtgcttgtctcttatcttttttccaactgcataccggccaagagaagagagccaggagaaatgccaaactggaagttactactcctactactatagagtggattggaattggattcctctctttacagatcaagatttcaatttttgagggaagacgatgcttctttacatggtaatacctgtcttgaggtggtatggaatcatcaatcatgtgtgctttcacaatctaaagatttgagctttctggacaaactagctgtctagccccatctccacactccatagggtccagtgccgcgtcctctcccccttccta

SEQ ID NO: 81156 - DNA, 2877 bp, Oryza sativa
  Clone ID: PAT_MRT4530_80710C.1
gtattgcccttggcatttgcttttgttgagagtgagaataccgacagctggtactggttcctgaaattggttaaaacaaaagttgttggtatgaggccaaatgtgtgcctgatacatcataggcacgctggcattctgcgagcgatagaagagttgcagtttgggagtatggaacgaggataccctggtgagtgggaagatgtacagagcaggtggtgcatgcgtcatatgggagctaatttcttcaagcaattcaagaacaaggagctcatgaacatgtttaagaggctatgcaatcagaaccaggagaaaaaattcaatgagctttggaaaagattagatgagttgatagccaaatgcagtgatcagcgtgcagcggctccatcgaccaccgatgctgaccctcctcaagctcttggacctctcccaacggatagtccaacattggttagaagaactggattggagattcggaaattttctcagtggattctgcatgaaccaaaagagaaatgggccaaggcgtatgacacagaagtttacaactgggtgatggcgcggtgtccatggactgccactagttggcatagtggagtttattttacatgggacatgcagcacaggtttgagatactatgtcaagataaggcaggcaggggtatctaccgcaagagagtgaagcaggagtgtgttctcaaagccgacggcacatgtcattgctcttatgcaaagccgaagctgctccacaggccatgcacccatgtcattgctgccgcagcggagtgtggcataccagatgcagtatatgtttcacagtacttcagtagcaagcaatatatcatacatggggggggaaaaaggtccccgggccgcgagatttatgggttcggcatagctggggagttcatagagactaacgatgaagtactcaatatttctgacccatcgaagctccgaggcaaggctggaaggaggaagactcgtcgcatccgcaacgatatggacgagtcggaggctggcagggtgaagcattgcagcaaatgcgatgaacgtgggcacacctacaagcattgtcctaaagacaaggagaaaccaagtgtggcagaggcaggactattaggatcagcagcagatggagctcgccctacggagatggcacgtcaggatacacctcaattgttggacccggcgatagatcaccgacaccagtctcaccttactgcggtgcagggggctcagcttgggacgttccgggcacggacgtgcggtgagctacttatggttcacgactcctttgtcgagaggctgcgtgaggccggcctcctaccgatgtgtcggctggtggaggctgccgccggcgatgcggacccggccagacgatggactgtggaccggtccctcctagcagctttggtcgaccgatggagaccagagacgcacacttttcacttgccgtgcggtgaggtagcccctatcctacaggacgtatcgtacttgttggggctaccactcgcgggagacgatgttgggccagtgaccacgggtgtggactggcaggacgatctgacagcacgtttcgcactagtacagcgcgcaccgcatctcccgctcgagccgttggcacaccaccgcaacaccggacctatgaagaggtggctgcttcagttctccattgagcagctacaggcggaggccgacgagtactcctacagccgctgtttggaggcgtacttgctctggctttttggctgggtgatgttctgtggcggtcacgggcacgcggtcgataagggactcgtgcactacgccaggagcatcgccgacgccgcgcgccgatgggctcacgtccaggttaggcggtcgtatcctgagtttgttatggagttcgaccgccttctgccgactgacgtcgtgtgggagccctacagtgccgcggctacccagccccaggcgccgttgggtctgtccacactctgcaccagggaccaggcgtactggatgactacggttccgatggtctacgacatctgcgttgagcctcacgcacctttccgcgtgatgcggcagttcggcttccgtcagccctttccagtaccgtttccgacgaccgtcccagctgctgttcaccgttactcacgcaagggtcagcagtcagctggcgactggcccgccaagttagcgacttttgttgaggactggttgctcgcaaccgaggaggtcgtggaccacgagggagagccacacactgaggaggcgtaccaggcctacctacgctggtaccagccacgcacccgtactagggtcaccttcgctcccttggagcagcagccccacgttgcgagcactagagacctctacgccaggcaccgcgaccaggacttcgctcgtgctgtcgacgacatcaaccgggtcgtcattgacggttcaacgacgatccaacgtttaggcgcggggattccgacaacgttactcgggcagacgcagctgtacagcggccacccgtaccgactggtccccgtccaactgcgcacgttcctaggccgactccccctccgcacggaggcagccggcacgtcgagtcagggtccaccactggaccatgctgggacctcgtcggaccgcttgctgccttccaccttgctcttcgacatcactgacttcgacttcgcttcaggctcgacagaggatgtcatcggcccctcacagctgggaggcgcaccgctggtgcagacacaggaccaggcgcaggccactccgccgccagacactcgtgctacccgtgctgtgccaccggatcgtttcacctactcccaggaccacgtgcgagcacaggcccggaggaccaagcgtggtcgcggcgtagggcagggccagtag

SEQ ID NO: 81157 - DNA, 1691 bp, Oryza sativa
  unsure (1)..(1691): unsure at all n locations
  Clone ID: PAT_MRT4530_80711C.1
cgggttggactcaagacgatagttaccggataaggcgcagcggtcgggctgaacggggggttcgtgcacacagcccagcttggagcgaacgacaggtatccggtaagcggcagggtcggaacaggagagcgcacgagggagcttccagggggaaacgcctggtatctttatagtccgcctttgagtgagctgataccgctcgccgcagccgaacgaccgagcgcagcgagtcagtgagcgaggaagcggaagagcgcccaatacgcaaaccgcctctccccgcgcgttggccgattcattaatgcagctggcacgacaggtttcccgannnnnnnccgccatgtccgagggagcggcggccgccgcgccgtcgccggcagagatgtacggtgacgaactaggcgacctcgagaacaaggtgccggtgatagggccgtagacgaagggcgtatcgtacggccgggatgatgatggcacacggcgccgtgtgcgtattttgcgctgaggtcccttgctgttaaatgcagtttttgcctgctcagcggcctccccgagggcggtagggtatatttctgtaaatattttcgtcagtataatatttcgtctctctccatttggactccgattccacgccgacgtcgccgcctgatcgtctccggcgccggcgatcccaaccgccgcaaccaccgcctctccctcctcctcctcctccggtaggtgctcgcggccgctcgacggccacgcacgtgctcgtgtctcgctgtcccgtccgccgcctcttctccactcccccacgcttccgctccagatctgcctctccgcccgcccggatctagccaccggttcgccggcccgccgctcgggagctgaaccgtgtggccgagtggcgacctctcctaccgcgtagccatggtaagatccgttcatctgatcagcccggccagggcaaggtgaggccttaccaagtggtactcgccttacacccagaaggagaggactaaggttatccgtgagctcagtgggctcattctaacacgcgggccgaaactctgcaactttgttgagtggaagggttacaaggttgtgtacagaaggtatgcgagcctgtatttctgcatgtgcattgatgctgaggacaatgagctcgaggtccttgaaattatccatcacttcgttgaagtactggaccgatattttggcagcgtatgcgagctggatttgatattcaatttccacaaggcctactacatacttgatgaaattctcatcgctggtgagcttcaagaatctagcaagaaaaatgttgcaagactaattgctgcacaggattcattggtagaggcagctaaagaggaagctagctctataagcaacatcattgcccaggctacaaaataaaattctactccagtctgatgtttgctctcttttgttgtgttatattggtaaatgcaatgtactagtccatttggtctgttcagttttctaagatacgtctttcaaggtgccaggattaagaatgaacatgatgtaactacactgtatccgctattttgaaccgaagtcggattttctaagagaaaatgtgcatgagagttgatcatggagagtgcaaaaaaaaaaaaaaaaaaaaaaaaaaaaaaaaaaaaaaaaaaaaaaaaaaaaaaaaaaaaaaaaaaaaaaaaaataaa

SEQ ID NO: 81158 - DNA, 4176 bp, Oryza sativa
  Clone ID: PAT_MRT4530_80712C.1
atggaccgaagggaaccgcagcatgaggaatgtccacgtctcgtcgcagcatgggtcataaggcggtcggtgcagtccgaggcacaagggtcctggtactacctagatgcgaagaaccccaaagatatgtcgaacaaccaaatattccaagtttaccatggaccagtaaacgtccgttacgggccacctggggtagatctgtcagattttattgtatcagaaaggggaattgatagcccggctgagaggagtgtaccttctataacgggatggttaatgaggggcttgagagttgatccacagacaagtgacataacaatcaatgttatagatccaggtgtgcacacgaacatggatgatagcgagggaccaagtgctgaagtaaacgagacttctgtggaggaggtcaacgcacgagaggacgggggcgtagtagctccagtgggcattcaaccaggtggagtggccgacgagggggagactgtcggtgccattgtggatgaaatggagagggaggattctgacaatgagcgtgtagaggaaggtgattcgtcagatgatgagacagatattaatccagcagaatgggctagtgaggatttttctgggctgatcgtctctgaagaggatagtgtgagatgggagtacaaagaaaatgaggttattcagcgagcgatttatagtagagcagaagatatgaaggaggcggaaagaaaccctgggagctcttacgaagtgaagaaattcccctcaattgaacatcctggcaagagtgtgctgcaaagggcgttcttagctctacatgcatgcaagatggcattcgtgaactgtcgtcctgttctctgcattgatgggacattcttgacaggaaagtatcggggccagatactaacagcaataggggtagatgggaacaatcaggtattgcccttggcatttgcttttgttgagagtgagaataccgacagctggtactggttcctgaaattggttaaaacaaaagttgttggtatgaggccaaatgtatgcctgatacatgataggcacgctggcattctgcgagcgataggagagttgcagtttgggagtatggaacgaggataccccagtgtttgggaagatgtacagagtaggtggtgcatgcgtcatatgggagctaatttcttcaagcaattcaagaacaaggagctcatgaacatgttcaagaggctgtgcaatcagaaccaggagaaaaaattcaatgagctttggaagagattagatgagttgacagccaaatgcagtgatcagcgtgcagcggctccatcgaccgccgttgctgaccctcctcaagctcttggacctctcccaatggatagtccaacattggttagaagaactggattggagattcgaaaactttctcagtggattctgcatgaaccaaaagagaaatgggccaaggcgtatgacacaggtggtgctagatatggaataatgacaacaaatttggcagaaatttacaactgggtgatgcgcggtgtccgtggactgccactagttggcatagtagagttcattttacatgggacatgcaggtattttagggatcggttccaggcagttcttccctctatgccgaacaacagcattttgtttggagctttcatgcagaaaaagctagaggagttgcgtaaaaaggccatgaaacatcgagctctagtgcaaggtacccaacagcacaggtttgagatactatgtcaagataaggcaggcaggggtatctaccgcaagagagtgaagcaggagtgtgttctcaaagccgacggcacatgtcattgctcttgtgcaaagccgaagctgctccacaggccatgcacccatgtcattgctgctgcagcggagtgtggcataccagatgcagtatatgtgtcacagtacttcagtaagcaagcaatatatcatacatggagcggcgagatttatgggttcggcatagctggggagttcacagagactaacgatgaagtactcaatattcgtgacccatcgaaactccgaggcaaggctagaaggaggaggactcatcgcatccgcaacgatatggacgagtcggaggctggcatggtctcgggatgtaacgtcggactaaggcgcctaacgtctttaggtatgctgatgtatgtcggacttcgacacgtaatgggggctcagcttgggacgttccgggcacgcacgtgcggtgagctactcccagttcacgactcttttgtcgagaggctacgtgaggccggcctcctaccaatgtgtcggctggtggaggctgcggccggcgacgcggacccggccagacgatggactgtggacaggtccctcctagcagctttggtcgatcgatggaggccagagacgcacacttttcacttgccgtgcggtgaggtagcccctaccctacaggacgtatcgtacttgttggggctaccgctcgcgggagacgctgttgggccagtgaccacggctgtggactggcaggacgatctggcggcacgtttcacactagtacagcgcgcaccgcacctcccgttcgagccgttggcacaccaccgcaacaccggacctacgaagaggtggctgcttcagttcaccgttgagcagctacaggcggaggccgacgagtactcctacagccgatgtttggaggcgtacttactctggctttttggctgggtgatgttctgtggcggtcacgggcacgcggtcgacaagggactcgtgcactacgccaggagcatcgccgacgccgcggtaggtgaggtgcctcagtggagctggggttccgcgttgttggcggctctgtaccgtgcactttgtgagtcttgcacgaagacggatcccagcgcgacctttggtgggtgccctctctttctttctatctgggcagctgagaagattgcgatcggccgccctgaggtggaccagcacgcgtacgaggagtcactgtacgaggagcgaccagaggtcgactaccctacgatgggtactctgtggtgccgtcgtcagcgccgatgggctcacgtccaggttaggcggtcgtatcctgagtttgttatggagttcgaccgccttctgccgactgacgtcgtgtgggagccctacagtgccacagctacccaggctcgtgcgccgttgggtctgtccacactctgcaccagggaccaggcgtactggatgactacggttccgatggtcttcgacatctgcgttgagcctcatgcccctttccgcgtgatgcggcagttcggcttccgtactcgcgcaagggtcagcagtcagctggcgacttttgttgaggactggttgctcgcaaccgaggaggtcgtggaccacgagggagagccacacactgaggagtcgtaccaggcctacctacgctggtaccagccacgtacccgtactagggtcaccttcgctcccttggagcagcagccccacgttgcgagcactagagacctctatgccaggcaccgcaaccaggacttcgctcgtgctgtcgacgacatcaaccgggtcgtcgttgacggttcaacgacgatccaacgtttaggcgcggggattccgacgacgttgctcgggcagacgcagctgtacagcggccacccgtaccgactggtccccgtccagctgcgcacgttcctaggccgactccccctccgcacggagggtttcgtgcaccgttcagcaccccgccttcctcggctaggccttctgttgtgccccccacaggccgcccacttctcccaggctgcagggtcagcgtctcaggcagctgtgtcgacctcgcactcagcgcagttctggcagtacaccgggacttcgtcacaggcagctggcacgtcgagtcagggtccaccactggaccatgctgggtcctcgtcggaccacttgttgccttccaccttcctcttcgacatcactgacttcgacttcgcttcaggctcgacagaggacgtcatcggcccctcacagctgggaggcgcaccgccggtgcagacgcaggaccaggcgcaggccactcctccgcgggacactcgtgctacccgtgctgtgccaccagatcgtttcacctactcccaggaccacgtgcgagcacaggcccggaggaccaagcgtggtcgcggcgcggggcagggccagtag

SEQ ID NO: 81159 - DNA, 2278 bp, Oryza sativa
  Clone ID: PAT_MRT4530_80713C.1
cacgagggagaaatctcccgtctcgtcgatgaggaacgatggtggctcatggataaagagcgatagtgatgccttgccaaggttcaactttaaggtgtctcagctgaaatttttttcttttcttctgtgcagttttgtggatttatcttccaacatcaatagaatggagcaagaagagaatcattcagctgatcacttgtctgctcaacctggtaatggcaacgaattggaagaatcatctgtaaaggaaaggtgttttgagcagagagaagcccttgttggggagcctcgctgtgttatttgtggccgatatggtgaatacatatgtgatcagactgacgatgacatatgtagtgttgaatgcaagacaattcttctttccaaactttctgctgaaacaaggccagtagtaaaagcagcaaagcgtgtaaatcttcctgttggcgacgagagcttctgtattagggacgaaaattttcctaaaataccaagtatgcacgatggtcagattgcttcactgagaagcaaacttgatatttgtgtcaagggtgaggatgttccagatccaatcatgtgtttttcttcctctggtctccctgagaagcttgtgctcaatcttgaggctgcgggatatgtaatgcctactccagtgcaaatgcaagtcatcccttcatcaatatgtaatagaagcttacttgtctctgctgatactggttcagggaaaacagcttcttttcttgttcccataattgcacattgttcacacgtgcgatcagagagatgcacagacaagcaagggccattagctatagtccttgctccaactagagagctatgtctgcaggtggaagaacaagcaaaagtgcttggaaagggtttaccttttaagactgctctagttgttggtggagatcccttggctcagcaaatctacaggattgaaaatggcatcgagttgattgttggcacccctgggaggctaattgatctactcatgaagcacaatgttgatcttaacaaagttgatgtattcgttttggatgaggtggactgcttgctagagaggggattcagagatcaggtcatgcaaatcttccaagcactttcgcatccccaggttatgatgttttcggcaactgtaaattcagaagttgagaagatgtcaaactcactggctaagaatgcgatacatatttcttgtggaaatccaagcagaccaaacaaatcagttaaacaagtggtcatttgggtggagtctaagcagaagaagcagaaaatttttgagataatgacaagtaaacagcactttaaacctcccgctgttgtttttgtgagttctagaattggcgctgatctgttgtccgaagcaattactgttgctactggattgaaggtggtttctattcatggtgataagacaatgaatgagagaagagaaagcttgagaaggtttctcacaggagaagtgtctgttgttgtttgtactggggtattgggacgtggaatggatctcctgaaagttcgtcaggtgatattatttgacatgccaaattccattgatgaatatgttcaccaagttggaagagcatctcgaatgggtgtggagggtatggctattgtctttgttaatgaggaggacaggaatcttttcagagagcttgttcagattctgaagactgcaggtgctccaattcccagggaacttgcaaattcaaaatacacaaccggtataccccttggtggtgctagacaaatgtccagtagggttgaaaatgaagtcttaatatttaaggtcctggagcaacaatgggaatttaacttgctggatagggatgagcgcaggctgatccatgatattttagttcatttagttgaactagagtgggtcaaggaggacttgtgggtcggctcgtgcctatcgctaaggtttgagtctggcaaggtggcactagcaacagatctagtgaagctgacactggtggtattgtcactcaactcgcctggtttgccctggcaggaaaggctttgcatagctttctctttgctcctttacaccaagttcatgatttggggagcctggtctgatgggttgtggtcttgtggacttgggaactgctgtcaggtagatccattatataactattatcactgctacagagcaagtaacttaacactgattgaagcaaaggatggagttaatgttggggaccagaagtccataacagctattaggcgagacaaatttattgcatcctttcgcaatatggaagttcattga

SEQ ID NO: 81160 - DNA, 1104 bp, Oryza sativa
  Clone ID: PAT_MRT4530_80714C.1
atggcggccgtgctgacggacgatttcctgctccgatccatcctgaagtgtctgtgtccgagggatgtggtccgcgcggcccttgccaacaagagctggcggcgcgcggcggccctcgccgtcccccgcacaccgccgctcgtcggctacctcctgcacccggagaaaatccggtcggcccagatcccccccgtcttcgtccccagcgacgcctcgttcccgcgcctctccctccccttggctcccgacgacctctccgggatgcagataaaaaagcttacgccgatggatgacgagtcccaaaggcttgttgattggctagaaaaaggtgtttatgatgctctgaaaaagaagttcctcaaaactatcatcttctctatctatgatgagaagggccctctgttggaggagtattgccaacttcatggttcggacaacacgacatgtacagcagtgaaacagcctctggactatgaacctcctttttttgagagttatgatgatatgagaaaacgttgtccgctcccactacatactactttatcagattactcacaagatttgatcagtttacatgatgtaaaatcagtgctctccaacaatccctttcattccaacaaggtttttgcaatggacccaaaaagcaaaatccaacaagggcaccttttttgcattactaagaaagatgtccacttctattttgattctggtgctagccaccacatgtgtgatgatgataaactcttcaaaaatctccatgaggttcctactgaacatcaggatactgtttatgatgctagtggcgacccaaaaaatttgtgggtagttgattctctatgctgcaatcacatgactggtataaagggacttctatctgatacaagacacgaggcttgctcacaaatgcaagattcagtggagagggactcaagaagtgttggtctagctcatcaggacgagaatgcactgtattacgtggattattttcactatgtcagcgacccatctttgaagcatacgaggaatgatggagaatgcatacagaagttgaagcgtccgcggcaagatggatcctctccatctagtaggaaaaggactgcgtaa

SEQ ID NO: 81161 - DNA, 247 bp, Oryza sativa
  Clone ID: PAT_MRT4530_80715C.1
gggaaaaggaagcttttccccgacccttttctaatttttttcccagattttgggtccagaatttacccccggggtccagccctaattttttcccccccaaagaaaaggccaaaggaagggggggggggaaaaaaaaggaggaccgttttcccaacagagggcccccttttaaagacaccctttcccattttttaaaacttgggcccttttaacggggtgccatggggggaacaccctttagaaaaac

SEQ ID NO: 81162 - DNA, 459 bp, Oryza sativa
  Clone ID: PAT_MRT4530_80716C.1
atgtggagatggtatgtggagaatgcattgcagcacgggtggcctctagctatagttccgtttgttcacccgaaggatccaagtgtgaagatgaacatggatgatggcgagggaccaagtgctgaagtgaatgagacttccgtggaagaggtcaacgcaccagaggaccaggcgtactggatgactacggttccgatggtcttcgacatctgcattaagcctcacgccccttaccgcgtgatgcagcggttcagcttccgtcagttctttccagtaccgtttccgacgagcgtcccagctgccgttcaccggtactcgcgcaagggtcagcagtcaattggcgattggcctgccaagttggggccttttgttgaggactggttgctcgcaaccgaggaggtcgtggaccacgagggggagccacacaccgaggaggcgtaccaggcctacctatgctag

SEQ ID NO: 81163 - DNA, 2212 bp, Oryza sativa
  unsure (1)..(2212): unsure at all n locations
  Clone ID: PAT_MRT4530_80717C.1
ggcaaatgtgaacaaagtgacatgcataacttgaggtgctagagatgaacatccttttgcgaggtagaactgaactttcttgatctttcattccatactcaggattataatacaacctagcccagcttcgactggtatttcaatatgcaatcaaaaccaactaactggttgatcagcaaagtaaagccttgttgacttctttttcacccctgtgggtgcttcgtgttcagtatggcctaagggcgcgcgcctggatttcgtcttcacccacgagacccttctgtatttccagtgacctatgtggctatttcaaagtgaaatgatggatgccgtgctgatggactatttccagtgacccttcagcctgttctgtatttgtacgagtgatgtggtcagtgcggcctttgtcaaaatgagcaggcgtctcgtgccgaccctagtcgtcccccgcaaaaagcccctcgtccactacctactgcatccatagtaattcatatcggcctcgttcccaacattcttcatccccagcgacgtaccactcccgagtctctcactccccttcgatcacgacgatgtctccgggtatgggataaaaaagcaaacgccgatggataacgagtcccaaaggctagttgattggctagaaaaaggtttttatgatactctgaaaaagaagttcctttaaaatagcatcttctctatctatgatgagaagggctctctgttggaggagtattgcctttgattcaaatatttttgcgaaattacaatcgccttacggctattgggatccacttaaattttattcataatgagaaaattgttccatccaaaggtgtgactggaaactatgacaatgttcttttttccctattgaccgcctctggactatgaacctcctttttttgagagttatgatgatatgagaaaacgttgtccgctcccactacatactactttatcagattactcacaagatttgatcagtttacatgatgtaaaatcagtgctctccaacaatccctttcattccaacaaggtttttgcaatggacccaaaaagcaaaatccaacaagggcaccttttttgcattactaagaaagatgtccacttctattttgattctggtgctagccaccacatgtgtgatgatgataaactcttcaaaaatctccatgaggttcctactgaacatcaggatactgtttatgatgctagtggcgacccagtgtgcctgcacatgtccggtgaagtgatatatgatcaaatcaaattgagtccagtattctaccactctactctcaaatttaaagttatatctcttggtgaactggatgattctaacaccctcatgtatgttggagataaaaggattaaaatctttgatgtaaataaaggtgaaatgatcggcgagggatatctccacgaaaagagaaatgaatatatagttcgaagcatcatatgcagaaaagaagaacaacaagctataaccagatcgatgttgtcctcaacggcaattgatgagaaaaatttgtgggtagttgattctctatgctgcaatcacatgactggtataaagggacttctatctgatacaagacacgaggtacagtcatttgttacccccagaggtgcatttttaagctcaaaaattggaaatgtgaagactagtacagtaacactgtttaatgtgttgtactgtaagggactgagacagaatctcatatccgaaggtcaattagaccgtgacggctattcatgtacaaggcttgctcacaaatgcaagattcagtggagagggactcaagaagttgttggtctagctcatcaggacgagaatgcactgtattacgtggattattttcactatgtcagcgacccatctttgaagcatacgaggaatgatggagaatgcatacagaagttgaagcgtccgcggcaagatggatcctctccatctagtaggaaaaggactgcgtaaactggatagatgtgttcattttgtcttttgtaaacatgagaagaataccacccaacatacgaagatttgatgtgctctgttgtttcaacatttttaaacctcgttcttacagatgatggttgcatgctagtaatacccaggaaaatgctttttccatttgatttacattggctcgcgttagtatagccctcaaaaaatctaaggacanctttctttaaaaaaaaaaaaaaa

SEQ ID NO: 81164 - DNA, 4902 bp, Oryza sativa
  Clone ID: PAT_MRT4530_80718C.1
atgggccgccaggcccgacacagtccaggcacgactggacttgggccgagaaataatctatcgaccaaaaaaattgcagaaatagcccctgccgcccacctctggggcggcaagctgacgtggcaaacgggggaggaacgggcggtgacggagggagggttttttgcaggaaaacccttgccgccctctggtggggcggcaaggggcccgaatgcaaaaaagccagtcggggccggctattttgcaggcggccccttgccgccctctggccgggcggcaggcctcgctgcctatagaaggcctgctgcccagcccccagccctcattcttctctcctcaattccagtgaaaaaaaaagaagagagggaaggagaagagaagaaggggcgaaaccctgccggattcagacgccgatttcagggttttagttgtactaatctagaagtgcgtattgtagatatcgatatgtcgaacaaacaaatattccaagtttaccatggaccaggaaacgtccgttacgggccaactggggtagatctgtcagattttattgtatcagaaagggaaattgatagaccggctgagaggagtgtaccttctataaaaggatggttaatgaggggcttgagagttgatccacagacaagtgacataacaatcaatgttatagatccaggtgtgcagacgaacatggatgatggcgagggaccaagtgctgaagtaaacgagacttctgtggaggaggtcaacgcacgagaggacgggggcgtagtagctccagtgggcattcaaccaggtggagtggccgacgagggggagactgtcggtgccattgtggatgaaatggagagggaggattctgacaacgagcgtgtagaggaaggtgattcgtcagatgatgagacggatattaatccagcagaatgggctagtgaggatttttctgggctgatcgtctctgaagaggatagtgtgagatgggagtacaaagaaaataaggttattcagggagcgatttatagtagagcagaagatatgaaggaggcggtaaaacattttgcagtgtcacttcatagagagttttgggttgccaagtcgaaccggtcgcaatatgaagttcgtgttcagaaataccacaggaacattacatgtgcatttgttgcatctgagatgtatgcgcatgtcatcgataatctcacatatgaaccaaggtcaataatccgacacattgaagagacatacaagtatactattagctatgccaaggcctggagggccaaacagaaaataatagagatgagatttggaacttacgaagcctcgtatgacaatttgccacacctgcttggtgttatcgaggaaagaaaccctgggagctcttacgaagtgaagaaattcccctcaattgaacatcctagcaagagtgtgctgcaaagggcgttcttagctctacatgcatgcaagatggcattcgtgaactgtcgtcctgttctctgcattgatgggacattcttgataggaaagtatcggggccagatactaacaacaataggggtagatgggaacaatcaggtattgcccttggcatttgcttttgttgagagtgagaataccgacagctggtactggttcctgaaattggttaaaacaaaagttgttggtatgaggccaaatgtatgcctgatacatgataggcacgctggcattctgcgagcgataggagagttgcagtttgggagtatggaacgaggataccccggtgtttgggaagatgtacagagtaggtggtgcatgcgtcatatgggagctaatttcttcaagcaattcaagaacaaggagctcatgaacatgttcaagaggctgtgcaatcagaaccaggagaaaaaattcaatgagctttggaagagattagatgagttgacagccaaatgcagtgatcagcgtgcagcggctccatcgaccgccgttgctgaccctcctcaagctcttggacctctcccaacggatagtccaacattggttagaagaactggattggagattcagaaattttctcagtggattctgcatgaaccaaaagagaaatgggccaaggcgtatgacacaggtggtgctagatatggaataatgacaacaaatttggcagaagtttacaactgggtgatgcgcggtgtccgtggactgccactagttggcatagtggagttcattttacatgggacatgcaggtattttagggatcggttccaggcagttcttccctctatgccgaacaacagcattttgtttggagctttcatgcagaaaaagctagaggagttgcgtaaaaaggccatgaaacatcgagctctagtgcaaggtacccaacagcacaggtttgagatactatgtcaagataagtcaggcaggggtatctaccgcaagagagtgaagcaggagtgtgttctcaaagccgacggcacatgtcattgctcttgtgcaaagccgaagctgctccacaggccatgcacccatgtcattgctgccgcagtggagtgtggcatatcagatgcagtatatgtgtcacagtacttcagtaagcaagcaatatatcatacatggagcggcgagatttatgggttcggcatagctggggagttcacagagactaacgatgaagtactcaatattcctgacccatcgaagctccgaggcaaggctggaaggaggaggactcgtcgcatccgcaacgatatggacgagtcggaggctggcagggtgaagcgttgcagcaaatgcgatgaacatgggcacacctacaagcattgtcctaaagacaaggagaaaccaagtgcggcggaggcaggactatcaggatcagcagcagatggagctcgacctacggagatggcacgtcaggatacacctcagttgttggacccggcgatagatcaccgacaccggtctcaccttactgcggtgcagggggctcagcttgggacgttccgggcacggacgtgcggtgagctactcacggtttacgactcctttgtcgagaggctacgtgaggccggcctcctaccgatgtgtcggctggtggaggctgcggccggcgacgtggacccggccagacgatggactgtggacaggtccctcctagcagctttggtcgatcgatggaggccagagacgcacacttttcacttgccgtacggtgaggtagcccctaccctacaggacgtatcgtacttgttggggctaccgctcgcgggagacgctgttgggccagtaaccacggctgtggactggcaggacgatctgacggcacgtttcgcactagtacagcgcgcaccgcacctcccgctcgagccgttggcacaccaccgcaacaccggacctacgaagaggtggctgcttcagttcaccgttgagcagctacaggcggaggctgacgagtactcctacagccgatgtttggaggcgtacttgctctggctttttggctgggtgatgttctgtggcggtcacgggcacgcggtcgacaagggactcgtgcactacgccaggagcatcgccgacgccgcggtaggcgaggtgcctcagtggagctggggttccgcgttgttggcggctctgtaccgtgcactttgtgagtcttgcacgaagaaggatcccagcgcgacctttggtgggtgccctctctttctttctatctgggcagctgagaggattgcgatcggccgccctgaggtggaccagcacgcgtacgaggagtcactgtacgaggagcgaccagaggtcgactaccctacgatgggtactctgtggtgccgtcgtcaatgccgatgggctcacgtccaggttaggcggtcgtatcctgagtttgttatggagttcgaccgccttctgccgactgacgtcgtgtgggagccctacagtgccacggctacccaggctcgtgcgccgttgggtctgtccacactctgcaccagggaccaggcgtactggatgactacggttccgatggtcttcgacatctgcgttgagcctcacgcccctttccgcgtgatgcggtactcgcgcaagagtcagcagttagctggcgactggcccgccaagttggcgacttttgttgaggactggttgctcgcaaccgaggaggtcgtggaccacgagggagagccacacactgaggagtcgtaccaggcctacctacgctggtaccagccacgcacccgtactagggtcgacgacatcaaccgggtcgtcgttgatggttcaacgacgatccaacgtttaggcgcggggattccgacgacgttgctcgggcagacgcagctgtacagcggccacccgtaccgactggtccccgtccagctgcgcacgttcctaggccgactccccctccgcacggaggtagggtttcgtgcaccgttcagcaccccaccttcctcggctaggccttctgttgtgccccccacaggtttcgcccagttcgctataacgcaggccgcccacttctcccaggctgcagggtcagcatctcaggcagctgtgtcgacctcgcactcagcgcagttctggcagtacaccgggacttcgtcacaggcagccggcacgtcgagtcagggtccaccactggaccatgctgggacctcgtcggactgcttgttgccttccaccttcctcttcgacatcactgacttcgacttcgcttcaggctcgacagaggacgtcatcggcccctcacagctgggaggcgcactgccggtgcagacgcaggaccaggcgcaggccactcctccgcgggacactcgtgctacccgtactgtgccaccggatcttttcacctactcccaggaccacgcgcgagcacaggcccggaggaccaagcgtggtcgcggcgcggggcggggccagtag

SEQ ID NO: 81165 - DNA, 3936 bp, Oryza sativa
  Clone ID: PAT_MRT4530_80719C.1
atgtcgaacaaacaaatattccaagtttaccatggaccaggaaacgtccgttacgggccaactggggtagatctgtcagattttattgtatcagaaaggggaattgatagaccggctgagaggagtgtaccttatataaaaggatggttaatgaggggcttgagagttgatccacagacaagtgacataacaatcaatgttatagtaagtcgggcaactgagggtttttattgggaactaatgccagttcaaaactctcgagtgtggagatggtatttggaaaatgcattgcaacgcgggtggcctctagctttggttccgtttgttcacccgaaggatccaggtgtgcagatgaacatggatgatggcgagggaccaagtgctgaagtaaacgagacttctgtggaggaggtcaacgcacaagaggacgggggtgtagtagctccagtgggcattcaaccaggtggagtggtcgacgagggggagactgtcggtgccattgtggatgaaatggagaaggaggattctgacaacgagcgtgtagaggaaggtgattcgtcagatgatgagacggatattaatccagcagaatgggctagtgaggatttttctgagctgatcgtctctgaagaggatatgtcacttcatagagagttttgggttgccaagtcgaaccggtcgcaatatgaagttcggtgtgttaaggaaaaagatggttgtccctggagagtgcacgcgtataaggggaaatggaaggattattggacagtgtcagtcgttaccaagcatacatgttttctacctggtgttcagaaataccacaggaacattacttgtgcatttgttgcatctgagatgtatgcgcatgtcatcgataatctcacatatgaaccaaggtcaataatccgacacatcgaagagacatacaagtatactattagctatgccaaggcctggagggccaaacagaaaataatagagatgagatttggaacttacgaagcctcgtatgacaatttgccacacctgcttggtgttatcgaggaaagaaaccctgggagctcttacgaagtgaagaaattcccctcaattgaacatcctagcaagagtgtgctgcaaagggcattcttagctctacatgcatgcaagatggcattcgtgaactgtcgtcctgttctctgcattgatgggacattcttgacaggaaagtatcggggccagatactaacagcaatagggatagatgggaacaatcaggtattgcccttggcatttgcttttgttgagagtgagaataccgacagctggtactggttcctgaaattggttaaaacaaaagttgttggtatgaggccaaatgtgtgcctgatacatgataggcacgctggcattctgcgagcgatagaagagttgcagtttgggagtatggaacgaggataccccggtgtttgggaagatctacagagtaggtggtgcatgcgtcatatgggagctaatttcttcaagcaattcaagaacaaggagctcatgaacatgttcaagaggctgtgcaatcagaaccaggagaaaaaaatcaatgagctttggaagagattagatgagttgacaaccaaatgtagtgatcagcgtgcagcggctccatcgaccgccgttgctgaccctcctcaagctcttggacctctcccaacggatagtccaacattggttagaagaactggattggagattcggaaattttctcagtggattctgcatgaaccaaaagagaaatgggccaaggcgtatgacacaggtggtgctagatatggaataatgacaacaaatttggtagaagtttacaattgggtgatgcgcggtgtccgtggactgccactagttggcatagtggagttcattttacatgggacatgcaggccatgcacccatgtcattgctgccgcagcggagtgtggcataccagatgcagtatatgtgtcacagtacttcagtaagcaagcaatatatcatacatggagcggcgagatttatgggttcggcatagctggggagttcacagagactaacgatgaagtactcaatattcctgacccatcgaagctccgaggcaaggctggaaggaggaggactcgtcgcatccgcaacgatatggacgagtcggaggctggcatggtgaagcgttgcagcaaatgcgatgaacatgggcacacctacaagcattgtcctaaagacaaggagaaaccaagtggggcggaggcaggactatcaggatcagcagcagatggagctcgccctacgggtgaaggcactacctccactcgaccacgtcctaggcgtcgtcgtgccacgtctggctacgtggttgagcagctacaggcggaggccgacgagtactcctacagccgatgtttggaggcgtacttgctctggctttttggctgggtgatgttctgtggcggtcacgggcacgcggtcgacaagggactcgtgcactacgccaggagcatcgccgacgccgcggtaggcgaggtgcctcagtggagctggggttccgcgttgttggcggctctgtaccgtgcactttgtgagtcttgcacgaagacggatcccagcgcgaccttcggtgggtaccctctctttctttctatctgggcagctgagaggattgcgatcggccgccctgaggtggaccagcacgcgtacgaggagtcactgtacgaggagcgaccagaggtcgactaccctatgatgggtactctgtggtgccgtcgtcagcgccgatgggctcacgtccaggttaggcggtcgtatcctgagtttgttatggagttcgaccgccttctgccgactgacgtcttcggcttccgtcagccctttccagtaccgtttccgaccaccgtcccagctgctgttcaccggtacttgcgcaagggtcagcagtcagctggcgactggcccgccaagttggcgacttttgttgaggactggctgctcgcaaccgaggaggtcgtggaccacgagggagagccacacactgaggagtcgtaccaggcctacctacgctggtaccagccacgcacccgtactagggtcaccttcgctcccttggagaagcagccccacgttgcgagcactagagacctctatgccaggcaccgcgaccaggacttcgctcgtgctgtcgacgacatcaaccgggtcgtcgttgacggttcaacgacgatccaacatttaggcgcggggattccggtacccgtagaggagcacctgacgacgtacacgcggatggtggagtcgatgcgctcgattctccgagtgctcacctgtcctgcagacgacgttgctcgggcagacacagctgtacagcggccacccgtaccgactggtccccatccagctgcgcacgttcctaggccgactccccctccgtacggagggtttcgtgcaccgttcagcaccccgccttcctcggctaggccttctgttgtgccccccacaggtttcgcccagttcgctatgacacaggccgcccacttctcccaggctgcagggtcagcgtctcaggcagctgtgtcgacctcgtactcagcgcagttctggcagtacaccgggacttcgtcacaggtagccggcacgtcgagtcagggtccaccactggaccatgctgggacctcgtcggaccgcttgctgccttccaccttgctcttcgacatcactgacttcgacttcgcttcaggctcgacagaggacgtcatcggcccctcacagctgggaggcgcaccgccggtgcagacgcaggaccaggcgcaggccactcctccgcgggacactcgtgctacccgtgctgtgccaccggatcgtttcacctactcccaggaccacatgcgagcacaggcccggaggaccaagcgtggtcgcggcgcggggcagggccagtag

SEQ ID NO: 81166 - DNA, 1107 bp, Oryza sativa
  Clone ID: PAT_MRT4530_8071C.1
tcagcggcttaccgcagagctggaggttgtcggcgaaggactccggcgagaagcgtgcgagcaaggtgttggagcacccgtgagcttggcgacgtcaggcgggacagagccaggaagggaaaagaggtcacctgggacatcaccgaagaggtggttgcatcgaagggagagcacccggaggtagaatccgatgaggctgacgccaggtaggcggagaccaaggacagtggcgttggcagcgtcgcaggcgaagcggacccagtcgtaggccggcgtggaggagttccaagcgatcggccgctggtgcctgtgcccatgcgcgctccacacgacaaagctgtggaggccgctagctgaggacgacgatgatgcgcggggcttggctgccgtcgatgggttgtcgcgacagtcggggatggtgctgtcgtcggagtggatagacgcggagcaaggacacggccactggcgacaagctctgacgtggcgtggaaggtggaggatgcggccatcaacgactagctccagcgtggggcgtggatggcggaggacgcggccgctggcgacaagctccgacgtggcgtggacggtggaggatgtgaccgttgtcgatgagctccggcgtggggtgtggatgacggaggactcggccaccgccgccgagctccgatgtggcgtggacggtggaggatgcagccaccggtgatgagctccggcgtgagacgtggacggtgggaccaccggcaacaataccttggtgtccggctcctgataccttgcaagtatcacctgttggcgttgggcaccgtccgctatacctcctcctgacctcctgcctcctcctgcatgggcggccgccacctcctgccgcgggcggccgccaccgccgcctcctcctgcgcggacggccgccaccacctcccggtacgggccgccaaccgcgcccgggtccccgccgccgcgcttcgggggcgagctcctcgtcggcacggttaccttgcttaccgccgaggtgcggtaacctggtcctgacggtttgggaaaccggtacatgtaccattcaagccgtggagaaaccacgccccggtcggggcagccagccatcgccat

SEQ ID NO: 81167 - DNA, 801 bp, Oryza sativa
  Clone ID: PAT_MRT4530_80720C.1
gcacgaggcccgtctccgtcacccgaaccctctcaacccatggcactctccgccgctcgccggctctcctccgccgccggcggcgacgccgcgcggcctgggacgctctcttccctcttcgcgcctcgaagctctccgaagcctcgcgccccgcggccggagcccggggatgggccaccgcaggagcggaggaagccgagggcgaggccgaggccgaggtcgaggcagccgtggggggaggaggcggcggcgctgctccggaggttctacgacggcgggtacctcccggggcctgacttgtcggtggcgccgcacgtcttgtcccccgacgtcgtcaagggcgcggccgagcggttcggtcatgatcaccaggtcgtcgccaaatggttatctggaagtgacttgaagaaggttgcgttgtttggttgtccatctgttgagcgaagaacagtttttgcatcaaaaagactacgagctttctttaaaatccaggaagctaaaatatgcggctcttgtaagatgagaaattcatgccagtttgttaaccaggaagtatctaggcatgataaagtgatcctgtcagatactatgagaattcttactttattcgtcctggatacatgtcctcagcaactcaaggttttgttggccatattatattcgaagcactatggttcatgtgcccctgaagctccaattggcatggatccccttatcctatcagcgcatgctaacttgggagaggaacagtttggcttcagactaactggactgcttctctgcatggcacctctcttgtag

SEQ ID NO: 81168 - DNA, 3372 bp, Oryza sativa
  Clone ID: PAT_MRT4530_80721C.1
atgtcaaacaaacaaatattccaagtttaccatggaccaggaaacatccgttacgggccaattggggtagatctgtcagattgtattgtatcagaaaggggaattgatagaccggctaagaggagtgtaccttctataaaaggatggttaatgaggggcttgagagttgatccacagacaagtgacataacaatcaatgttatagatccaggtgtgcagatgaacatggatgatggcgagggaccaagtgctgaagtaaatgagacttctgtggaggaggtcaacacacgagaggacgggggcgtagtagctccagtgggcattcaaccaggtggagtggccgacgaggggaagactgtcggtgccattgtggatgaaatggagagggaggattctgacaacgagcgtgtagaggaaggtgattcgtcagatgatgagacggatattaatccagcagaatgggctagtgaggatttttctaggctggtcgtctctaaagaggatagtgtgagatgggagtacaaagaaaatgaggaaagaaaccctgggagctcttacgaagtgaagaaattcccctcaattgaatatcctggcaagagtgtgctacaaagggcgttcttagctctacaagcatgcaagatggcattcgtgaactgtcgtcctgttctctgcattgatgggacattcttgacaggaaagtatcggggccagatactaacagcaataggggtagatgggaacaatcaggtattgcccttggcatttgcttttgttgagagtgagaataccgacagctggtactggttcctgaaattggttaaaacaaaagttgttggtatgaggccaaatgtgtgcctgatacatgataggcacgctggcattctgcgagcgatagaagagttgcagtttgggagtatggaacgaggataccctggtgtttgggaagatgtacagagtaggtggtgcatgcgtcatatgggagctaatttcttcaagcaattcaagaacaaggagctcatgaacatgttcaagaggctatgcaatcagaaccaggagaaaaaattcaatgagctttggaagagattagatgaattgacagccaaatgcagtgatcagcgtgcagcggctccatcgaccgccgttgctgaccctcctcaagctcttggacctctcccaacggatagtccaacattggccaaggcgtatgacacaagtggtgctagatatggaataatgacaacaaatttggcagaagtttacaactgggtgatgcgtggtgtccgtggactgccactagttggcatagtggagttcattttacatgggacatgcaggtattttagggatcggttccaggcagttcttccctctatgccgaacaacagcattttgtttggaactttcatgcagaaaaagctagaggagttgcgtaaaaaggccatgaaacatcgagctctagtgcaagataaggcaggcaggggtatctaccgcaagagagtgaagcaggagtgtgttctcaaagccgacggcacatgtcattgctcttgtgcaaagccgaagctgctccacaggccatgcacccatgtcattgctgccgcagcggagtgtggcataccagatacagtatatgtgtcacagtacttcagtaagcaagcaatatatcatacatggagcggcgagatttatgggttcggcatagctggggagttcacagagactaacgatgaagtactcaatattcctgacccatcgaagctccgaggcaaggctggaaggaggaggactcgttgcatccgcaacgatatggacgagtcggaggctggcagggtgaagcgttgcagcaaatgcgatgaacgtgggcacacctacaagcattgtcctaaagacaaggagaaaccaagtgcggcggagggggctcagcttgggatgttccgggcacggacgtgcggtgagctacttacggttcacgactcctttgtcgagaggctgtgtgaggtcggcctcctaccgatgtgtcggctggtggaggctgccgccggcgacgcggacccggccagacgatggactgtggaccggtccctcctagcagctttggtcgaccgatggaggccagagacgcacacttttcacttgccgtgctcacttgccgtcgagcagctacaggcggaggccgacgagtactcctacagccactgtttggaggcgtacttgctctggctttttggctgggtgatgttctgtggcggtcacgggcacgcggtcgacaagggactcgtgcactacgccaagagcatcgccgacgccgcggtaggcgaggtgcctcagtggagctggggttccgcgttgttggcggctctgtaccgtggcctttgtgaggcttgcacgaagacggatcccagcacgacctttggtgggtgccctctctttctttctatctgggcagctgagaggattgcgagcggccgccctgaggtggaccagcacgcatacgaggagtcactgtacgcggagcgaccagaggtcgactaccctacgatgggtactctgtggtgccgtcgtcagttcggcttccgtcagccctttccagtaccgtttccgacgaccgtcccagctgctgttcaccggtactcgcgcaagggtcagcagtcagctggcgactggcccgccaagttggcgactttttttgagtactggttgctcgcaaccgaggaggtcatggaccacgagggagagccacacactgaggaggcataccaggcctacctacgctggtaccagccacgcacccatactagggtcaccttcgctcccttggagcagcagccccacgttgcgagcactagagacctctacgccaggcaccgcgaccaggacattgctcgtgctatgagtaccctgcatcgcaccattcctttatgttttcatgtcgacgacatcaaccgggtcgtcgttgacggttcaacgacaatccaacgtttaggcgcggggattccggtacccgtagaggagcacttgacgacgtacacgcggatggtggagtcgatgcgctcgattctccgagtgcgcacgtcgagtcagggtccaccactggaccatgctgggacctcgtcggaccgcttggtgccatccaccttgctcttcgacatcactgacttcgacttcgcttcaggctcaacagatgacgtcatcggcccctcacagctgggaggcgcaccgccggtgcagacgcaggaccaggcgcaggccactcctccgccagacactcgtgctacccgtgctgtgccaccggatcgtttcatctactcccaggaccacgtgcgagcacaggcccggaggaccaagcgtggtcgcggcgcggggcagggccagtag

SEQ ID NO: 81169 - DNA, 4728 bp, Oryza sativa
  Clone ID: PAT_MRT4530_80722C.1
atggagctccggtggatttcggcctctgggaagtggaggccggtcttcttctccttcttgcgaacccaacggcggcaacggcgaccgaatacgacgatggacggcgacggacggagcggctggagatcaaaacacagtggcaacccactggttcacggcgacgggcaacctccggtggaactcggcacaaaagaaccggcggccggggtagagctcgactttgcgaagccgatggtggtggcggcgcgggaggacgtcgaggcggcgaatatgtcgaacaaacaaatattccaagtttaccatggaccaggaaacgtccgttacgggccaactggggtagatctgtcagattttattgtatcagaaaggggaattgagagaccggctgagaggagtgtaccttctataaaaggatggttaatgaggggcttgagagttgatccacagacaagtgacataacaatcaatgttatagtaagtcgggcaactgagggtttttattgggaactaatgccagttcaaaactctcgagtgtggagatggtatttggaaaatgcattgcaacgcgggtggcctctagctttggttccgtttgttcacccgaaggatccaggtgtgcagacgaacatggatgatggcgagggaccaagtgctgaagtaaacgagacttctgtggaggaggtcaacgcacgagaggacgggggcgtagtagctccagtgggcattcaaccaggtggagtggctgacgagggggagactgtcggtgccattgtggatgaaatggagagggaggattctgacaacgagcgtgtagaggaaggtgattcgtcagatgatgagacggatattaatccagcagaatgggctagtgaggatttttctgggctgatcgtctctgaagaggatagtgtgagatgggagtacaaagaaaatgaggttattcagggagcgatttatagtagagcagaagatatgaaggaggcggtaaaacattttgcagtgtcacttcatagagagttttgggttgccaagtcgaaccggtcgcaatatgaagttcggtgtgttaaggaaaaagatggttgtccctggagagtgcacgcatataaggggaaatggaaggattattggacagtgtcagttgttaccaagcatacatgttttctacctggtgttcagaaataccataggaacattacatgtgcatttgttgcatctaagatgtatgcgcatgtcatcgataatctcacatatgaaccaaggtcaataatccgacacattgaagagacatacaagtatactattagctatgccaaggcctggagggccaaacagaaaataatagagatgagatttggaacttacgaagcctcgtatgacaatttgccacgcctgcttggtgttatcgaggaaagaaaccctgggagctcttacgaagtgaagaaattcccctcaattgaacatcctggcaagagtgtgctgcaaagggcgttcttagctctacatgcatgcaagatggcattcgtgaactgtcgtcctgttctctgcattgatgggacattcttgacaggaaagtatcggggccagatactaacagcaataggggtagatggaaacaatcaggtattgcccttggcatttgcttttgttgagagtgagaataccgatagctggtactggttcctgaaattggttaaaacaaaagttgttggtatgaggccaaatgtatgcctgatacatgataggcacgctggcattctgcgagcgataggagagttgcagtttgggagtatggaacgaggataccccggtgtttgggaagatgtacagagtaggtggtgcatgcgtcatataggagctaatttcttcaagcaattcaagaacaaggagctcatgaacatgttcaagaggctgtgcaatcagaaccaggagaaaaaattcaatgagctttggaagagattagatgagttgacagccaaatgcagtgatcagcgtgcagcggctccatcgaccgccgttgctgaccctcctcaagctcttggacctctcccaacggatagtccaacattggttagaagaactagattggagattcggaaattttctcagtggattctgcatgaaccaaaagagaaatgggccaaggcgtatgacacaggtggtgctagatatggaataatgacaacaaatttggcagaagtttacaactgggtgatgcgcggtgtccgtggactgccactagttggcatagtggagttcattttacatgggacatgcaggtattttagggatcggttccaggcagttcttccctctatgccgaacaacagcattttgtttggagctttcatgcagaaaaagctagaggagttgcgtaaaaaggccatgaaacatcgagctctagtgcaaggtacccaacagcacagcggcgagatttatgggttcggcatagctggggagttcacagagactaacgatgaagtactcaatattcctgacccatcgaagctccgaggcaaggctggaaggaggaggactcgtcgcatccgcaacgatatggacgagtcggaggctggcagggtgaagcgttgcagcaaatgcgatgaacatgggcacacctacaagcattgtcctaaagacaaggagaaatcaagtgcggcggaggcaggactatcaggatcagcagcagatggagctcgccctacggagatggcacgtcaggatacacctcagttgttggacccggcgatagatcaccgacaccggtctcaccttactgtggtgcatggggctcagcttgggacgttccgggcacggacgtgcggtgagctactcacggttcacgactcctttgtcgagaggctacgtgaggccggcctcctaccgatgtgtcggctggtggaggctgcggccggcgacgcggacccggccagacgatggaccgtggacaggtcgctcgtagcagctttggtcgatcgatggaggccagagacgcacacttttcacttgccgtgcggtgaggtagcccctaccctacaggacgtatcgtacttgttggggctaccgctcgcgggagacgctgttgggccagtgaccacggctgtggactggcaggacgatctgacggcacgtttcgcactagtacagcgcgcaccgcacctcccgctcgagccgttgggacaccaccgcaacaccggacctacgaagaggtggctgcttcagttcaccgttgagcagctacaggcggacgccgacgagtactcgtacagccgatgtttggaggcgtacttgctctggctttttggctgggtgatgttctgtggcggtcacgggcacgcggtcgacaagggactcgtgcactacgccaggagcatcgccgacgccgcggtaggcgaggtgcctcagtggagctggggttccgcgttgttggcggctctgtaccgtgcactttgtgagtcttgcacgaagacggatcccagcgcgacctttggtgggtgccctctctttctttctatctgggcagctgagaggattgcgatcggccgccctgaggtggaccagcacgcgtacgaggagtcactgtacgaggagcgaccagaggtcgactaccctacgatgggtactctgtggtgccgtcgtcagcgccgatgggctcacgtccaggttaggcggtcgtatcctgagtttgttatggtgttcgaccgccttctgacgactgacgtcgtgtgggagccctacagtgccgcggctacccaggctcgtgcgccgttgggtctgtccacactctgcaccagggaccaggcgtactggatgactacggttccgatggtcttcgacatctgcgttgagcctcacgcccctttccgcgtgatgcggcagttcggcttccgtcagccctttccagtaccgtttccgaccaccgtccaagctgctgttcaccgggtcaccttcgctcccttggagcagcagccccacgttgcgagcactagagacctctacgccaggcaccgcgaccaggacttcgctcgtgttgtcgacgacatcaaccgggtcgtcgttgacggttcaacgacgatccaacgtttagacgcgggaattccggtaaccgtagaggagcacctgacgacgtacacgcggatggtggagtcgatgcgctcgattctccgagtgctcacctgtcgtgcagacgacgttgctcgggcagacgcagctgtacagcggccacccgtaccgactggtccccgtccagctgcgcacattcctaggccgactccccctccacacggagggtttcgtgcaccgttcagcaccccgccttcctcggctaggccttctgttgtgccccccacaggtttcgcccagttcgctatgacgcaggccgcccacttctcccaggctgcatggtcagcgtcacaggcagccggcacgtcgagtcagggtccaccactggaccatgctgggacctcgtcggaccccttcctgtcttccaccgtgctcttcgacatcactgacttcgacttcgcttcaggctcgacagaggacgtcatcggcccctcacagctgggaggcgcaccgccggtgcagacgcaggaccaggcgcaggccactcctccgcgggacactcgtgctacccgtgctgtgccaccggatcgtttcacctactctcaggaccacgtgcgagcacaggcccggaggaccaagcgtggtcgcggcgcggggcagggccagtag

SEQ ID NO: 81170 - DNA, 2964 bp, Oryza sativa
  Clone ID: PAT_MRT4530_80723C.1
atggcattcatgaactgtcgacctgttctctgcattgatgggacattcttgactggaaagtatcgggatcaaatactaacagcaataggggtagatgggaacaatcaggtattgcccttggcatttgcttttgttgagagtgagaataccgacagctggtactggttcctgaaattggttaaaacaaaagttgttggtatgaggccaaatgtgtgcctgatacatgacaggcacgctggcattctgcgagcgatagaagagttgcaatttgggagtatggaacgaggataccctggtgagtgggaagatgtacatagtaggtggtgcatgcgtcatatgagagctaatttcttcaaacatttcaagaacaaggagctcatgaacatgttcaagaggctatgcaatgagctttggaagagattagatgagttgacagccaaatgcagtgatcagcgtgcagcggctccatcgaccgccgttgctgaccctcctcaagctcttggacctctcccaacggatagtccaacattggttagaagaactggagtggagattcggaaattttctcagtggattctgcatgaaccaaaagagaaatgggccaaggcgtatgacacatgtggtgctagatatggaataatgacaacaaatttggcagaagtttacaactgggtgatgcgcagtgtccgtggactcccactagttggcatagtggagttcattttacatgggacatgcagcattttattcggaactttcatgcagaaaaagctagaggagttgtgtaaaaaggccatgaaacatcgagctctagtgcaaggtacccaacagcacaggtttgagatactatgtcaagataaggcaagcaggggtatctaccgcaagagagtgaaacaagaatgtgttctcaaagccgacggcacatgtcattgctcttgtgcaaagccgaagctgctccacaggccatgcacccatgtcattgctgccgcaacggagtgtggcataccagatgcagtatatgtgtcacagtacttcagtaagcaagcagtatatcatacatggggtggcgagatttatgggttcggcatagctagggagttcacagagactaacgatgaagtactcaatattcctgacccatcgaagctccgaggcaaggctgcaaggaggaagactcgtcgcatccgcaacgatatggacgagtcggaggctgccagggtgaagcgttgcagcaaatgcgatgaacgtgggcacacctacaagcattgtcctaaagacaaggagaaaccaagtgcggcggaggcaggactatcaggatcagcagcagatggagctcgccctacggcttgtactcttggcgaggtgcctcagtggacgtggggttccgcgttgttggcggctcagtaccgtggcctttgtgaggcttgcacgaagtcggatcccagcgcgacctttggtgggtgccctctctttctttctatctgggcagctgagaggattgcaatcggccgccctgaggtggaccagcacacgtacgaggagtcactatacgcggagcgaccggaggtcgactaccctacgatgggtactctgtggtgccgtcgtcagcgccgatgggctcacgtccaggttaggcggtcgtatcctgagttcgttatggagttcgaccgccttctgccgactgacgtcgtgtgggagccctacagtgccgcggctacccaggctcgtgcgccgttgggtctgtccacactctgcacaagggaccaggcgtattggatgactatgattccgatggtcttcgacatctgcgttgagcctcatgcccctttccgcgtgatgcggcaattcggcttccgtcagccttttccagtactgttttcgacgaccgtcccagctgatgttcaccggtactcgcgcaagggtcagcagtcagctggcaactggcccaccaagttggggacttttgttgaggactggttgctcgcaaccgaggaggtcgtggagcacgagggagagccacacaccgaggaggtcgtcgacatcaacagggtcgtcgttgacagttcaacgacgatccaacgtttaggcgcggggattccagtatccgtagaggagcacctgacgacgtacacgtggatggtggagtcgatgcgctcgattctccgagtgctcacctgtcgtgcagacgacgttgctcgggcagatgcagcaccacagcggccacccgtaccgactggtccccgtccagctgcgcacgttcctaggctgactccccctccgcatggagggtttcgtgcaccgttcagcaccccgcctttctcggctaggccttttgttgtgccccccacaggttttgcccagttcgctacgacgcaggccgcccacttctcccaggctgcagagtcagcgtctcaggcaactgtgtcgacctcgcactcagcgcagttctggcagtataccgggacttcgtcacaagcagccggcacgtcgagtcagggtccaccactggaccatgctgggacctcgtcagaccacttggtggcttccgccttgctcttcgacatcactgacttcgacttcgcttcaggctcgacagaggacgtcatcggcccctcacagctgggaggtgcaccgccggtgcagacgcaggaccaggcgcaggccactccgccaccagacactcgtgctacccgtgctgtgccaccggatcgtttcacctactcccaggaccacgttcttcgttccataaagcctacaatattgggtcgaaggttctttgtttgtccaaatattcttgacgacgatttcatggaaccaccaaggagatgtcaatacagagaatggatagacaccagaagggttctaactccacctagccgtgttgtgcagcttgaactatcagagcaatacagggttactaaagcgcagtttgagagaggagatggatcctcatataggggttag

SEQ ID NO: 81171 - DNA, 2616 bp, Oryza sativa
  Clone ID: PAT_MRT4530_80724C.1
atgtccaacaaacatacatttcaagtttaccatggcctaggaaacgtccgttacgggccaactggggtagatctgtcaaaatttattgtaacaccaaggggaattgatagaccggctgagaggagtgtaccttctataaaaggatggttgatgaggggcttgagagttgatccacagacaagtgacataacaatcaatgttatagtaagtcgggcaactgagggtttttattgggaactaatgccagttcaaaactctcgtatgtggagatggtatgtggagaatgcattgcaacgcgggtggcctctagctatggttccgtttgttcacccgaaggatctaggtgtgcagatgaacatggatgatggcgagggaccaagtgctgaagtaaatgagacttttgtggaagaggtcaacgcaccagaggaagccaacgagggggagactgtcggtaccattgtggatgaaatggagagagaggattttgacaacgagcgtgtagaggaaggtggttcgtcagatgatgagacggatattaatccagccgaatgggctagtgaggatttttctggtctggtcgtctctgaagaggatagtgtgagatgggaatacaaagaaaatgaggttattcagggagcgatttatactagagcagaagaaatgaaggaggcggtaaagcattttgtagtgtcacttcatagagagttttgggttgccaagtccaatcggtcgcaatatgaagttcggtgtgttaaggaaaaagatgggtgtccctggagagtgcacgcttataagggaaaatggaaggattactggacagtgtcagtcattaccagcatgagcatttcagaaataccacagatgtatgcgcatgtcatcaataatctgacatatgaaccaaagtcaataatccgacatatcgaagagacatacaagtatactattagctatgccaaggcgtggagagccaaacagaaaataatagagatgagatttggaacttacgaagcctcgtatgacaatttgccacgcctgcttggtgttatcaaacaaagataccctgggagctcttacgcagtgaagaaattcccctcaattgaacatcctggcaagagtgtgctgcaaagggtgttcttagctctacatgcatgcaagatggcattcgtgcactgttgtcctgttctctacattgatgggacattcttgactggaaagtatcggggccatatactaacagcaataggggtagatgggaacaatcaggtattgcccttggcatttgcttttgttgagagtgagaataccgacagctggtactggttcctgaaactggttaaaacagaagttgttggtatgaggcccaatgtgtgcctgatacatgacaggcacgccggcatgctgcgagcgatagaagagttgcagtttgggagtatggatcgaggataccctggtgaatgggaagatgtacagacgggaccatcgaccgccgttattgaccatcctcaagctcttggacctctcccaacagatagtccaacattggttagaagaactggagtagagatccggaaattttctcagtggattttgcatgaaccaaaagagaaatgggccaaggcttatgacacaggtggttctagatatgggataatgacaacaaattttgcagaagtttacaactgggtgatgcgcggtgtccgtggactcccactagttggcatagtagagttcattttacatgggacatgtaggggtatctaccgcaagagagtgaagcagggatgtgttctcaaagccgacggcacatgtcattgctcatgtgcaaagcctaagctgctccacgggccatgcacccatgtcattgctgccgcatcggagtgtggcataccagatgcagtatatgtgtcacagtacttcagtaagcaaacaatatatcatacatggagtggcgagatttatgggttcggcatagctggggagttcacagagactaatgatgaagtaatcaatattcctgacccatcgaagctccaaggcaaggctggaaggaggaagactcgtcacatccacaacgatatagacgagtcggaggcgggcagggtgaagcgctgtagcaaatgcgatgaacgtgggcacacctacaagcattgtcctaaagacaaggaaaaaccaagtgcagcggaggcaggactatcaggatcagtagcagatggagctcgccctacggggtcagcgtctcaggcagctgcgtcgacctcgcactcagcgcagttctggcagtacaccgggacttcgtcacaggcagtcggcacgtcgagtcagggtccaccactggacaatgctaggacctcgtcggactacggggtggcttccaccttgctcttctccatgagcgacttcgacttcgcttcagtctcgacagaggacgtcatcggcccctcacagctgggaggcgcaccgccggtgcagacgcaggaccagtcgccatccactccagcgccagacactcatgctacccgtgctgtgccaccgaatcgtttcacgtactcccaggaccacgtgcgagcacaggctcggaggaccaagcgtggtcgcggcgcggggcagggccagtag

SEQ ID NO: 81172 - DNA, 333 bp, Oryza sativa
  Clone ID: PAT_MRT4530_80725C.1
cccacgcgtgcgttcagcccgtcgccgatgggaagggagcttagaggcggccgtacgcggcacgtcaagcgtgccagcttgagcggtggcacgggcccttgggggcttgcgcctataacgtgtgtcgactagcacggcggtagcaggcgccactcgctagcttgaactctgacttagaggcgacgagtcataatccggcacacggtagcttggcgacacttaccgagaacccaccacaactgtaatctagaccaggcgaacgcactctactagctaccatcttgaagtatcgattgcttaggcgggacagctatgtcgagcgccatacatgag

SEQ ID NO: 81173 - DNA, 4740 bp, Oryza sativa
  Clone ID: PAT_MRT4530_80726C.1
atgtcgaacaaacaaatattccaagtttaccatggaccaggaaacgtccgttacgggccaactggggtagatctgtcagattttattgtatcagaaaggggaattgatagaccggctgagaggagtgtaccttctataaaaggatggttaatgaggggcttgagagttgatccacagacaagtgacataacaatcaatgttatagtaagtcgggcaactgagggtttttattgggaactaatgccagttcaaaactctcgagtgtggagatggtatttggaaaatgcattgcaacgcgggtggcctctagctttggttccgtttgttcacccgaaggatccaggtgtgcagacgaacatggatgatggcgagggaccaagtgctgaagtaaacgagacttctgtggaggaggtcaacgcacgagaggacgggggcgtagtagctccagtgggcattcaaccaggtggagtggctgacgagggggagactgtcggtgccattgtggatgaaatggagaggaaggattctgacaacgagcgtgtagaggaaggtgattcgtcagatgatgagacggatattaatccagcagaatgggctagtgaggatttttctgggctgatcgtctctgaagaggatagtgtgagatgggagtacaaagaaaatgaggttattcagggagcgatttatagtagagcagaagatatgaaggaggcggtaaaacattttgcagtgtcacttcatagagagttttgggttgccaagtcgaaccggtcgcaatatgaagttcggtgtgttaaggaaaaagattgttgtccctggagagtgcacgcgtataaggggaaatggaaggattattggacagtgtcagttattaccaagcatacatgttttctacctggtgttcagaaataccacaggaacattacatgtgcatttgttgcatctgagatgtatgcgcatgtcatcgataatctcacatatgaaccaaggtcaataatccgacacattgaagagacatacaagtatactattagctatgccaaggcctggagggccaaacagaaaataatagagatgagatttgaaacttacgaagcctcgtatgacaatttgccatgcctgcttggtgttatcgaggaaagaaaccgtaggagctcttacgaagtgaagaaattcccctcaattgaacatcctggcaagagtgtgctgcaaagggcgttcttagctctacatgtatgcaagatggcatttgtgaactgtcgtcctgttctctgcattgatgggacattcttgacaggaaagtatcagggccagatactaacagcaataggggtagatgggaacaatcaggtattgcccttggcatttgcttttgttgagagtgagaataccgacagctggtactggttcctgaaattggttaaaacaaaagttgttggtatgaggctaaatgtatgcctgatacatgataggcacgctggcattctgcgagcgataggagagttgcagtttgggagtatggaacgaggatacctcggtgtttgggaagatgtacagagtaggtggtgcatgcgtcatatgggagctaatttctttaagcaattcaagaacaaggagctcatgaacatgttcaagaggctgtgcaatcagaaccaggagaaaaaattcaatgcgctttggaagagattagatgagttgacagccaaatgcagtgatcagcgtgcagcggctccatcgaccgccgttgctgaccctcctcaagctcttggacctctcccaacggatagtccaacattggttagaagaactggattggagattcggaaattttctcagtggattctgcatgaaccaaaagagaaatgggccaaggcgtatgacacaggtggtgctagatatggaataatgacaacaaatttggcagaagtttacaactgggtgatgcgcggtgtccgtggactgccactagttggcatagtggagttcattttacatgggacatgcagcattttgtttggagctttcatgcagaaaaagctagaggagttgcgtaaaaaggccatgaaacatcgagctctagtgcaaggtacccaacagcacaggtttgagatactatgtcaagataaggcaggcaggggtatctaccgcaagagagtgaagcaggagtgtgttctcaaagccgacggcacatgtcattgctcttgtgcaaagccgaagctgctccacagggcatgcacccatgtcattgctgccgcagcggagtgtggcataccagatgtagtatatgtgtcacagtacttcactggggagttcacagagactaacgatgaagtactcaatattcctgacccatcgaagctccgaggcaaggctggaaggaggaggactcatcgcatccgcaacgatatggacgagtcggaggctggtagggtgaagcgttgcagcaaatgcgatgaacatgggcacacctacaagcattgtcctaaagacaaggagaaaccaagtgcggcggaggcaggactatcaggatcagcagcagatggagctcgccctacggagatggcacgtcaggatacacctcagttattggacccggcgatagatcaccgacaccggtctcaccttactgcggtgcagggggctcagcttgggacgttccgggcacggacgtgcggtgagctactcatggttcacgactcctttgtcgagaggctacgtgaggccggcctcctaccgatgtgtcggctggtggaggctgcggccggtgacgcggacccggccagacgatggtctgtggacaggtccctcctagcagctttggtcgatcgatggaggccagagacgcacacttttcacttgccgtgcggtgaggtagcccctaccctacaggacgtatcgtacttgttggggctaccgctcgcgggagacgctgttgggccagtgaccacggctgtggactggcaggacgatctgacggcacgtttcgcactagtacagcgcgcaccgcacctcccactcgagccgttggcacactaccgcaacaccggacctacgaagaggtggctgcttcagttcaccgttgagcagctacaggcggaggccgacgagtactcctacagccgatgtttggaggcgtacttgctctggctttttggctgggtgatgttctgtggcggtcatgggcacgcggtcgacaagggactcgtgcactacgccaggagcatcgccgatgctgcggtaggcgaggtgcctcagtggagctggggttccgcgttgttggcagctctgtaccgtgcactttgtgagtcttgcacgaagacggatcccagcgcgacctttggtaggtgccctctctttctttctatctgggcagctgagaggattgcgatcggccgccctgaggtggaccagcacgcatacgaggagtcactgtacgaggagcgaccagaggtcgactaccctacgatgggtactctgtggtgccgtcgtcagcgccgatgggctcacgtccaggttaggcggtcgtatcctgagtttgttatggagttcgaccgccttctgccgactgacgtcgtgtgggagccctacagtgccgcggctacccaggctcgtgcgccgttgggtctgtccacactctgcaccagggaccaggcgtactggatgactacggttccgatggtcttcgacatctgcgttgagcctcacgcccctttccgcgtgatgtggcagttcggcttccgtcagccctttccagtaccgtttccgaccaccgtcccagctgctgttcactggtactcgcgcaagggtcagcagtcagctggcgactggcccgccaagttggcgacttttgttgaggactggttgctcgcaaccgaggaggtcgtggaccacgagggagagccacacactgaggagtcgtaccaggcctacctacgctggtaccagccacgcacccgtactagggtcaccttcgctcccttggagcagcagccccacgttgcgagcactagagacctatatgccaggcaccgcgaccaggacttcgctcgtgctgtcgacgacatcaaccgggtcgtcgttgacggttcaacgacgatccaacgtttaggcgcggggattccgacgacgttgctcgggcagacgcagctgtacagcggccacccgtaccgactggtccccgtccagctgcgcacgttcctaggccgactccccctccgcacggaggatttcgtgcaccgttcagcaccccgccttcctcggctaggccttctgttgtgccccccacaggccgcccacttctcccaggctgcagggtcagcgtctcaggcagctgtgtcgacctcgcactcaacgcagttctggcagtacaccgggacttcgtcacaggcagccggcacgtcgagtcagggtccaccactggaccatgctgggacctcgtcggaccgcttgttgccttccaccttcctcttcgacatcactgacttcgacttcgcttcaggcttgacagaggacgtcatcggcccctcacagctgggaggcgcaccgccggtgcagacgcaggaccaggcgcaggccactcctccgtgggacactcgtgctacccgtgctgtgccaccggatcgttccacgtgcgagcacaggcccggaggaccaagcgtggtcgcggcgcggggcagggccagtagagcagtcttctctttgtttacttgcttcactttccagtactgtatgcttgtgtaa

SEQ ID NO: 81174 - DNA, 509 bp, Oryza sativa
  Clone ID: PAT_MRT4530_80727C.1
ctcatacaattgtacaaaattgtattgacaagagctttcagatgattccttctcaaacaattgtacacaaatattcagtaaaaccatgtctccatgttgagaaagatggctgctggctgcatcacatggttctacaaggaccttacaaaatgcctatgtttaataatttgttgcttgactacatgtacagccagtgtgatccactgtataccactcggcagtgaaactacgctatcagcgtctcagcaactattctgatcgcatcgtccgagctgacatcatcaagctcaattgttttctttggagggcaatgaaactacgctatcagcgtcttagcactatactgatctcatcgtccgagctgacgtcatcaagctcaatcgttttctttggagggcatgtcatcttcattttcttgttatcttgctcttgcttttgtaatcccggtttgggcattgatttggtgctacaagatgtggaccttttgtttgagctgaaccttgatgtct

SEQ ID NO: 81175 - DNA, 247 bp, Oryza sativa
  Clone ID: PAT_MRT4530_80728C.1
attgattgtgggagggggtttgttttattaaaatatgaaagataaataattttttattaataataaccaaaggggatgttggggattacccaggaattttggaacgggactttaaggaaaaaaagaaaaaaaaataatgagatgtattaaagcttggaaaaaaaaaggtaagaggtgattcttgtgaaaaatgatgatcaggataaaagaccataaaagataccaacgggaaggataaagagtgaag

SEQ ID NO: 81176 - DNA, 933 bp, Oryza sativa
  Clone ID: PAT_MRT4530_80729C.1
atgaaacgaacgaacgatcagccgccgccgcccaatgacgacgacgatcgatctcgcctcttgctgatgagacgaggtcgccatcggaggaaattattggtgcaatggggcatgcacggtatgtgcatgcaacaatcgaagagaagaagagttcccaattcgatcacgtacagcgaaagcagcacgcatatgcacgtaggcggcagcacgaacgcacgcaataaggatgcgtgtttcaacgcatcaaagcacacgcatcggccacaaaatgtcgcgtttgatattgagctatatatgacgagagccgacaccaatcgtgccgcacgcacacggtgtagccacagccgcagctgcagccaccgcaaacagcttgccgaacaggccattgctgcagctactgcacgggctgcagttacaagccagcaacgttgttgcaggcacatacacataatttgcaccagaaccagatcgagcattgcacgcgttttcaaagtccaaacacgtacccaagtacgtatgccgcgccgctaccaaatactactagatgcatcgtgcatgcatgcacggtctctttgcgtttggtggattaattggatcggcaactgcacggcaatcatcggtaacacagatcggggcggtgaccgcaccctgctcctgctgcatgtacgtacgtacattcgacagggcgaatctgaagacttcagcaggttaactaacaccgatctcagcatggcaagcacacaagaactaaccataaaaaaagttaaactcaaatggacgaaatatgtgacatattttcgaaagctctatcgaaaagcttcttgcctcgaaaacataatcttgcaagcggaatttagaggttttaatttcaccgaacccgacaaagcggggaaaccaaccataaaaaaattaaactcaaatggacgaaatatg

SEQ ID NO: 81177 - DNA, 1310 bp, Oryza sativa
  unsure (1)..(1310): unsure at all n locations
  Clone ID: PAT_MRT4530_8072C.1
gagggcgtgtactcgtgacatcgtgtgtntgcgtgtgcgcgacgcgcgcggncaagatgttggacgggtgcggcctcttggcgtttgcccgctgctgctgcgtgggaggcggcgagatggagagcgatgcacgcgtgtcggacgagccgggctgcggcggcggcggcggcggcggcgcggggtcggtggtggagaagggcggcggggtggtggcgaggcggttcgggtgggcggagatcgagtcggtcacgggcggattctcgtcccgggtgatcgggcagggcgggttcagcaccgtgtacctcgcgtcgctcacctcctcccgcctcggcgccgtcaaggtgcagcgcagcagcgagcgcctccaccgcgccttctgccaggagcgcgacgtgctcctctccctccgccacccccacgtcgtccgcctcctcggctactgcgacgaacgagatgagggtgtattggtgttcgagtacgcaccgaacggcgacctccacgagaggctccaccaccggagcggcgggaagagccggacggtgctgccgtgggcgcggcgcatggccgtcgcgttccaggtggcgatggcgctggagtacctccacgagagccgggaccccgccgtcatccacggcgacatcaagtcctcgaacgtgctgctcgacgccaaccacgacgccaagctctgcgacttcggcttcgcgcacgtcgggttctcggccgcggtccgcccgccgtccggcgccaccagggcgtggggccgccccgtcatgggctccccgggatacgcggacccgcacttcctccgctccggcgtggccaccaagaagagcgacgtgtacagcttcggcgtgctgctgctcgagctcgtcaccgggcgggaggccatctgcgcccagacggggcaccggctcaccgccgccgtggggccctcgatcggcgagggcaagctggccgacgtggtggaccggaggttgggaggtgactacgacgtcgaggaggccgccaccgtggcggcgctggcgctgcggtgcgtcagcgacggcaccgggctccgcccgtccatggcggaggtggtgcgcgagctgcaggagaagacgacggcgttgatctcagccgtcggatccaaaccaagcgataagatggtttcatgagttacccgtcgaaaggctgtaaatagcatgttagggaggctccaaaagttcatttttttttaccttatctcatcatcatcagtggattagttgaaactttgggatcaagtagaaaaattttgtgatgtcatgcaaaaaaaaaaaaaaaaaaaaaaa

SEQ ID NO: 81178 - DNA, 236 bp, Oryza sativa
  unsure (1)..(236): unsure at all n locations
  Clone ID: PAT_MRT4530_80730C.1
cgtcgccgtcgatcacgtgtgttgccgccggaaccgccgccgccgccgtcatcatccctctccgggttccgttctccgccactgccatgcgcgccgttgccctagtcactgctgagccgcagccgcccaaccgcgccgccgtcgnccttttttggggccccccccccctgccacgcgccgagccgttgtgcaccgtcgctgccgcccctgagccgagccgagccgccaccacctag

SEQ ID NO: 81179 - DNA, 1506 bp, Oryza sativa
  Clone ID: PAT_MRT4530_80731C.1
atggcgtggttcgtcgcggcttggagctgcctccttgtggtggtgatggtgagctcgatgaggcttagtaggtcagcttcatcgtcctgtggatcttcttgcggccatggcgggtgggggccgaggagctacccggtgatcgggtgcctggtggcgttctaccgcaaccggcggcggctgctggactggtacacggagatgctggcggcgtcgccgtcgcagacgatcgtcgttgaccggctgggcgcgcggcgcacggtggtgacggcgaacccggcgaacgtcgagcacatcctccgggcgaggttcgccaactaccccaaggggaagccgttcaccgacgtgctcggcgacctgctcggcatgggcatcttcaacgacgtgctccggcggttcgcgttcgacgtcatctgccgggtctcgctcggcgttgacccgggatgcctcgacccggcattgccggcgccgaggctggccgcggcgttcgacacggcggcggggatcatcgcccggcgaggcgcggcgcccgtggccgccgtgtggaaggtgaagcgcgcgctcgacgccgggtcggagcggcggctgagggaggaggtcggggtgatccatgaggccgtgatggggctcatccggagccggaggaaggagcgcgcgctcctcctggtcaacggcaatggcgtcggcggcggcggcggcgcgaggagcgacctgctgtcgcggatgatcgaatgcgggtaccccgacgaggcgatccgcgacatggtgatcagcttcatcatggccggccgcgacaccacctcgtcggcgctcacctggttcttctggctcctcatgcgccaccgcggcgtcgaggcccaggtgctcgacgagatcgccgcgacgcgccgcgcccgcggcgcgggggaagaaggcggagacgacggcgagggcgaggggctcgacctcgacgactaccggaggatgcgcgtcctccacgcggcgctgtgcgagacgatgcggctgtacccgccggtggcgtgggactcgaagcatgcggcggcggacgacgtgctccccgacggcacggcggtggggcgcggcgaccgcgtcacctacttccagtacgggatggggaggatggaggccatctggggcgccgacgccgccgacttcagcctcgacaggtggctctccctcccgcgcggcggcggcgacggcgccgccgccgcctcgccagccgccgatgcgttcgccggcgtgtcgccgttcaagtacccggtgttccagggcgggccgaggacgtgcctcggcaaggagatggcgttcgtccagatgaagttcgtcgccagcgccgtgctccgccgtttcgagctccgccccgtcgacgagggccgcacgccggcgttcgtgccgctcatgacggctcacatggccggcggcctcaacgtgacggtgcggcggagaacgccggcgccggcgacgtcgacggcggccaatggcacaggaggggaattgaccagtagttaa

SEQ ID NO: 81180 - DNA, 455 bp, Oryza sativa
  unsure (1)..(455): unsure at all n locations
  Clone ID: PAT_MRT4530_80732C.1
gtccttgggtgtaattgtcattggaaggaacagagaaatggagaaaagactgttgggaattgagacatctttaccagtttctgtacttttctacctgagtgcaacctttattaagattgattggtagcaaggataaaaatgaaggccagcaactcgaaaggcggatgatgcacaataggcctgaccatgtatctggaacacccccatccgtctctaaagtcttgtgggttgaggatcaccgtatgcccagccaagctcactgacatgggaagaacgatggtcgacaatacttttccatatattccttctgaaaacggctgaggtggcgcacatgaatgtattatttntgaaaggtggcgcacttgggccttccttgagttctcaaaaaaaaagaaaaaggtgcaaacacgtctgtattattttttggaggaaaataaaaaaaaaaaaaaaaaaaa

SEQ ID NO: 81181 - DNA, 1740 bp, Oryza sativa
  Clone ID: PAT_MRT4530_80733C.1
atgtcctcaaacttgttcgactatgtcatcccggcgtgtgccgccggccagcattgcgacgacagagcagcggcgggctcgctgccgtcgtgcctcctcgccaccggcgtccgcaacttctccctcgccgggtcgccggcctacgacgcgctgctcaacttctccatccagaacctccggttcgcgctcccggccgccggcgcggtgcccaggccggcggccgtcgtgctcccgcgcggccggagcgagctcacgagcgcggtgctgtgcgcgcgccacgcctcgctgcgcatccgcgtgcgcagcggcgcgcacagctacgagggcctctcgtacaccgtcggcgacggcggcgacgacgccgaccgcgtccgcttcgtggtgatcgacctcacgaggatgaacagggtgcgtgtcgacgccgcgtcggccaccgcgtgggttgagtccggcgcgacgctcggcgagatctactacgccgtcgcgtcgtcgtcgtcctcccttgcgttcccggctgggtcgtgctcgaccgtcggagcaggcgggcatatctccggcggcgggttcgggctgctgtcgcgcaaattcaagctcgccgccgacaacgtgctggacgcgatcctcgtcgacgcggacggcagggtcctggaccggagctccatgggcgagaacgtgttctgggcgatccgcggcggcggcggcggcggctggggcgtggtctacgcctggaagctccggctcgtccaggttccgaacaccttgacggcgttcacgccgaaaaggaccggttcggtggacgccatcgccgggctagtgcatcggtggcagtacgtcggctcagctctgcccgacgagttttacctctccgtcttcctcaccatcggcggcgccagctcgtcgtcgccatcacgagatggaaacgtgacggtgtccttcacagggctggttcttggttccaaggagctggccatgtcggtgctgagcgagaggttcccggagctgggcctcgccgagccggagatgtcggagatgagctgggtggagtcggcggcgaggttcgccgggctgagctcgacggaggagctgaccagccgcgcctccaggacgaagcactacgccaagagcaagtcggactacgtgcggtcgcccatcgcgaggggcgccgtggcggcgatcctccggtacctcgccggcgagccggcggggtacgtgatcctcgacccctacggcggcgccatggcgcgtgaggggagcggcgacacgccgttcccgcaccgcgccggcaacctgtacagcgtccagtacggcgtgacgtgggaggccggcgacgacggcggcggcggcggcggcggcggcgaggcgcgcatggcgtggctgcgggcgctgtacgcgtacatggcgccgcacgtgtccaagaacccgcgcgccgcgtatgtcaactacgtggacctcgacctcggcaccaatgctctcgccgggaacgtgtcctcgccgtcgtcgtcggtgagccgagcacggtcgacgtggggctcggcgtacttctcgccggcgaacttcgaacggctcgtcggggccaagacgctcatcgatcgttccaacggcgatctcgatgactccgggagaggcagcgaggcgctgggctccgcgaggggcatcggcgtggtagggctccggagaggcagcgtcgctgggctccatgagggccagcgcgtggcggctacatcgtcggcgcggcggtga

SEQ ID NO: 81182 - DNA, 1672 bp, Oryza sativa
  Clone ID: PAT_MRT4530_80734C.1
atggcgtggttcgtcgcggcttggagctgcctccttgtggtggtgatggtgagctcgatgaggcttagtaggtcagcttcatcgtcctgtggatcttcttgcggccatggcgggtgggggccgaggagctacccggtgatcgggtgcctggtggcgttctaccgcaaccggcggcggctgctggactggtacacggagatgctggcggcgtcgccgtcgcagacgatcgtcgttgaccggctgggcgcgcggcgcacggtggtgacggcgaacccggcgaacgtcgagcacatcctccgggcgaggttcgccaactaccccaaggggaagccgttcaccgacgtgctcggcgacctgctcggcatgggcatcttcaacgtcgacggcgagctctggcacgcccagcgcaagctcgtcagccacgagttctccgcgcgcgcgctccgggacctcgaggtcaccgtgctcgaggccgaggcgcgggaccgcctcgtcccggcgctcgccgcggcgtcgcgcggcggcggggtggtggacatgcaggacgtgctccggcggttcgcgttcgacgtcatctgccgggtctcgctcggcgttgacccgggatgcctcgacccggcattgccggcgccgaggctggccgcggcgttcgacacggcggcggggatcatcgcccggcgaggcgcggcgcccgtggccgccgtgtggaaggtgaagcgcgcgctcgacgccgggtcggagcggcggctgagggaggaggtcggggtgatccatgaggccgtgatggggctcatccggagccggaggaaggagcgcgcgctcctcctggtcaacggcaatggcgtcggcggcggcggcggcgcgaggagcgacctgctgtcgcggatgatcgaatgcgggtaccccgacgaggcgatccgcgacatggtgatcagcttcatcatggccggccgcgacaccacctcgtcggcgctcacctggttcttctggctcctcatgcgccaccgcggcgtcgaggcccaggtgctcgacgagatcgccgcgacgcgccgcgcccgcggcgcgggggaagaaggcggagacgacggcgagggcgaggggctcgacctcgacgactaccggaggatgcgcgtcctccacgcggcgctgtgcgagacgatgcggctgtacccgccggtggcgtgggactcgaagcatgcggcggcggacgacgtgctccccgacggcacggcggtggggcgcggcgaccgcgtcacctacttccagtacgggatggggaggatggaggccatctggggcgccgacgccgccgacttcagcctcgacaggtggctctccctcccgcgcggcggcggcgacggcgccgccgccgcctcgccagccgccgctgcgttcgccggcgtgtcgccgttcaagtacccggtgttccagggcgggccgaggacgtgcctccggcaaggagatggcgttcgtccagatgaagttcgtcgccagcgccgtgctccgccgcttcgagctccgccccgtcgacgagggccgcacgccggcgttcgtgccgctcatgacggctcacatggccggcggcctcaacgtgacggtgcggcggagaacgccggcgccggcgacgtcgacggcggccaatggcacaggaggggaattgaccagtagttaa

SEQ ID NO: 81183 - DNA, 308 bp, Oryza sativa
  Clone ID: PAT_MRT4530_80735C.1
tcgttttgacgaagcctcctactacattagggatagccatccataacaccgacttgacggtaagcagctagggctatggatctagtattgcatctcaggctacatccatggtggtagaagagctggcacctaacttaaaagggatggcacataggaccggacgctctggtacgaacaactttctggacttccacatgcgtgtgttggcggtcaccattgttgttgcccataggaactgcccttgactggatggatctacgcactatgaagctgtggtgaaggcatggacgtatcaaacattctactat

SEQ ID NO: 81184 - DNA, 228 bp, Oryza sativa
  Clone ID: PAT_MRT4530_80736C.1
atgaagaagaggacggtgatggtgaaggtgaaggagaggatgacgacgaaaaaggtggagcagctgctgtcgttcgtgccgaggacgtttcctcgagatcgaaagccacgatccgatgaccccgagatcaaccaggcccgcgaggagctccgcaccaagggctccgtcgactgctgggtcaccaaatacgccgccgccgacgacgacatgctggcctcaacagcctag

SEQ ID NO: 81185 - DNA, 169 bp, Oryza sativa
  unsure (1)..(169): unsure at all n locations
  Clone ID: PAT_MRT4530_80737C.1
cacacacgtctcggacctctcccctatctctgtntgctcgctgccttcgttcgctcgcttttattcgcgcggcgaataataggcgatgaagtcccgcagcggcgcgacgatagaagtagggcatgattagaaacttgcgcggcggagaccgttccgtcttctgcctccg

SEQ ID NO: 81186 - DNA, 232 bp, Oryza sativa
  Clone ID: PAT_MRT4530_80738C.1
gggggggggtttttttttttttttttacttggcaaagggaaaccatttgtgtttatcttttattttcacaaacttcgcaagtgtaaatataaaaccatttagaagttatatgtggtgacaatgaatagcacatgatactttaagttgagcaaaaggtattggtggggggggggatgaaattgacacttgacagatgcataggaaattcccagataaaaacaccaaattgggg

SEQ ID NO: 81187 - DNA, 1549 bp, Oryza sativa
  Clone ID: PAT_MRT4530_80739C.1
atggcgtccggcgaggaggccgacctggaggcgttccagcggcacgtggcggcgcacctcgccgatctcaggggcggggaggacgagctcctgtccatcgagtggatccggcggctgctcgaggcgttcctgctgtgccaggaggagttccgggtggtggtggcgctggcgcgccgccgcggggcgctgtcggcggcggcggagaagatggtgggggatttctacgagcgcgcggtgaaggcgctcgacgtgtgcaacgccgcacgcgacggcgtcgaccaggtcaggcggtgggagcggctcgccggcatcgcggcgtccgtgctgctcgccccaggggagatccacgagggccagctccgccgcgcgcggaaggcgctctccgacctctcggtgctcctcatcgacgacgccgcggccgccgcgggtggcggcggcgtcgcctccttcctctcctcccaccgcaaccgctccttcggccgcgcccgcgcgtcgccctcccgctccgcgacgctcgcctcctcctcatcctcctcgtcgtcgtcctcctcctcctcccacttccgctcgctctcgtggagcgtctcccgcaactggtcggcggctaggcagctgcaggccatcgggtccggcctggcggcgccgcgcgcgcacgaggggggactcgtggcgccggtgtactccatgggctgcctgctccacctcgccgcgtgggccctcgtcgccgccgtgccgtgcccggaccgcgccgccgcgctccaggcgcaccacctccccgccgcgccgccgcgcgccgcgttcccatgggcgccgccgctgctcgcgctccaggagcgcctcaccgaggaggggaagcgcaaggacaggcgcaactcctgcggcctcctcaaggaaatccacgcgctggagaaatgcacgcagcggctcgccgaggcgatcgacgccgcacccgtcccgctctccggtgagcgcgaggccgaggtacgggaggccgccgccgagctggctgccgtgtgcgccgccatgagggccggccttgagcctctcgaaaggcaggtcagggaggtgttccaccgcattgttcgcagccgcatggaggggctcgattcgccgatgctcaacgccgattgaaacatggagaattcacatttgatcgtgcaatgtggtggtgataggtaatgccgatcgaaccgtcgagaatttggatttgatcgcgcaaatgtggtggttataggtagctctcctgttcttggtttttttcctcacttgtggtggtctagtagtaattataaaatgtgtgccgttctgtaaaggaaggggggaaaggaaaggaaccatctttatgtaaagatgattccttcttcccatgttttgatgctgcatttggtgtatatcatggcatttttgttagtcctccatgtgtgcgcggctaattctgggagtaacttatagttgaaaaatctgtgaggtcgctatgaaatgtggcctgttgtcgagaatgtcgacaaaaaaattaaacaagaaaaaaaaatctactgtggtttagttc

SEQ ID NO: 81188 - DNA, 1818 bp, Oryza sativa
  Clone ID: PAT_MRT4530_8073C.1
atggcggcgggtggtggtggcgctgatgggctccctccgggcctcaggttcgatccgaccgacggcgagctcgtctcccgattcctgctccggcgcctccagggtaagcccctcccgctcaatggcgtcatcctcgaggccgaccccctcagcgtgccgccatggaagctgctggcggagcacggccggggcgacgagggcttcttcttcgccgaggctcgggccaagaacggcaaggggagccgccagaagcgcaccgtcgagggtagtgggctctggcaggggcaaagggtctgcgccgacggcgagaagctgctcgtccccgatggcggcggcgtggaggtggagatcgtgtggcgcaagtacttgctgagcttcttcgccgagggcgagagggggagctccggctgggtgatgcatgagtacgccgtcacgtcccccgccgagctcgccgcgtcgccgatccggctctaccgcgtccggttcagcggccacggcaagaagcgcaagagagagccacaatccggcgaggacggtgtcggtcgagcacgcgcggcgccacagagcgctggaacagagactgctctgctcgaggagcgcgtcatgccgccacagccggcgccccagagcgtcggaacagaggatgccctggtcgaggagcgcatcccgccgccacagcccgttcccatccctcctatcgccggaacagaggatgccctggacgtcggcactgaggacgttcgaggacgagccgcgccacagagcgctggaacagagtctgctctactcgaggagtgcgtcctgccgccacagaccgcgccccagatcaccggaacaggggttgctctgctcgacgaggtcgttccaccgccacagaccgtgtcgatttcccctcccgcagcgctggtggacgctgtcgatgatgctgactgtgccaatcagggatgctccggcgtgatggacgattccacaatggtgttcagtcatcttccggacatgatcaccctgcccgcagaagaaggtgatgccgccggtggtgcagcgctggcgtcgatggactactcctgggctgattttgagttcccagagatcaacatggatgagttgcctaactgcatcgacttcaccacaactgaccccagctgcttggacattgagctctccatgggcgacctccatgagccccagagcactggaatagagtctgatctgctcgaggagttcgttccgcagccacagccagtgcttgttcctcctctggctgctctggttgaagttgccgatagctctgaaggccctgatcagggatgctccgttgtgatgcatgattcttctgcggtgtttactcatctgtcagacccgatcgtcctgccagaagaagaagaagctgatcgtcctgatgcgccggctgggactatgtcactagactatcagaactactccttgtctgatttcgagttcccagagtaccctctgctcgatgttgccggtgatgctgacggcgcagatcagtgctcttccaacgtgatggatgattcttccatggtgtttagtcaccttgaagacctgattaccctaccagcagaggaagcagaagccgatgcttgtagtgcagcgcctgcgccgtcgctggacaaccaaaaatactcctcacagggcatcatcgacagtgaggcgccggcattgtctgatttcgagttcccagagaccattgatgaggttctaaacagcatcaacttcacaatggccgacccgagctgcttggatatggagttctccatggacgacctcttagactttgatccgccggctgattag

SEQ ID NO: 81189 - DNA, 2014 bp, Oryza sativa
  Clone ID: PAT_MRT4530_80740C.1
ctcccctcgagaggccgagagagccgagctacagacctccgcgctgacgccaccacgcggggcgaccccaacaaaagaaatggtgatgcgaacctcctcccccgaacgcccaactaaacaagcatcagctactcgacccacctatctggcctggctcactctttctccgtttattttttatttactcttcgtaactaaaaatgccatttccaccacgtgggtgagtgcgcgcgccggcggaaagttcaacgaagcgtcgtagcgagcgcggccacctacgtaaagctcgccccgtctccgcctcggcttgccattcaactcgaacacaccacacactgaagtgtgtaaccaagtttgagacagaggcgaggtcgggtcagcaaggaagacggcgatgacggcgcgaagcatgttgcggaaccacccggaggcgtcggtgctcgacaccatccggcagcacctgctggaggagccgcgcggcggcggcggtggcgaggcggcggaggcgagcttcgggagcctggtggccgacatgtggagcgactcgctgccgttccgcgacgacgacgccgacgacatggtggtgttcggcgcgatgcgggacgcgttctcgtgcgggtggctgcccgacggcgtgttcgcggaggtgaagccggagcccctgctctcgccggactcgtcgtcgtacgacgggtcctcttgctgcttcggcttcgcggacgtgtcggagccggtgacgccgagcgacgcggcgtcgggggcggcagaagcggcggccgcggcggcggcggcgacggcggagcacgggaaggaggaggaggccgcggctgcggtggcgagggggaagcactacaggggggtgaggcagcggccgtggggcaagttcgcggcggagatccgggaccccgccaagaacggcgcgcgcgtgtggctcggcacgttcgacaccgccgaggacgccgccctggcgtacgaccgcgccgcctaccgcatgcgtggctcccgcgcgctcctcaacttcccgctccgcatcggctcggagatcgcagccgccgccgccgccgcagcggcagcggcagccggcgacaagcggccgtcgccggagccggcgacctcggagtcgtccttctcctcctcatcctcctgcaccaccaccaccacctcctcctcaacctcctcctccggctccccgaaacggagaaagagaggcgaggccgcggccgcgtcatgtccatgcccctggtgcccccgccttcccagctgaactggccggtgcaggcatggtaccccgccgccgcaccggtcgagcaggtggcgatcaccccgcgcgtggagcagctcgtcatctaaagcgcgcgacgcacagtgaagcaagcaaaccaagccagcaatggtcgacgtcatatcaccttgacgccccaacggattgaccagcgagcacgagccagccattgctttgcacggcgcgagacggcaaagggatcaggcgatggaaccccgtgagcgcgacggcgcaagcgagcagcatccccgcgaaagctccaccggatgcaaaattgcaaacgcgataagctcgcgggtgcaactggtgaaattgggtggtgcaatcgtgtgtgggcgagctctagcagatagtagcgtggtggtggtggtggtattgttgtcccggcgcaactcgcccaagtgggggggtgaggaggatactctgtgtctactagcgtgttcttgtcagggaatgcacggtgtcgtcaagtgtgcaaatcctaagggtcataattcgcgtcattgtcactagtggatcacccgagtgagtttgtgagggtttcagtgaaaaaaaaaaactgtacaaacgatgtcttgtggtgtggagaagcagcagagatgaagaacaatcaatcatcccctttgttcttttgatcttaggagtccaaatgataggtctaatcagtaatcacaaggtcgcaaacatttaaacccagaaaaaaaaaaaaaaaaaaaaaaaaaaaaagggcgg

SEQ ID NO: 81190 - DNA, 246 bp, Oryza sativa
  Clone ID: PAT_MRT4530_80741C.1
cacgaggcgcctccgccgcctcgctccgctgccctctctgctcccagtgctgtccctttctcccgcgctctcgtggccctcctccctccccaaaaacctcgccctcatctccctcctcccctcgcccccaaacccctctcgttctctgcacctgcctgacgcggcgcctgcctgactcctcatgtcccgctccacgcggaccactcgcgtctcctctccctgcttcctgacacgccgtcctcccgg

SEQ ID NO: 81191 - DNA, 3177 bp, Oryza sativa
  Clone ID: PAT_MRT4530_80742C.1
atggcacggggctccgctctgctcgatggtagcgtgctgccgccttcccgcatcgtgagcgagaggcaggctgggctgccgcgccgcttcatgccggaatctgccaccggccgggagatagtcacgctgggcgagggacgcccggcaccagactacccggggcggtccgtcttctttctcccctttgcaatggcagggctggttccgccattttcttctttcttcatggatgttctggagttctacgatctccagatggcgcacctcacccccaacgcggtgatgacattggccatcttcgcgcatctgtgcgagatgttcattggggtgcgcccatctcttcggctgttccggtggttcttcaccgtgcagtcggtgtcgccgccatcggtagttggtggctgctacttccagccacgggggccggtgctgaaccgctacatcccctgcgccctccgcaagaagtgggacgactggaagagcgactggttctacaccccccttgccgacgaagcgcgcctccgacttccgagccagcccccggcgcaggcctccagctggcgggcgccggtagatctgggggatggctatgacgccgtcctcgaccgcctggcgggcctgcgatcccaggggctcacaggggccatggtgtacggcgactacctccgtcgtcggattgcgccgctccagcggcgcgctcggggcgcctgggagtacaccgggtccgaagacttcatgaggacccaccagggagcgtccctcattccccaaggaatcctccccctctgcagcgatccagactgcgcctccatcctaaccattatgatggcggtcggggcctcagaggagcgagctccaaagggccacgacgacgcaggcgggagccgcaggggggaacaatctaccccgggagggggtcgtacttctgggtcccgcgacaggggcccggggagcagccgccctgccgacgcccgggggaagaggaagcagggaggaacacctcccccatctcctccccgagggggcggggcggtgcgcgccagcagcaggcggccggagggggccgtgccgacatcgcagcccgagggggagcgcaagaagaagcggttccgcaagatgggggagacagaaccatctcggggaaacctcatttcccctccaaagtggtcgtttaaccgaccccctcgcagcgagatcccgtcgcgtccctcccgccattccaagcccggccagtctgaggccgaggatccggcggccgcagaggcccggaggcgggaatctgaccggcgagaggccgcggatcgcctacgggaagccgaggaggccgcccaggaggccgcccgggctcgccaggccgaggaaaccgctcgggaggaggccgcccgggcccgccaggccgaggaagccgttcgggaggaggccgcccgggcccgccaggccgaggaagccgttcgggaggaggccgcccgagcccgccaggccgaggaagccgctcgggagaaagccggatttcgccaggacgaggcgttggcgacttccgaggcagctcgcgacgaggccgcgggcgcgtcgcttgggcccactccctcgggcgacgctcaggcgacagcttccggggcagctggcgacgaggctgcgggcgcgtcgcttgggcccactccctcgggcgacgctcaggaccaaccgggtccgggggacatccccgagtccggcacttccatcggtggcccgagccgcatggcatcctctccaaggcggctcttccccacgccttctatcgccccactgaacgcagagccccttctgcaggccttggccgccgcaaacaccacggtgttggatgggttaagtgcccaggtggaggccctgcaggcagagcgggcggagctcgatgccgcgtgggcgcatgtcgaagaggggcgacgctcggtggaggccatggtggaggtgggccgtaaggctcaccgccggcacgtctcggagcttgaaacccgtaagaaggtgctggcggagatcgccaaggaagtggaggaggagcggggggctgccctcattgccaccaccgtcatgaacgaggcgcaggacaccctccgccttcaatacgggagctgggaggcggagctagggaagaagctcgacgccgcccagggggtgcttgacgctgccgctgcccgagaacagcgggcggcggagaccgaagcggcgtcccggcggcgcgaagaggcccttgaggcgcgcgccatggcgctggaagagcgcgcctgcgtcgtggagagggatctggcggaccgcgaggccgccgtcaccatccgggaagcaacgctggcggcgcacgaggctgcctgcgctgaagaagagctcgcgctccgcctccgcgaggacgcgctcaccgagcgggagcgagctctcgagggggccgaggccgcggcgcaacagctggcggacagcctgtccctccgcgaggcagcgcagaaggagcaggcgcgccgtaatctagaaggtgcccgcgccgagagggccgcactgaaccaacgggccgctgagctcgaggcgcgggcgaaggagctggacgcgagggcgcgcagcggcggggcggccgcgggcgaaagtgacttagccgcccgcctcgcagctgccgaacacaccatcgccgatctacagggcgcgctggactcgtccgccggggaggtcgaagccctccgcttggcaggcgaggttgggcccggcatgctttgggacgccgtctcccgcctagattgcgccggtcggcaagtgggcctctggagagggcggaccgtaaagtacgccgccaaccagggaggtctcgcccagcgcctctcgaagatggccggggctctccaacggctccccgaggagctcgagaagacaattaagtcatcctcgagggacctcgcccaaggagcggtggagctcgtcctggcgagttaccaggccagggaccccaatttctctccatggatggcgctggatgagttccctcctgggaccgaggaccacgcgcgcgcgcaggtccgggatgccgccgaccatatcgtcgacagcttcgagggctcggcccctcggctcgcgttcgcccccaactccgacgaggagggcaatgccggtggtgcagacgacagtgacgacgaggccggcgacccgggcgcatcggattga

SEQ ID NO: 81192 - DNA, 3228 bp, Oryza sativa
  Clone ID: PAT_MRT4530_80743C.1
atggcacggggctccgctttgcttgatggtagcgtgctgccgccttcccgcatcgtgagcgagaggcaggccgggctgccgcgccgcttcatgccggaatctgccaccggccgggagatagttacgctgggcgagggacgcccagcgccatgctacccggggcggtccgtcttcttcctcccttttgcaatggcagggctggttccgccattttcttctttcttcatggatgttctggagttttacgatctccagatggcgcacctcacccccaacgcggtaatgacattggccatcttcgcgcacctgtgcgagatgttcatcgggtcggtgtcgccgccgtcggtggttggtggctgctacttccaaccgcgggggccggtgttgaaccgctacattccctgcgtcctccgcaagaagtgggatgactggaagagcgactggttctacacccccctcgccgacgaagcgcgcctccgacttccgagccagcccccggcgcaggcctccagctggcgggcgccggtagatctgggagatggctatgacgccgtcctcgaccgcctggcgggcctgcgatccctggggctcacaggggccatggtgtacggcgactatcttcgtcgccggatcgcgccactccagcggcgcacccggggtgcctgggagtacaccgggtccgaggactgtatgaggactcaccagggagtcagatgggactgggctcctgaggacttcaagatagtggtccaacgggtgctgaatctcagctccgtggaggcatccctcattcctcaaggagtcctccccctctgcagcgatccagaccgcgccttcatcctgaccattatgcaggcggtcggggcgtcggaggagcgggctcctcgaggccacgatggcgcgggcgggagccgcaggggggaacaatctaccccgggagggggtcgtgcttctgggccccgcgacaggggcccggggagcggccgccctgccgacgcccgggggaagaggaagcaggaaggaacccctcccccatctcctccccgagggggcggggcggcacgtgccagcagcaggcgcccggaggggccacgccgacgtcgcagcccgagggggagcggaagaagaaacggccccgcaagatgggggggacagaaccatctcggggaaaccttatttcccctccaaggtggtcgtttaaccgacctcctcgcaggttcgtcccacgcccatcgtggccgtattcattccctcaacgcgagttttcactcatccatcttgtttgtcttctggtctttcttctgtttcagcgagatcccgtcgcgtccctcccgccatcccaagtccggccagtctgcgaccacagaggctcggaggcgggaatctgaccggcgagaagccgcggatcgcctacgggaagccgaggaggccgcccaggtggccgtccgagctcgccaagctgaagaagccactcgggaggaggccagacttcgccaggccgaggagacgacatcctccgaggcgacccgtgaaactgaccggcaagaggccgcggatcgccttcgagaagccgaggaagctgctcaggtggtcgtccgagctggccaagctgaagaagccgctcgggaggaggccagacttcgccaggccgaggcgacgacgacttccgaagcagctcgcgacgaggccgcgggcgcatcgctcgggcccactccctcgtgcgacgctcaggacaaaccaggtccgggggacatccccgagtccggcacgtccatcggcgggccaagccgcgcggcatcctcttcgaggcggctcttccccacgccttccgttgctccactgagcgcagaacctcttctgcaggccttggccgtcgctaacaccacggtgttggacgggttaagtgcccagatggaggccttgcaagcagagcgggtggagctcgacgccgcatgggcacgtgtcgaagaggggcgccgctcggtggaggccatggtggaggtgggccgcaaggcacaccgccggcacgtctcagagctcgaagttcgtcagaaggtgctgggggagatcgccaaggaggtggaggaggagcggggggctgccctcatcgccaccaccatgatgaacgaggcgcaggacaccctccgccttcaatacgggagctgggaggcggagttagggaaaaagctcgacgccgcccggggggtccttgacgctgccgctgcccgagaacggcgggcggcggagaccgaggtggcatcccggcggcgcgaagaagcccttgaggcccgtgccatggcgctagaagagcgtgcctgcgccgtggagagggacctggcggatcgcgaggccgtcgttgctattcgggaggtcacactggcggtgcacgaagccgcctgtgccgaagaagagtccgcgctccgcctccgcgaggacgcgctcaccgagcgggagcgagctctcgaggaggccgaggccgcgtcgcaacggctggtggacagcctgtccctccgcgaggctgcgcaagaggaacaagcgcgccgtaatctggaaggtgcccgcgccgagagggccgcgctgaaccagcgggccgctgagctcgaggcgcgggaggagctggacgcgagggcgcgcagctgcggggcggccgcgggcgaaagcgacttaaccgcccgcctcgcagctgccgaacacaccatcgccgatttgcagggcgcgctagactcgtccgccggggaggttgaggccctccgcttggcaggcgaggtagggcccggcatgcttcgggacgccgtctcccgtctagaccgcgccggccggcaggcgggcctctggggcgggcggactgcgaagtacgccgccaaccaggggggcctcgcccagcgcctctcggagatagccgggactctccaacggctccccgaggagctcgagaggacgattaagtcatcctcgagggatctcgcccgaggagcggtggagctcgtactggcgagttaccaagccagggatcccgacttctccccatggacggcgctggacgagttccctcccgggaccgaggatggcgcgcgcacgcaggtccgggacgccgccgaccatattgtccacagcttcgagggttcggcccctcggctcgcgtttgccctcaacttcgacgaggaggacgatgacggcggagtgggcgacagtggcgacgaggctggcgacccgggtgcatcggagtga

SEQ ID NO: 81193 - DNA, 2646 bp, Oryza sativa
  Clone ID: PAT_MRT4530_80744C.1
atggcacggggctccgctctgctcgatggtagcgtgctgccgccttcccgcatcgtgagtgagaggcaggccgggctgccgcgccgcttcatgccggaatcttgcaccggccaggagatagtcacgctgggcgagggacgcccggcaccatgctacctagggcggtccgtcttcttcctcccttttgcaatggcggggctggttccgcctttttcttctttcttcatggatgttctggagttttacgatctccagatggcgcacctcacccccaacgcggtaatgacattggccatcttcgcgcacctgtgcgagatgttcatcggggtgcgcccatcccttcggctgttccggtggttcttcaccgtacagtcggtgtcgccgccgtcggtggttggtggctgctacttccagccgcgggggccggtgctgaaccgctacatcccctgcgtcctccgcaagaagtgggatgactggaagagcgactggttctacaccccccttgccgacgaagcgcgcctccgacttccgagccagcctccggcgcaggcctccagctggcgggcgccggtagatctgggagatggctatgacgccgtcctcgaccgcctggcgggcctgcgatcccaggggctcacaggggccatggtgtacggcgactaccttcgtcgccggattgcgccgctccagcggcgcgcccggggcgcctgggagtacaccggctccgtggaggcatccctcattcctcaaggagtcctccccctctgcagcgatccagaccgcgcctccatcctgaccatcatgcaggcggtcggggcgtcggaggagcgggctcctcgaggccacgatggcgcgggcgggagccgcaggggggaacaatctaccccgggagggggtcgtgcttctgggccccgcgacgggggcccggggagcagccgccctgccgacgcccgggggaagaggaagcaggaaggaacccctcccccatctcctccccgagggggcggggcggcgcgcgtcagcagcaggcgcccggagggagccacgccgacgccgcagcctgagggggagcgaaagaagaagcggctccgcaagatgggggggacagaaccatcccggggaaacctcatttcccctccaaggtggtcgtttaaccgaccccctcgcagcgagatcccgtcgcgtccctcccgccattccaagtccggccagtctgaggccgaggacccggcgaccacagaggcccggaggcgggaatctgaccggcgagaagccgtggatcgccttcgggaagccgaggaggccgctcgggaggccgcccgggctcgccagaccgaggaagccgctcgggaggaggccggactccgccaggccgaggcgacgacatcctccgaggcgacccgtgaaactgaccggcaagaggcagcggatcgccttcgggaagccgaggaagctgcccaggtggccgtccgagctcgtcaagctgaagaaaccgctcgggaggaggccagacttcgccaggccgaggcgacgacgacttccgaggcagctcgcgacgaggccgcgggcacatcgcttgggcccactccctcatgcgacgctcaggacaaaccaggtccgggggacatccccgagtccggcacgtccatcggcgggccaagccgcgcggcatcctctccgaggcggctcttccccacgccttccgttgccccactgagcgcagaacccctcctgcaggccttggccatcgcaaacaccacggtgttggacgggttaagtgcccaggtggaggccctacaagcagagcgggcggagctcgacgccgcatgggtgcgtgtcgaagaggggcgacgctcggtggaggccatggtggaggtgggccgcaaggcacaccgccggcacgtctcagagctcgaagcccgtcggaaggtgctgggggagatcgccaaggaggtggaggaggagcggggggccgccctcatcgccaccaccgtgatgaacgaggcgcaggacaccctccgccttcaatacgggagctgggaggcggagctagggaagaagctcgacgccgcctggggggtccttgacgctgccgctgcccgagaacggcgggcggcggagaccgaggtggcatcccggcggcgcgaagaagcccgtgaggcccgtgccatggcgctggaagagcgtgcctgcgccgtggagagggacctggcggattgcgaggccgccgttgccatccgggaggcaacgctggcggcgcacgaggccgcctgcgccgaagaggagtccgcgctccgcctccgcgaggacgcgctcaccgagcgggagcgagctctcgaggaggccgaggccgcggcgcaacggctggcggacagcctgttcctccgcgaggcagcgcgggaggagcaggcgcgccgtaatctggaaggtgcccgcgccgagagggccgcactgaaccagcgggccgctgagctcgaggcgcgggagaaggagctggacgcgagggcgcgcagcggcggggcggccgcgggcgaaagcgacttagccgcctgcctcgcagctgctgaacacaccatcgccgatctgcagggcgcgctagactcgtcgccggggaggtcgaggccctccgcttggcaggcgaggtag

SEQ ID NO: 81194 - DNA, 366 bp, Oryza sativa
  Clone ID: PAT_MRT4530_80745C.1
atggcgagcaaggatgtgagggagagcaatcggcgtgaagtgctcactggcaaggagatgcccatagcgggcaacggtgacaagaagacgtcatcgccgagggaggttggcagtgcgcgcgagaggggagggacacctccggtgcccgtcaaagcaagcgccctgaaccggtccgcacgtcggtcgagggttctgctcctgccaccccgtcgctgcttctcctccaccgtcgccgccggttaccgccgcggagggggggaggactgggggatgcaggaagaagatgaatttgacatgtgggtcccacgtgcagataaggagatggatgaaaaatgtaacggcagtggcacggtttcaattttgtaa

SEQ ID NO: 81195 - DNA, 3168 bp, Oryza sativa
  Clone ID: PAT_MRT4530_80746C.1
atggcacggggctccgctctgctcgacggtagcgtactaccaccttcccgcattgtgagcgagaggcaggctgggctgccgcgccgcttcatgccggaatctgccaccggccgggagatagtgatgctgggcgaggcgcgcccagcaccagattacccggggcggtccatcttcttcctccccttcgcaatggccgggttggttcctcctttttcttctttctttatggatgttctggagttctacgatctccagatggcgcacctcacccccaacgcagtgatgactttggcaatcttcgcgcacctgtgcgagatgttcattggggtgcgcccatctcttcggctgttccggtggttcttcaccgtgcagtcggtgtcgccgccgtcggtggtcggtggttgctacttccagccgcgggggccggtgttgaaccgctacatcccctgcgccctccgcaagaagtgggacgattggaagagcgactggttctacaccccccttgccaacgaagcgcgcctccgactcccgagccagcccccggtgcaggcctccagctggcgggcgccggtagatctgggggatggctatgacgccgtcctcgaccgcctcgcgggtctgcgatcccaggggctcaccggggccatggtgtacggcgactacctccgtcgtcggattgcgccgctccagcggcgcgctcgggccgcctgggagtacatcgggcccgaagactatatgcggacccaccagggggtcagatgggattgggcccccgaggacttcaagatactgatccaacgggtgctaaatctcaactccgtggaggcgtccctcatcccccacggtatcctccccctctgcagcgacccagatcgcgtctccatcttgaccattatgacggcggtcggggcctcagaggagcaggctcctaagggccatggcggcgcaggtgggagccgccggggggatcaatctacccccggagggggtcgtgcttctaggccccgcgtcgggggctcggggagcaaccgccctaccgacgcccgggggaagaggaaactgggaggaacacctcccccatctcctccccgagggggcggggcggcgcgtgccagcagcaggcgcccggagggggccgcgccaacatcgcagcccgagggggagcgcaagaagaaacggctgcgcaagatgggggagacagaaccatcccagggaaacctaatttcccctccaaggtggtcatttaaccgaccccctcgcagcgatgtcccgtcgcgtccctcccgccatcccaagtccggccaatccgaggccgaagatccggcggccgcagaggaacggaggcgagaatttgaccggcgagaggccgcagatcgccttcgggaagctgaagaggccgcccgggaggccgctcgggctcgccaggccgaggaagccgctcgggaggaggccgcccgagtccgccaagccgaggaaaccgctcgggaggaggccgcccgagcccgccaaactgaggcgatggcgtctttcgaggcagcccacgacaaagctgctggcgcgtcgcttgggcctactccctcgggtgacgctcaggcgacaacctccggggcggcttgcgacaaggccgcgggcgcatcgcctgggcccgctccctcgggcgacgcccaggaccaaacgggtccgggggacatccccgagctcagtgcgtcttctggcgggccgagccgcgtcgcattttctccaaggcggctcttctcctcgttttctgccaccccgctgagtgccgagccccttctgcaagccttggccgccgcaaacaccgcggtgctagatggattcagcgcccaggtggaggccttgcgagcggaacgagcggagctcgaggccgcatgggcgcgcgtcgaggaggggcggcactcggtggacgccatggtggaggtgggccgtaaggctcaccgccgccacatctcggagcttgaagcccgcaaggcggcgctggcggagatcgcccgagaggtggaggaggagcgagaggccgccctcgtcgccaccaccgcgatgattgaggcgcaggactccctccgccttcaacacgggagctgggaggcggagctaaagaaaaagctcgacgccgcccagggggtcctcgacgccgccgctgcccgagagcagcgagcaacggaggctgaagcggcgtcccggcggcgcgaagaggcccttgaagcccgtgccatggcgctggaggatcatgccggcgccgtggagaccagcttggcggaccgcgaggccgccgccgctatccgggaggcgacgctggcggcgcacgaggccgcctgcgccgaagaggagtccgcgctccggctccgcgaggacgcgcttgctgagcgggagcgagctcttgaggagtccgaggccgcgacacaacggctggcggacagcctgtccctccgcgaggcagcgcaggaggagcaggcgcgccgcaatctggaatgcatccgcgccgagagagccgcgctggagcagcaggctgctaacctcgagacgcgagaaaaggagctggatgcgaggaagcgcagcggcggggcggctacgggcgaaagcgacttagtcgcccgcctcgcagctgccgaacacaacgtcgcggacatgcagcgcgccctggactcatccaccggggaagccgaggccctccgcttgtcgggtgagatagggcccggcatgctttgggatgcagtctcccggctggatcgcgccggtcgggaagcgggcctctggaaaggccagacaatttcgcgctccaccaatctggaaggcctcgccccgcaccttaggaggatggcctgggctgtccaacaactccccgaggagctcgagaagaccatcaagtcatcctcgagggacctcgcccaaggagcggtggaactcgtgttagcgagttaccaggccagggaccccggcttctccccatggatggcgctggaggagttccctcccgggaccgaggacgatgcgcgcgcgcgggtccgggatgccgccaaccacatcgtccaaagcttcgaggggtcggcccctcggctcgcgttcgcccccagctccgacgaggagggcgacgccagcggcgaggacgacggtggcgacgaggccagcgacccgggcgcattggaatga

SEQ ID NO: 81196 - DNA, 416 bp, Oryza sativa
  Clone ID: PAT_MRT4530_80747C.1
gggccccaaataaatttatttaggggaaaaaaggtccctttcctttttttttcccatttgggcccccgggaaggggggggaaaaaaaaaaaaaaatttctttaaccttggggccgggaaaaggggcggaaacccgggacccccttcaaagggaaccaaaaaaacctttttacaaaatgggccggccaacccttgttaaaccaaaaaaaaaaagggggccaaacacaaaaaaaaaaactttcggcattgttgaaaggttgaaagggggggagggcccaacagggaaaaatgggggaaaaaaactggggggggggggggggaaccccgggacgggttttctttccaggggggaggcaggcaaagattttctcactggaaaagccaaagattttcccagttccactccccaggggaaaa

SEQ ID NO: 81197 - DNA, 2754 bp, Oryza sativa
  Clone ID: PAT_MRT4530_80748C.1
atggcggggctggtcccgccattctctatttttttcatggatattctggagttttatgatctccagatggcgcacctcacccccaatgcgataatgacgttggccatcttcgcacacctgtgcgagatgtttatcggggtgcgcccatctctccggctgttccggtggttctttaccgtacagccggtgtcgccgccgacggtagtcggtggctgctacttccagccgcgggggcagctgctgaaccactacgctccctacgtcctccgcaaaaagtgggacgactggaagagcgactggttctacacccccctcgccgacgaagcgcgcctccgacttccgagccagcccccggcgcaggcctccagctggcgggcggcggtagatctgggagacggctacgacgccgttcttgaccgcctggcgggtctgcgatcccaggggctcacgggggccatggtgttcggcgactaccttcatcgccggatcgcgccgctccagcggcgcgcccggggcgcctgggagtacaccgggcccaaggactacatgaggacccaccaggggcgcaaatgggactgggaccctgaggacttcaggatggtggtccaacgggtgctgaatctcagctccgtggaggcatccctcatcccccaaggggccctccccctctgctgtgatccagagcgcgccaagatcctggccatcatgcaggtggtcggggcgtcgggggagcgggccccccgaggccacgatggcgcgggcgggagcagcaggggggaacactctaccccgggagggggtcgtgcttctgggccccgcgacgggggcccggggggcagccgccctgccgacgcccgggggaagaggaagcaggagggtacccctcccccatctcctccccgagggggcggggcgcgagatcccgtcgcctcccccccccccccccgccattccaagtccggccggtctgaggccgaggagacggcgaccgcagaggcccggaggcgggaagctgaccggcgagaagccgcggaccgcctccgggaagccgaggaggctgcccaggaggccgtccgggctcgccaggctgaggaggccgctcgggaggaggccagactccgtcgggctggggagtccatccgggaggcagaggcggcgcgcgcacgcgaggcggcctgccaaacccccgacccgactccgcccgaggcgacgatgacttccgaggccacccacgacgaggccgcgggcgcgccgctcgggcccgacccctcgggcgacgcttgggtcgagccagcttcgggggacgcccccgagtccggcacgtcgatcggagggccgagccgcgcggcacccacaccgagggggctctcccctctgccttccgctgccccactgagcgcggagcccctcctgcaggccttggccgccgcgaacatcacggcggagcgggcggagctcgacgcggcgtgggcgcgcgtcgaggaggggcggcgctcggtggaggccatggtggaggtgggccgcatggcacaccgtcggcacgcctcacaactcgaggcccgtcgtagggacctggtggagatcgccagggaggtggaggaggagcgggagactgccctcatcgccaccgccgtgctcgacgaggcgcgggacgacctccgcctccaatacgggagccgggcggcggagctagaggagaagctcgacgccgcccggggagcccttgacgccgccgctgcccaggaacggcaggcggcggagaacgaggcggcgtcccggcagcgcgaagaggcccttgaggctcgcgccacggtgctggaggagcgcgcccgcgccttggacgcgaaggagagagacctggcggaccgcgaggccgccgtcgccacccgggaggcaacactggcggcgcacgaggccgcctgcgccgaagaggagtctgcactccgcctccgcgaggacgcgctcaccgagcgggggcgagctctcgaggaggccgaggccacggcgcagcggctggcggacagtctgttcctccgcgaggcagcgcgggaggagcaggcgcgccgcaatctggaaggcgcccgcgccgagagggccgcactggatcagcgggccgctgagctcgaggcgcgggcgaaggagctggacgcgagagcgcacagcggcggggcggccgtgggccacggcgacctagccgcccgcctcgcagccgccgaacacaccatcgccgagctgcagggcgcgctggactcgtccgccggggaggtcgaggccctccgcttggcgagcgaggtagggcccggcatgcttcgggacgccgtctcccgtctagaccgcgccgggcggcaggcgggcctctggggcgggcggtacgcgaagtacgccgtcaaccaggggggcctcgcccagcgcctctcagagatggctggggccctcgagcggttccccgaggagctcgaggagacgatcaagtcatcctcgagggacctcgcccggggggcggtggagctcgtactggcaagctaccaggccagggaccctgacttctccccgtgggcagcgctggaagagttccctcccggaaccgaggacggcgcgcgcgcgcaggtctgggacgccgccgaccacatcgttcacagcttcgagggtacggcccctcggctcgcgttcgcgctcgactccgacgaggagggcggtgacgacggtgcggacgacagcgacgacgaggccgacgacccgggcgcgtcggagtga

SEQ ID NO: 81198 - DNA, 632 bp, Oryza sativa
  Clone ID: PAT_MRT4530_80749C.1
gtgtaggggcccacctgtcagtatagatggccatgtgggcagcttgtcgggccggcacggtccgaccgacgcaccgggctgtgccgtgccaacccacgtgccgcactcacggcccaggcatggcccaacacgactcgggccgtgccgggccggcccaaaggtagagatggcccatcgccagcccagcatgccggtggggaggcccaggcacggcccggcggtcaggccgggccggcatggacccgacccaagtcgagccatgccgtgcttgggccgagccaaaatgccgtgccgtgggccggtccttcgggcctcgggtgctctccatcgctcccgcgccgtgcaaccacccgccgccgccgtctccgctactccggccgccgctagccgccgctaggctcaccgccgcaccgcgccgtcgccgccgtcgggttcgcgaggttccgaagctcgtcccgccgtcgccatcgtcctccgtcgcccgccgtcgtcgaccgttgtcggtgaggcctctcctcctctttctctctctcccgcactgtttagccgtcgcgccgccgcttagccgcgtagctgccgcttcacctctagccgccgctctccgccgccggtcggtcgccgtcggccgccgt

SEQ ID NO: 81199 - DNA, 618 bp, Oryza sativa
  Clone ID: PAT_MRT4530_8074C.1
atggcggaggacgcgaatgatgaagacgagatgcggattcttgaaggcgagggacaggtggaatatgccatccggttcgggatgaagcagccacgcgccgccggcatcgtccgccgcgactccgccaacgacggccacgagcatgcgaagaggctggaggaggcggggctgatgcaggagctcgctagtgggatgcaggagcccggcatggacgacgccgcggaggcggccgggaaggagaagcagcgcacgccgtcgatgcggcggcggaggaggaggaggacgctggccaccgcgccgcggcaggatccggcagggacgagggggacgacaacgccgacgagaggagaggatctcgtcgggaggagcggggcacggggcacaccgacgccgacgaccaccatgcccgccacctccgcctcctcccaaccgaggcggcgtcttcgccgacctccacgccaccgctgcctcctcccaaccgaggccgtcgcggcctcctccctcctcctcctcctcctcctcctccccgccttcgccttccgccaccgcggccgcccgccgcctctccccgctcgcgcgaagggcttccgccactacttcctggcgttccattcatga

SEQ ID NO: 81200 - DNA, 3087 bp, Oryza sativa
  Clone ID: PAT_MRT4530_80750C.1
atggcacggggctctgctctgctcgacggcagtgtactgccgccttcccgcatcgtgaacgagaggcacgccggactgccgcgccgcttcatgccggagtccgccaccggtcgggagatagtaatgctgggcgaggggcgcccggcaccagactacccggggcggtccatcttcttcctccccttcgcaatggctgggctggtcccgccattttctcatttcttcatggatgtcctggagttctacgatctccagatggcgcacctcacccccaatgcggtgatgacattggccatcttcgcacacctgtgcgagatgttcattggggtgcgcccctctcttcagctgttccggtggttcttcaccgtgcagtcggtgtcaccgccgtcggtggttggcggctgctacttccagccgcgggggccggtgttgaaccgctacatcccctgcgtcctccgcaagaagtgggacgactggaagagcgactggttctacacccccctcgccaacgaagcgcgcctccgacttccaagccagcccccggcgcaggtctccagctggcgggcgccggtagatctgggggaggactacgacgccgtcctcgaccgcctggcgggcctgcgatcccaggggctcaccggggccatggtgtacggcgattacctccgccgtcggattgcgccgctccaacggcgcgcccggagcgcctgggagtacactgggcctgaagactacatgcggacccaccagggagccagatgggattgggctcccgaggacttcaagatcgtagtccaaagggtgctgaatcttagctccgcggaggcgtctcgccttcctcaggagatcctccccctctgcatcgatcccgaccgcgtctccattctaaccattatgttgggggtcggggcctcagaggagagagcccctaagggccacgacggcgcgggcgagcgccgccggggggaacaatctgccccaggagggggtcgtgcttctgggccccgcgtcgggggctcggggagcagccgccctgccgacgcccaggggaagaggaagttgggaggaacacctcccccatctcctccccgagggggcggggcggcgcgtgccagcagtcggcgcccggagggggccgcgccgacgtcgcagcccgagggggagcgcaagaagaaacggctccgcaagacgggggagacggaaccatgccggggaaacctgatttcccctccaaagtggtcattcaaccgaccccttcgcagcgatgtcccgtcgcactcctcccgccaccccaagtccggccagtccgaggccgaagatccggcggccgcagaagagcggaggcgagaagctgaccggcgtgaagccgcagatcgccttcgggaagctgaagaggccgcccgggaggccgcccgggttcgccaagcggaggaagctgctcgggaggaggccgcccgggctgaggaagccgctaaggaggaggccgcccgggctcgccaggctgaggcaacagctgctgctggcgcgtcaactgggcccactccctcgggcaaccctcaggcgacagcctccggggaggctcgcgacgaggccgcgggcacatcgcctgggcctacctcaccgggcgacgcccaggaccaaacgggcccgggggacatccccgagcccagcgcatccttcggggggccaagccgcgtcgcattttctccaaggcggctcttctcctcctcttccgtcgccccggtgagcgccgagcccattatgcaggccttggccgccgcaaacaccgcggtgctagatggatttagcgcccaagtggaggccttgcgagcggaacgagcggagctcgaggccgcatgggcgcgcgtcgaggaggggcggcgctcggtggacgccatggtggaggtgggccgtaaggcccaccgccgccacatctcggagcttgaagcccgcaagacggcgctggcggagatcgcccgagaggtggaggaggagcgagaggccgccctcgtcgccaccaccgcgatgatcgaggcgcaggactccctccgccttcaacacgggagctgggaggcggagttgaagaacaagctcgacgccgcccaaggggttctcgactccgctgctgcccgagagcggcgggcaacggaagccgaagcggcgtcccggcggcgcgaggaggcccttgaggcccgtgccatggcgctggaagaacacgccggcaccgtggagaagggcttcacggaccgcgaggccgccactgctctccgggaggcgacgctggcggcgcacgaggccgcctgcgccgaggaggagtccgcgctccgccttcgcgaggatgcactcgctgagcgggagcgagctctcgaggaggccgaggccacgacgcaacggctggcggacagcctctccctccgggaggcggcgcaagaggagcaggcgcgccgcaaccttgaatgcgtccgtgccgagagagccgcgctggagcagcgggctgccaacctcgaggcacgggagaaagagctggccgcgagggcgcgcatcggtggggcggctgcgggcgaaagcgacttagccgctcgcctcgcggctgccgaacacaccgtcgctgacatgcagcgcgcgctggattcttccatcggggaggccgaggccctccgcttggcgagcgagatggggcccgacatgctttgggactcggtctcccgcatggatcgcgccggtcggcaagcgggcctctggaaaggccagacgaggacgcgccctagcaacctggaaggcctcgctccgcacctcaacaggatggcctgggtcctcgaacgactccccgtggagctcgacaagaccatcaagtcatcctcgagggacctcgcccggggggcggtcgaactcgtgctagcgagttaccaggcccgggaccccgatttctctccctggatggcgctggaggagttccctcccgggaccgaggacgacgcgcgcgcgcgtccgggatgctgccgaccatatcgtcgacggcttcgaggggtcggcccctctgctcgcgttcgcccccagctccgacgaggagggcgacgccagcgatga

SEQ ID NO: 81201 - DNA, 2892 bp, Oryza sativa
  Clone ID: PAT_MRT4530_80751C.1
atggcacgaggctccgctctgctcgatggtagcgtgctgccgccttcctgcatcgtgagcgagaggcaggctgggctgccgcgccgcttcatgccggaatctgccaccggccgggagatagtcacgctgggcgagggacgcccggcgccagactacccggggcggtccgtcttctttctcccctttgcaatggcagggctggttccaccattttcttctttcttcatggatgttctagagttctacgatctccagatggcgcacctcacccccaacgcggtgatgacattggccatcttcgcgcatctgtgcgagatgttcattggggtgcgcccatctcttcggctgttccggtggttcttcaccgtgcagtcggtgtcgccgccatcggtagttggtggctgctacttccagccacgggggccggtgctgaatcgctacatcccctgcgccctccgcaagaagtgggacgactggaagagcgactggttctacacccccctcaccgacgaagcgcgccaccgacttccgagccagcccccggcgcaggcctccagctggcgggcgccggtagatttgagggatggctatgacgccatcctcgaccgtctggcgggcctgcgatcccaggggctcacaggggccatggtgtacggcgactacctccgtcgtcggattgcgccgctccagcggcgcgctcggggcgcttgggagtacaccgggtccgaagacttcatgaggacccaccagggagtgagatgggactgggctcctgaggacttcaagatattggtccaacgggtgctgaatctcaactccgtggaggtgtccttcattccccaaggaatcctccccctctgcagcgatccagaccgcgcctccatcctgaccattatgatggcggtcggggcctcagaggagcgagctccaaagggccacgacggcgcaggcgggagccgcaggggggaacaatctaccccgggagggggtcgtgcttctggcgagatcccgtcgcgtccctcccgccattccaaatccggccagtctgaggccgaggatccggcggccgcagaggcccggaggcgggaatctgaccggcgagaggccgcggatcgcctacgggaagctgaggaggccgcccgggctcgccaggccgaggaaaccgctcgggaggaggccgcccgggcccgccaggccgaggaagccgctcgggagaaagccggatttcgccaggacgaggcgatggcgacttccgaggcagcccgcgacgaggccgcgggcgcgtcgcttgggcccactccctcgggcgacgctcaagcgacaactttcggggcagctggcgacgaggctacgggcacgtcgcttgggcccactccctcgggcgacgctcagggccaaacgggtccggggaacatccccgagtccggcacttccatcggtggcccgagccgcatggcatcctttccaaggcggctcttccccacgccttctatcgccccactgaacgcagagccccttctgcaggccttggccgccgcaaacaccacggtgttggatgggttaagtgcccaggtggaggccctgcaggcagagcgggcggagctcgacgccgcgtgggcgcgtgtcgaagaggggcgatgctcggtggaggccatggtggaggtgggccgtaaggctcaccgccggcacgtctcggagcttgaaacccgtaagaaggtgctggcggagatcgccaaggaagtggaggaggagcggggggctgccctcattgccaccaccgtgatgaacgaggcgcaggacaccctccgccttcaatacgggagctgggaggcggagctagggaagaagctcgacgccgcccaaggggtgcttgacgctgccgctgcccgagaacagcgggcggcggagaccgaagcgacgtcccggcggcgcgaagaggcccttgaggcgcgcgccatggcgctggaagagcgcgcctgcgtcgtggagagcgatctggcggaccgcgaggccgccgtcaccatccgggaagcaacgctggcggcgcacgaggctgcctgcgccgaagaagagctcgcgctccgcctccgcaaggacgcgctcaccgagcgggagcgagctctcgagggggccgaggccgcggcgcaacagctggcggacagcctgtccctccgcgaggcagcgcaggaggagcaggcgcgccataatctggaaggtgcccgcgccgagagggccgcactgaaccaacgggccgctgagctcgaggtgcgggcgaaggagctggacgcgagggcgcgcagcggcggggcggccgcgggcgaaagcgacttagccgcccgcctcgcagctgccgaacacaccatcgccgatctgcagggcgcgctggactcgtccgccggggaggtcgaagccctccgcttggcaggcgaggttgggcccggcatgctttgggacgccgtctcccgcctagattgcgccggtcggcaagtgggcctctggagagggcggaccgtaaagtacgccgccaaccagggaggtctcgcccagcgcctctcgaagatggccggggctctccaacggctccccgaggagctcgagaagacaattaagtcatcctcgagggacctcgcccaaggggcggtggagctcgtcctggcgagttaccaggccagggaccccaatttttctccatggatggcgctggatgagttccctcctgggaccgaggaccgcgcgcgcgcgcaggtctgggatgccgccaaccatatcgtcgacagcttcgagggctcggcccctcggctcgcgttcgcccccaactccgacgaggagggcaatgccggtggtgcagacgacagtgacgacgaggccggcgacccgggcgcatcggattga

SEQ ID NO: 81202 - DNA, 2574 bp, Oryza sativa
  Clone ID: PAT_MRT4530_80752C.1
atggcacggggctccgctttgcttgatggtagcgtgctgccgccttcccgcatcgtgagcgagaggcagggcgggctgccgcgccgcttcatgccggaatctgccaccggccgggagatagttacgctgggcgagggacacccggcgccatgctacccggggcggtccgtcttcttcctcccttttgcaatggcagggctggttccgccattttcttctttcttcatggatgttctgaagttttacgatctccagatggcgcacctcacccccaacgcggtaatgacattggccatcttcgcgcacctgtgcgagatgttcatcggggtgcgcccatcccttcggctgttccggtggttcttcacaatacagtcggtgtcgccgccgtcggtggttggtggctgctacttccagccgcgggggccggtgttgaaccgctacattccctgcgtcctccgcaagaagtgggatgactggaagagcgactggttctacacccccctcgccgacgaagcgcgcctccgacttccgagccagcccccggcgcaggcctccagctggcgggcgccggtagatctgggagatggctatgacgccgtcctcgaccgcctggcgggcctgcgatccctggggctcacaggggccatggtgtacggtgactatcttcgtcgccggatcgcgccactccagcggcgcgcccggggtgcctgggagtacaccgggtccgaggactgtatgaggacccaccggggggtcaaatgggactgggctcctgaggacttcaagatagtggtccaacgggtgctgaatctcagctccgtggaggcatccctcattcctcaaggagtcctccccctctgcagtgatccagaccgcgcctccatcctgaccatcatgcaggcggtcggggcgtcggaggagcgggctcctcgaggccatgatggcgcgggcgggagccgcaggggggaacaatctaccccgggagggggtcgtgcttctgggccccgcgacgggggcccggggagcggccaccctgccgacgcccgggagaagaggaagcaggaaggaacccctcccccatctcctccccgagggggcggggcggcgcgtgccggcagcaggcgcccggagggggccacgccgacgtcgcagcccgagggggagcggaagaagaaacggctccgcaagatgggagggacagaaccatcccggggaaacctcatttcccctccaaggtggtcgtttaaccgaccccctcgcaggttcgtcccacgcccatcgtggccgtattcattccctcaacgcgagttttcactcatccatcttgtttgtcttctgtccggtcagtctgaggccgaggacccggcgaccacagaggcccagaggcgggaatctgaccggcgagaagccgcggatcgccttcgggaagccgagaaggccgcccaggtggccgtccgagctcgccaagctgaagaagccgctcgggaggaggccagacttcgccaggccgaggcggcgacgacttccgaggcagctcgcgacgaggccgcgggcgcatcgcttgggcccactccctcgggcgacgctcaggacaagccaggtccgggggacatccctgagtccggcacgtccatcggcgggccgagccgcgcggcatcctcaccgaggcggctcttccccacgccttccgttgctccactgagcgcagaaccccttctgcaggccttggccgttgcaaacaccacggtgttggacgggttaagtgcccaggtggaggccttgcaagcagagcgggcggagcttgacgccgcatgggcgcgtgtcgaagaggggcgacgctcggtggaggccatggtggaggtgggccgcaaggcacaccgccggcacgtctcagagctcgaaacccgtcggaaggtgctgggggagatcgccaaggaggtggaggaggagcggggggctgccctcatcgccaccaccgtgatgaacgaggcgcaggacaccctccgccttcaatacgggagctgggaggcggagctagggaaaaagctcgacgccgcccggggggtccttgacgctgccgctgcccgagaacggcgggcggcggagaccgaggtggcatcccggcggcgcgaagaaacccttgaggcccgtgccatggcgctggaagagcgtgccagcgccgtggagagggacctggcggatcgcaaggccgccgttgctattcgggaggtcacactggcggtgcacgaagccgcctgtgccgaagaagagtccgcgctccgcctccgcgaggacgcgctcaccgagcgggagcgagctcttgatgaggccgaggccgcggcgcaacggctggcggacagcctgtccctccgcgaggctgcgcaagaggaacaagcgcgccgtaatctggaaggtgcccgcgctgagagggccgcgctgaaccagcgggccgctgagctcgaggcgcgggagaaggagctggacgcgagggcgcgcagcggcggggcggccgcgggcgaaagcgacttaatcgcccgcctcgcagctgccgaacacaccatcgctgatctgtag

SEQ ID NO: 81203 - DNA, 887 bp, Oryza sativa
  Clone ID: PAT_MRT4530_80753C.1
caccatcccacccatcgcctccgccaccggcgagaggaggcggagctgcgcgtggcgatgaaggggtcccactcgcagtcgcaggcccaggcccagtcccaggcgggccggcggcggcggtgcgggtggctgctgccgctcctcgtcggcgcggccttcctcgccgagatcgcgttcctcgggcgggggggcatggcgaataacgccgccgcggtcgagagctggaccacctccttctacgcccgctcctccgcccccgcccgcgacgggaaggcagcggtcgtggtccccggcgcggacgcggacgacgcgcccccgggcggaggtgaggtggtggaggaggacgacggcgacatccggttgtgcgaggagcggcttgagagggaggacggcgtgccgcacgaccgcgacttcgacaaggatcccgtcctcgtcgggggcgccgctaaggattggaataaatgttctgtaggatgtgaatttgggttttcagctactaagacgcctgatgctacttttggaattgccccagatcctactgtagagagtatcctcagatcgatggagtcatctcagtattattcagagaacaacattgctgtggctcgagggagaggttacaaaattgtgatgacaacaagcctttcctcagatgtacctgttggctacttttcatgggctgaatatgatataatggcacctgtgcctccaaaaactgaagaagccctagctgcagcatttatttcaaactgtggtgcacgtaattttcgtttgcaagcccttgagatgcttgagagcttagatgtcaaaattgattcatatggtagttgccatcgtaatcatgatggcaaagttgataaagtggaaactttgaagcgctacaaatt

SEQ ID NO: 81204 - DNA, 2556 bp, Oryza sativa
  Clone ID: PAT_MRT4530_80754C.1
atggcacggggctccgctctgctcgatggtagcgtgctgccgccttcccgcatcgtgagcgagaggcaggctgggctgccgcgccgcttcatgccggaatctgccaccggccgggagatagtcacgctgggtgagggacgcccggcgccagactacccggggcggtccgtcttctttctcccctttgcaatggcagggctggttccgccattttcttctttcttcatggatgttctgaagttctacgatctccagatggcgcacctcacccccaacgcggtgatgacattggccatcttcgcgcatctgtgcgagatgttcattggggtgcgcccatctcttcggctgttccggtggttcttcaccgtgcagtcggtgtcgccgccatcggtagttggtggctgctacttccagccatgggggccggcctccagctggcgggcgccggtagatctgggggatggctatgacgccgtcctcgaccgcctggcgggcctacgatcccaggggctcacaggggccatggtgtacggcgactacctccgtcgtcggattgcgccgctccagcggcgcgctcggggcgcctgggagtacaccgggtccgaagactacatgaggacccaccagggagtcagatgggactgggctcctgaggatttcaagatagtggtccaacgggtgctgaatctcaactccatggaggcgtccctcattccccaaggaatcctccctctctgcagcgatccagaccgcgcctccatcctgaccattatgacggcggtcggggcctcagaggacgagatcccgtcgcgtccctcccgccattccaagtccggccagtctgaggccgaggatccggcggccgcagaggcccggaggcgggaatctgaccggcgagaggccgcggatcgcctacgggaagccgaggaggccgcccaggaggccgcccgggctcgccagggcgaggaaaccgctcgggaggaggccgcccgggcccgccaggccgaggaagccgctcgggaggaggccgcccgagcccaccaggccgaggaagccgctcgggagaaagccggatttcgccaggacgaggcaatggcgacttccgaggcagctcgcgatgaggtcgcgggcgcgtcgcttgagcccgcttcctcgggcgacgctcaggcgacaacttccggggcagctggcgacgaggctgcgggcgcgtcgcttgggcccactccctcaggcgacgcccaggaccaaccaggtctgagggacatccccgagtccggcacttccatcggcggcccgagccgcgtggcatcctctccaaggcggctcttccccacgccttctatcgccccgctgagcgcagagccccttctgcaggccttggccgccgcaaacatcgcggtgttggacgggcttagtgcccaggtggaggccctgcaagcagagtgggcggagctcgacgccgcgtgggcgcgtgtcgaggaggggcggcgctcagtggaggccatggtggaggtgggccgcaaggcacaccgccggcatgtctcggagcttgaagcccgtaagaaggtgttggcggaaatcgccaaggaagtggaggaggagcggggggctgccctcattgccaccagcgtgatgaacgaggcgcaggacaccctccgccttcaatacgggagctgggaggcggagctagggaaaaagctcgacgccgcccagggggtgcttgacgttgccgctgcccgagaacagcgggcgggggagaccgaagcggcgtcccgacggcgcgaagagacccttgaggcgcgcgccatggcgctggaagagcgcgcctgcgtcgtggagagggatctggcggaccgcgaggccgccgtcactatccgggaggcaacactggcggcgcacgagtccgcctgtgccgaagaggagtccgcactccgcctccacgaggacgcgctcaccgagcgggagcgagctctcgaggaggccgaggccgcggcgcaacggctggcggacagcctgtccctccgcgaggcagcgcaggaggagcaggcgcgccgcactctggaatgtgtccgcgccgagaggaccgcactaaaccagcgggccgctgacctcgaggcgcgggagaaggagctggacgcgagggcgcgcagcggcggggcggctgcgggcgaaaacgacttagccgcccgcctcgctgctgccgaacataccatcgccgatctgcagggcacgctaaactcgtccgccggggaggtcgaggccctccgcttggcaggcgaggtagggcccggcatgctttgggacgccgtctcccgcctagatcgcgccggtcggcaggtgggcctctggagagggcggaccgtaaagtacgccgccaaccatggaggcctcgcccagcgcctctcgaagatggccggggctctccaacggctccccgaggagctcgagaagacaattaagtcatcctcgagggacctcgcccaaggagcggtggagctcgtactggcgagttaccaggccagggaccccaatttctccatggatggcgctggatga

SEQ ID NO: 81205 - DNA, 1713 bp, Oryza sativa
  Clone ID: PAT_MRT4530_80755C.1
atgaaggggtcccactcgcagtcgcaggcccaggcccagtcccaggcgggccggcggcggcggtgcgggtggctgctgccgctcctcgtcggcgcggccttcctcgccgagatcgcgttcctcggccgcctcgacatggcgaagaacgccgccgcggtcgagagctggaccacctccttctacgcccgctcctccgcccccgcccgcgacgggaaggcagcggtcgtggtccccggcgcggacgcggacgacgcgcccccgggcggaggtgaggtggtggaggaggacgacggcgacatccggttgtgcgaggagcggcttgagagggaggacggcgtgccgcacgaccgcgacttcgacaaggatcccgtcctcgtcgggggcgccgctaaggtctcgtacctgttctcccgatccgcccctcctcgcgctcttccatttcagttcggagatccgcctccttgtgctcttgcatttgagttaggagagctacttttggactgctcagctcaacaggattggaataaatgttctgtaggatgtgaatttgggttttcagctactaagacgcctgatgctacttttggaattgccccagatcctactgtagagagtatcctcagatcgatggagtcatctcagtattattcagagaacaacattgctgtggctcgagggagaggttacaaaattgtgatgacaacaagcctttcctcagatgtacctgttggctacttttcatgggctgaatatgatataatggcacctgtgcctccaaaaactgaagaagccctagctgcagcatttatttcaaactgtggtgcacgtaattttcgtttgcaagcccttgagatgcttgagagcttagatgtcaaaattgattcatatggtagttgccatcgtaatcatgatggcaaagttgataaagtggaaactttgaagcgctacaaatttagcttggcctttgagaattccaacgaggaagattatgttacagaaaagttttttcaatcgctggtaacaggagctattccagttgtgattggtgctccaaacattcaagagttctctcctggagaaggcgcaatattacacattaaagagcttgatgatgttccttcaattgccaagacaatgaaacatattgcatcaaatcaggaagcctttaatcaatctttgagatggaagtatgatggcccatctgattctttcaaggcccttattgacatggcagcggttcattcatcatgtcgtctttgcatacatgtcgcgacgaagattcatgagaaagaggaaaggacaccaaaatttatgaatcgcccatgtagttgttcaagcaaaagaggaaaggtataccacttgtttgtcagagaaagaggacggttcaagtccagcagcaacaacagagggttcatggatgccgtgatggtgagatgcaggcaatgccaggccagccggtcggaccaattaactatgggtgctttggagtctgctgtgcttgctaaatttagatcgctcaatcatgttcctgtgtggaaggatgaaagaccaccaagtattagaggtggggacgagttgaaggtatacaaaatttatccaatcggccttacacaacgacaggcattataccagttcagatttagagatgacgcagatcttgacaaatacattaaagatcatccatgtgcaaagcttgaagtgatttttgtataa

SEQ ID NO: 81206 - DNA, 3117 bp, Oryza sativa
  Clone ID: PAT_MRT4530_80756C.1
atggcacggggctccgctctgctcgacggtagcgtactaccgccttcccgcattgtgagcgagaggcaggctgggctgccgcgccgcttcatgccggaatccgccaccggccgggagatagtgatgctgggcgaggcgcgcccagcaccagattacccggggcggtccatcttcttcctccccttcgcgatggccgggttggttcctcctttttcttctttctttatggatgttctggagttctacgatctccagatggcgcacctcacccccaacgcagtgatgactttggccatcttcgcgcacctgtgcgagatgttcattggggtgcgcccatctcttcggctgttccggtggttcttcaccgtgcagtcggtgtcgccgccgtcggtggtcggtggttgctacttccagccgcgggggccggtgttgaaccgctacatcccctgcgcccttcgcaagaagtgggacgattggaagagcgactggttctacaccccccttgccaacgaagcgtgcctccgactcccaagccagcccccggcgccggtctccagctggcgggcgccagtagatctgggggatgactatgacgccgtcctcgaccgcctggcgggcctgcgatctcaggggctcacaggggccatggtgtacggcgactacctccgtcgccggattgcgccgcttcagcggcgcgcccggagcgcatgggagtacaccgggtccgaggactacatgaggacccactggggagtcagatgggattgggctcccgatgacttcaagatcgtggtccaaagggtgctgaatctcagctccgtggaggcgtctcttattcctcaaggactcctccccctctgttgcgatccagaccgcgcctccattctgaccatcatgatgggggtcggggcctcagaggaggtggctcctaagggccacgacggcgccggcgggagccgccaggaagaatcaaccccaggagggggccgtgcttctgggccccgcgacgggggctcgggaagcaaccgccctgccgccgcccgggggaagaggaaacagggaggaacaccccccccatctcctccccgagggggcggggcggtgcgtgccagcagcaggcgcccggagggggccgtgccgacatcacagcccgagacggaacgcaagaagaagcggctccgcaagacgggggagacggaaccatcccggggaaacctgatttcccctccaaggtggtcgttcaaccgaccccctcgcagcgatgtcccgtcgcgttcctcccgccatcccaagtccggccaatccgaggccgaagatccggcggccgcagaggaacggaggcgagaatctgaccggcgagaggccgcagatcgccttcgggaagctgaagaggccgcccgggaggccgctcgggttcggcaggcggaggataccgctcgggaggaggccgcccgggctcgccaagccgaagaagctgctcgggaggaggccgcccaggctcgtcaggctgaagaagccattcgggaggtaaccgcccgggctcgccaggctgaggcgatggcgtcttccgaggcggttcacgacaagaccgccggcgcgtcgctcgggcccactccctcgggtgacgctcaggcgacaacctccggggcggctcgcgacaaggccgcgggcgcatctcctgggcccgctccctcgggcgacgcccaggaccaagcgggtccgggggacatccccgagctcagtgcgtcttctggcgggccgagccgcgtcgcattttctccaaggcggctcttctcctcgtcttctgccgccccgctgagtgccgagccccttctgcaagccttggccgccgcaaacaccgcggtgctagatggattcagcgcccaggtgggccgtaaggctcaccgccgccacatctcggagcttgaagcccgcaaggcggcgctggcggagatcgcccgagaggtggaggaggagcgagaggccgccctcatcgccaccaccgcgatgattgaggcgcaggactccctccgccttcaacacgggagctgggaggcggagctaaagaaaaaactcgacgccgcccagggggtccttgacgccgccgctgcccgagagcagcgagcaacggaggctgaagcggcatcccgacggcgcgaagaggcccttgaggcccgtgccatggtgctggaagatcatgccggcgccgtggagaccagcttggcggaccgcgaggccgccgccgctatccgggaggcgacgctggcggcgcacgaggccgcctgcgccgaagaggagtccgcgctccggctccgcgaggacgcgcttgctgagcgggagcgagctcttgaggagtccgaggccgcgacacaatggctggcggacagcctgtccctccgcgaggcagcgcaggaggagcaggcgcgccgcaatctggaatgcgtccgcgccgagagagccgcgctggagcagcgggctgctaacctcgaggcgcgagaaaaggagctggacgcgagggagcgcagcggcggggcggctacgggcgaaagcgacttagtcgcccgcctcgcagctgccgaacacaccgtcgcagacatgcagcgcgccctggactcatccaccggggaagccgaggccctccgcttggcgggcgaaatagggcccggcatgctttgggatgcggtctcccggctggatcgcgccggtcgggaagcgggcctctggaaaggccagacaatttcgcgctccaccaatctggaaggcctcgccccgcaccttaggaggatggcctgggctgtccaacaactccccgaggagctcgagaagaccatcaagtcatcctcgagggacctcgcccaaggagcggtggaactcgtgttagcgagttaccaggccagggaccccggcttctccccatggacggcgctggaggagttccctcccgggaccgaggacgatgcgcgcgcgcgggtccgggatgccgccaaccacatcgtccaaagcttcgaggggtcggcccctcggctcgcgttcgcccccagctccgacgaggagggcgacgccagcggtgaggacgacggtggcgacgaggccggcgacccgggcacattggaatga

SEQ ID NO: 81207 - DNA, 597 bp, Oryza sativa
  Clone ID: PAT_MRT4530_80757C.1
atggatatgctggataccctggcaggatggagacatgagatgaggatgcacatggtgtatgagattcttaccagatatgtcttaccaaggttagcggacaacaaatactcgaagcaatacaaagattttattgtagcctcaagattaattgttcacatccacgctaaaaaggaattggattcaaaacttaagaagcgtggatcccacaaagaaaatgaggttattcaggaagcgatttatactagagcagaagatatgaaggaggcggtaaagcattttgcagtgtcactacatagagagttttgggttgccaagttcaactggtcgcaatatgaagttaggtgtgttaaggaaaaagatgggtgtccctggagagtgcacgtttataagggaaaattggaaggattactggacagtgtcagtggaaccaccaaggagatgtcaatacagagaatgggtagacaccagaagagaatgggtagacaccagaagggttctactccacctagccgtgtggtgcagcttgaactaccagaggaatacagggttactaaagggtggtttgagagaggagagggatcctcacgtaggggttaa

SEQ ID NO: 81208 - DNA, 1734 bp, Oryza sativa
  Clone ID: PAT_MRT4530_80758C.1
atgtcctcgccaccactgggtgtaggcactgtagccggcgatggggtcgacgtccgcgcatcttcacctggcgggcttcgacggattcacgttcacgagggcggcgacatcggcaagctccccgtcgtcgagccgtcctctcgcagtgggcgccgcattgcccccctcgccaaggagccccccagccgcggcgtcgccgagccgtcttctcgctgcgaacgccacctcatcaaggcctccacccgcagccgcgtcgtctccaaccgtagggggcttgctcgtcgtcaagctcgccagaccgcggtccgcgcgcctcccgccgtgttgtgcgtgaacccccgcggggccagcccgcgcccggctgctgctgaggatatggggtcatcaagggatgagctcgtcgccgtctacaagggtggccgaattctgtacctcgcctacttccgtaccttcaaacgtgcagaccatccaggcgtcaccctctcaccgcgactgagcacgacccctgacggcgaccaccatggcgagatcgtctggcctgcaccctcgcgctccttgctcggcggctgcagagcggaaggcgccagccgacacggtgtccatcgccgcggactccgacatccctcaccctcagctcgtcagccacccaacctttaccatctcctggaggattctgtcagtggtctggtagactctacaatagctatgcaaatctttgatcacaagagcaatgataacgagctaaagttctctcaggaagaaaaaaaagatatgattgagtcgtttggtaaactgaaggtgtccaaagtgaggagtgaattcctgaagatggaaaagagctttatgaaactgatagagtcatctgataaggccatagagagacagatagttgattcaatatattccttcgcacaagacaaccaagtagttgttactaaatgcattatgctctgtcatcgtggttggaatacaaagcgctatctgatcccagtagcgaaagtgacaactctgaagttgatccaagttataaccctgaatctgatggggatgacctggaacctggtaattctggtactatccaaggtagcaatgacggtgatgatgatgatggtggtggcggggatgatgaagaagaagatgacgatgaagaggatgatgacgatgaggaggaaaatgaagaggacgatgatgaagaggaggatgaggaagaggacgacaatgaagaggaggacgaggaagaggacgatgaagaggaggacgatgaaagaggaggatgaggactatgacccggtacatgatgatgatgaagatgatgatgatgagtacatgaatggacttgccaacttgccaccacttcctccaggcacagagtactggaacggtgttacagttgtgaaccgtgtttctgccattcgcaatctcaatccccaattccacgtcctgggcttcggtcccaatcttactatccaccagcgagtaaggctgtgggcaactggagatgcaatgggttttgatttccaccctactgagatgctgaggtatgtttggaggatggagttgctgctgaacgggcagaacccagggaacccgttggacgctgtgaatgagcctccagttcctaatcctggtgattacgatgatgagggctggattacagatgaagacatggttggcggcattgcattggatgatctgggtctggacagtagcagcagtgacattggcgatgcttga

SEQ ID NO: 81209 - DNA, 534 bp, Oryza sativa
  Clone ID: PAT_MRT4530_80759C.1
atggccgtggccatcgatcacgatcgaatcgccgccattgatgacgatcgagtcgccgatggatcacgacgcagctggcgaccttcatgctggcttatacctcgatcgatctgcaagaaaaagaaagagagaatccttgatcaatctgcaagaaatacaaaacgagagaaaacgggatggacataccagaatcaatcacctgggaatatccaaataatggtggtgcaaaagccgatcatgtcgatggaatcacgccgccggcactccggcaggcggacaagctgcatgggcttgacgatgatggatttctgctgtgtcgttgtccgctactcgccgccgtggcctgagccatccttgcggccttgccggtggatcgcgcgcatcgccgtcgttgtctgctactcgccgccgtggcccaagccggccacccttgccgatgtatcgcctcgccgtcgcctccaaattgcccttatatcggatcggtctgttgattttctgttcggtttagcactacgtgagaacgagatatttatg

SEQ ID NO: 81210 - DNA, 801 bp, Oryza sativa
  Clone ID: PAT_MRT4530_8075C.1
atgaggaaggaggagctggactacgtgctgatcccgctggggatggcgctcatggtggggtaccacgcatggctgctcctccgcatccgccgccgcccggcgaccaccgtcatcggcgtcaacgccatcaaccgccgcatctgggtccgccacatcatggagcgagatgagaatgagatcgccggagtgacggggttcgggtggatacaggaggcgtcggggaagcacgcggtgctggcggtgcagacgatccggaacaacatcatggcgtcgacgctgctggcgtccacggccatcacgctcagctccctcatcgccatcctcatgtcctccgccggcggcggcggcggcgatgggctcctcccgggcgcgccgctggtggtgggcgccgcgggcgagacggcgctgtcggtgaaattcttcgccatcctggtgtgcttcctggtggcgttcctcctgaacgtgcagtccatccggtactacagccacaccagcaccctcgtgaacgtgccggtgcgcctgatccagcgccgccgccgcccgggcctcgccgtcgactacgtcaccgcgacgctcaaccgcggcagctacttctggtcgctcggcgcgcgcgccttctacttctcctgcccggtcttcctctggctcttcgggcccatccccatgttcgccgcctgcgccgccatggtctgcgcgctctacttcctcgacgtttgcgacgactgggaggaggaacaccaagaccacgacgagcaggatggaagcgggagtgatgagagatcaggagaagcgaaggtctga

SEQ ID NO: 81211 - DNA, 4665 bp, Oryza sativa
  Clone ID: PAT_MRT4530_80760C.1
atgtcgaacaaacaaatattccaagtttaccatggaccaggaaacgtccgttacgggccaactggggtagatctgtcagattttattgtatcagaaaggggaattgatagaccggctgagaggagtgtaccttctataaaaggatggttaatgaggggcttgagagttgatccacagacaagtgacataacaatcaatgttatagtaagtcgggcaactgagggtttttattgggaactaatgccagttcaaaactctcgagtgtggagatggtatttggaaaatgcattgcaacgcgggtggcctctagctttggttccgtttgttcacccgaaggatccaggtgtgcagacgaacatggatgatggcgagggaccaagtgctgaagtaaacgagacttctgtggaggaggtcaacgcacgagaggacgggggcgtagtagctccagtgggcattcaaccaggtggagtggctgacgagggggagactgtcggtgccattgtggatgaaatggagaggaaggattctgacaacgagcgtgtagaggaaggtgattcgtcagatgatgagacggatattaatccagcagaatgggctagtgaggatttttctgggctgatcgtctctgaagaggatagtgtgagatgggagtacaaagaaaatgaggttattcagggagcgatttatagtagagcagaagatatgaaggaggcggtaaaacattttgcagtgtcacttcatagagagttttgggttgccaagtcgaaccggtcgcaatatgaagttcggtgtgttaaggaaaaagattgttgtccctggagagtgcacgcgtataaggggaaatggaaggattattggacagtgtcagttattaccaagcatacatgttttctacctggtgttcagaaataccacaggaacattacatgtgcatttgttgcatctgagatgtatgcgcatgtcatcgataatctcacatatgaaccaaggtcaataatccgacacattgaagagacatacaagtatactattagctatgccaaggcctggagggccaaacagaaaataatagagatgagatttgaaacttacgaagcctcgtatgacaatttgccatgcctgcttggtgttatcgaggaaagaaaccgtaggagctcttacgaagtgaagaaattcccctcaattgaacatcctggcaagagtgtgctgcaaagggcgttcttagctctacatgtatgcaagatggcatttgtgaactgtcgtcctgttctctgcattgatgggacattcttgacaggaaagtatcagggccagatactaacagcaataggggtagatgggaacaatcaggtattgcccttggcatttgcttttgttgagagtgagaataccgacagctggtactggttcctgaaattggttaaaacaaaagttgttggtatgaggctaaatgtatgcctgatacatgataggcacgctggcattctgcgagcgataggagagttgcagtttgggagtatggaacgaggatacctcggtgtttgggaagatgtacagagtaggtggtgcatgcgtcatatgggagctaatttctttaagcaattcaagaacaaggagctcatgaacatgttcaagaggctgtgcaatcagaaccaggagaaaaaattcaatgcgctttggaagagattagatgagttgacagccaaatgcagtgatcagcgtgcagcggctccatcgaccgccgttgctgaccctcctcaagctcttggacctctcccaacggatagtccaacattggttagaagaactggattggagattcggaaattttctcagtggattctgcatgaaccaaaagagaaatgggccaaggcaagtttacaactgggtgatgcgcggtgtccgtggactgccactagttggcatagtggagttcattttacatgggacatgcagaaaaagctagaggagttgcgtaaaaaggccatgaaacatcgagctctagtgcaaggtacccaacagcacaggtttgagatactatgtcaagataaggcaggcaggggtatctaccgcaagagagtgaagcaggagtgtgttctcaaagccgacggcacatgtcattgctcttgtgcaaagccgaagctgctccacagggcatgcacccatgtcattgctgccgcagcggagtgtggcataccagatgtagtatatgtgtcacagtacttcactggggagttcacagagactaacgatgaagtactcaatattcctgacccatcgaagctccgaggcaaggctggaaggaggaggactcatcgcatccgcaacgatatggacgagtcggaggctggtagggtgaagcgttgcagcaaatgcgatgaacatgggcacacctacaagcattgtcctaaagacaaggagaaaccaagtgcggcggaggcaggactatcaggatcagcagcagatggagctcgccctacggagatggcacgtcaggatacacctcagttattggacccggcgatagatcaccgacaccggtctcaccttactgcggtgcagggggctcagcttgggacgttccgggcacggacgtgcggtgagctactcatggttcacgactcctttgtcgagaggctacgtgaggccggcctcctaccgatgtgtcggctggtggaggctgcggccggtgacgcggacccggccagacgatggtctgtggacaggtccctcctagcagctttggtcgatcgatggaggccagagacgcacacttttcacttgccgtgcggtgaggtagcccctaccctacaggacgtatcgtacttgttggggctaccgctcgcgggagacgctgttgggccagtgaccacggctgtggactggcaggacgatctgacggcacgtttcgcactagtacagcgcgcaccgcacctcccactcgagccgttggcacactaccgcaacaccggacctacgaagaggtggctgcttcagttcaccgttgagcagctacaggcggaggccgacgagtactcctacagccgatgtttggaggcgtacttgctctggctttttggctgggtgatgttctgtggcggtcatgggcacgcggtcgacaagggactcgtgcactacgccaggagcatcgccgatgctgcggtaggcgaggtgcctcagtggagctggggttccgcgttgttggcagctctgtaccgtgcactttgtgagtcttgcacgaagacggatcccagcgcgacctttggtaggtgccctctctttctttctatctgggcagctgagaggattgcgatcggccgccctgaggtggaccagcacgcatacgaggagtcactgtacgaggagcgaccagaggtcgactaccctacgatgggtactctgtggtgccgtcgtcagcgccgatgggctcacgtccaggttaggcggtcgtatcctgagtttgttatggagttcgaccgccttctgccgactgacgtcgtgtgggagccctacagtgccgcggctacccaggctcgtgcgccgttgggtctgtccacactctgcaccagggaccaggcgtactggatgactacggttccgatggtcttcgacatctgcgttgagcctcacgcccctttccgcgtgatgtggcagttcggcttccgtcagccctttccagtaccgtttccgaccaccgtcccagctgctgttcactggtactcgcgcaagggtcagcagtcagctggcgactggcccgccaagttggcgacttttgttgaggactggttgctcgcaaccgaggaggtcgtggaccacgagggagagccacacactgaggagtcgtaccaggcctacctacgctggtaccagccacgcacccgtactagggtcaccttcgctcccttggagcagcagccccacgttgcgagcactagagacctatatgccaggcaccgcgaccaggacttcgctcgtgctgtcgacgacatcaaccgggtcgtcgttgacggttcaacgacgatccaacgtttaggcgcggggattccgacgacgttgctcgggcagacgcagctgtacagcggccacccgtaccgactggtccccgtccagctgcgcacgttcctaggccgactccccctccgcacggaggatttcgtgcaccgttcagcaccccgccttcctcggctaggccttctgttgtgccccccacaggccgcccacttctcccaggctgcagggtcagcgtctcaggcagctgtgtcgacctcgcactcaacgcagttctggcagtacaccgggacttcgtcacaggcagccggcacgtcgagtcagggtccaccactggaccatgctgggacctcgtcggaccgcttgttgccttccaccttcctcttcgacatcactgacttcgacttcgcttcaggcttgacagaggacgtcatcggcccctcacagctgggaggcgcaccgccggtgcagacgcaggaccaggcgcaggccactcctccgtgggacactcgtgctacccgtgctgtgccaccggatcgttccacgtgcgagcacaggcccggaggaccaagcgtggtcgcggcgcggggcagggccagtagagcagtcttctctttgtttacttgcttcactttccagtactgtatgcttgtgtaa

SEQ ID NO: 81212 - DNA, 4149 bp, Oryza sativa
  Clone ID: PAT_MRT4530_80761C.1
atggcacggggctccgcaccgctcgacggtagcgtgctgccgccttcccgcatcgtgagcgagaggcaggccgggctgccgcgccgattcatgccggaatctgccaccggccgggaggtggtcgcgctgggcgagggatgcccggcgccacactacccggggtggtccgtcttcttcctctctttcgcaatggcggggctggtcccgccattctctgcttttttcatggatattctggagttttacgatctccagatggcgcacctcacccccaacgcgataatgacgttggccatcttcgcacacctgtgcgagatgtttatcggggtgcgcccatctctccggctgttccggtggttcttcaccgtacagccggtgtcaccgccgtcggtagtcggtggctgctacttccagccgcgggggcaggtgctgaaccgctacattccctgcgtcctccgcaagaagtgggacgactggaagagcgatgggttctacacccccctcgccgacgaagcgcgcctccgacttccgagccagcccccggcgcaggcctccagctggcgggcgacggtagatctgggagacggctacgacgccgttcttgaccgcctggcgggtctgcgatcccaggggctcacgggggccatggtgttcggtgactaccttcgtcgccggatcgcgccgctccagcagcgcgcccggggcgcctgggagtacaccgggctcgaggactacatgaggacccaccaggggcgccaatgggactgggaccctgaggacttcaggatggtggtccaactggtgctgaatctcagctccgtggaggcatccctcatcccccaaggggtcctccccctctgctgcgatccagagcgcgccaacatcctgaccatcatgcaggaggtcggggcgtcgggggaacggaccccccgaggccacgatggcgcgggcgggagccgcaagggggaacaatctaccccgggagggggtcgtgcttctgggccacgtgacgggggcccggggggcagccgccctgccgacgcccgggggaagagaaagcaggagggtacccctcccccatctcctccccgagggggtggggcggtgcgtgccagcagcaggcgcccgaagggtgccgtgccggcgccgcagcccgagggggagcgaaagaagaaacggctccgcaagatgggggggaccgagccattgtcacgcccagaaattcccgaatagaattccaagcagaatgtgcattaaaatccccgtccaggaccggccggggtacacaaatgacaatgttgacattcagatccacgtccatcgtagggtagtcgacctctggtcgctcctcgtacagtgactcctcgtacgcgtgctggtccacctcagggcggccgatcgcaatcctctcagctgcccagatagaaagaaagagagggcacccaccaaaggtcgcgctgggatccgtcttcgtgcaagccgcggcgtcggcgatgctcctggcgtagtgcacgagtcccttgtcgaccgcatgcccgtgaccgccacagaacatcacccagccaaaaagccagagcaagtacgcctccaaacagcggctataggagtactcgtcggcctccgcctgtagctgctcgacctcaccgcacggcaagtgaaaagtgtgtgtctctggcctccatcggtcgaccaaagcttcttggagggacctgtccacagtccatcgtctggccgggtccgcgtcgccggcagcagcctccaccagccgacacatcggtaggaggccggccttacgcagccgcacgtccgtgcccggaacgtcccaagctgagccccctgcaccgcagtaaggtgagaccggtgtcggtgatctatcgccgggtccaacaactgaggtgtatcctgacgtgccattgaagtactgtgacacatatactgcatctggtatgccacactccgctgcggcagcaatgacatgggtgcatggcctgtggagcagcttcggctttgcacaagagcaatgacatgtgccgtcggctttgagaacacactcctgcttcactctcttgcggtagatacccctgcctgccttatcttgacatagtatctcaaacctgtgctgttgggtaccttgcactagagctcgatgtttcatggcctttttacgcaactcctctagctttttctgcatgaaagctccaaacaaaatgctgttgttcagcatagagggaagaactgccgggaaccgatccctacaatacctgcatgtcccatgtaaaatgaactccactatgccaactagtggcagtccacggacaccgcgcatcacccagttgtaaacttctgccaaatttgttgtcattattccatatctagcaccacttgtgtcatacgccttggcccatttctcttttggttcatgcagaatccactgaaaaaatttccgaatctccaatccagttcttctaaccaatgttggactatccgttgggagaggtccaagagcttgaggagggtcagcaacggcggtcgatggagccgctgcacgctgatcactgcatttggctgtcaactcatctaatctcttccaaagctcattaaattttttctcctggttctgattgcacagcctcttgaacatgttcatgagctccttgttcttgaattgcttgaagaaattagctcccatatgacgcatgcaccacctactctgtacatcttcccaaacaccggggtatcctcgttccatactcccaaactgcaactcttctatcgctcgcagaatgccagcgtgcctatcatgtatcaggcacacatttggcctcataccaacaacttttattttaaccaatttcaggaaccagtaccagctgtcggtattttcactctcaacaaaagcaaatgccaagggcaatacctgattgttcccatctacccctattgctgttagtatctggccctgatactttcctgtcaagaatgtcccatcaatgcagagaacaggacgacagttcacgaatgccatcttgcatgcatgtagaactaagaacgccctttgcagcacactcttgctaggatgatcaattgaggggaatttcttcacttcgtaagagctcccagggtttctttcctcgataacaccaagcaggcgtggcaaattgtcatacgaggcttcgtaagttccaaatctcatctctattattttctgtttggccctccaggctttggcatagctaatagtatacttgtatgtctcttcgatgtgtcggattattgaccttggttcatatgtgagattatcgataacatgcgcatacatctcagatgcaacaaatgcacatgtaatgttcctgtggtatttctgaacaccaggtagaaaacatgtatgcttggtaacgactgatactgtccaataatccttccatttccccttatacgcgtgcactctccagggacaaccatctttttccttaaaacaccgaactttatattgcgaccggttcgacttggcaatccaaaactctctatgaagtgacactgcaaaatgttttactgcctcctttatatcttctgctctactataaatcgctccctgaataacctcattttctttgtactcccatctcacactatcctcttcagagacgatcagcccagaaaaatcctcactagcccattctgctggattaatatccgtctcatcatctgacgaatcaccttcctctacacgctcgttgtcagaatcctccctctccatttcatccacaatggcaccgacagtctccccctcgtcggccactccacctggatccttcgggtgaacaaacggaaccaaagctagaggccacccgcgttgcaatgcattttccaaataccatctccacactcgagagttttgaactggcattagttcccaataaaaaccctcagttgcccgacttactataacattgattgttatgtcacttgtctgtggatcaactctgaagcccctcattaaccatccttttatagaaggtacactcctctcagccggtctatcaattcccctttctgatacaataaaatctgacagatctaccctagttggcccgtaacggacgtttcctggtccatggtaaacttggaatatttgtttgttcgacatat

SEQ ID NO: 81213 - DNA, 741 bp, Oryza sativa
  unsure (1)..(741): unsure at all n locations
  Clone ID: PAT_MRT4530_80762C.1
ctgcaggaattcggcacgaggccaaggatatggccagccgccgcgacgtcgcggcgctcgcgctggccatcatgctcgccatggcgtcgacgctgcccggcgccgcggcggcggcggcggccggcgcgtcgccgcgcagggggctgtgggggaaggacatgccggtgaacccgttctgcccgtgggacgccgtcaagttcggcgcgtgcgccggcgtgctgggcgtcgtgggcgtgcaggctggcgcccacctcgggagcaagtgctgcgcgctcgtcgacgggctcgccgcggccgaggcggcggcgtgcttctgcaccaccatcaaggagagcgtgctccggatccccacggagtggaccgtcggcgtcagcgtcctcgtcagcacctgcaagacggagctccctgacggcttcaaatgtgtctgattagatctgcattttagagtaattctacggtctttgagaaggtatcatgaggtacaaaaaatttagtgtaaaatttagtatcttatgatacctcatagtacctaggtaccatgaggtactaaatttacaatagaaaaaatggtaccttgtgatacctcctcaaggaacgtaaaattgctctgcattttataatttcgtttagtgtccaaagtgaagcagnattgtaattcttttgcttacccttgtacaagcttttgcattatccataaaaatgcagtcacttactgcgttcgctaaaaaaaaaaaaaaaaaa

SEQ ID NO: 81214 - DNA, 3897 bp, Oryza sativa
  Clone ID: PAT_MRT4530_80763C.1
atggagagggaggattttgacaacgagcgtgtagaggaaggtgattcgtcagatgaggagacggatattaatccagcagaatgggctagtcaggatttttctgggctgatcgtctctgaagaggatagtgtgagatgggagtacaaagaaaatgaggttattcagggagcgatttatagtagagcagaagatatgaaggaggcggtaaaacattttgcagtgtcacttcatagagagttttgggttgccaagtccaaccggtcgcaatatgaagttcggtgtgttaaggaaaaagatggttgtccctggagagtgcacgcgtacaaggggaaatggaaggattattggacagtgtcagtcgttaccaagcatacatgttttctacctggtgttcagaaataccacaggaacattacatgtgcatttgtcgcatctgagatgtatgcgcatgtcatcgataatctcacatacgaaccaaggtcaataatccgacacatcgaggagacatacaagtatactattagctatgccaaggcctggagggccaaacagaaaataatagagatgagatttggaacatacgaagcctcgtatgacaatttgccacgcctgcttggtgttatcgaggaaagaaaccctaggagctcttacgaagtgaagaaattcccatcaattgaacatcctggcaagagtgtgctgcaaagggcgttcttagctctacatgcatgcaagatggcattcgtgaactgtcgtccagttctctgcattgatgggacattcttgacaggaaagtatcggggccagatactgacagcaataggggtagatgggaacaatcaggtattgcccttggcatttgcttttgttgagagtgagaataccgacagctggtactggttcctgaaattggttaaaacaaaagttgttggtatgaggccaaatgtgtgcctgatacatgataggcacgctggcattctgcgagcgatagaagagtttctgtttgggagcatggaacgaggataccctggtgtttgggacgatgtacagagtaggtggtgcatgcgtcatatgggagctaatttcttcaagcaattcaagaacaaggagctcatgaacatgttcaagaggctgtgcaatcagaaccaggagaaaaaattcaatgagctttggaagagattagatgagttgacagccaaatgcagtaatcagcgtgcagcggctccatcgactgccgttgatgaccctcctcaagctcttggacctctcccaacagatagtccaactttggttagaagaactggattggagattcggaaattttctcagtggattctgcatgaaccaaaagagaaatgggccaaggtgtatgacaccggtggtgctagatatgtaataatgacaacaaatttggcagaagtttacaactgggtgatgcgcggtgtccgtggactgccactagttggcatagtggagttcattttacatgggacatgcagcattttgtttggaactttcatgcagaaaaagctagaggagttgcgtaaaaaggccatgaaacatcgagctctagtgcaaggtacccaacaacataggttcgagatactatgtcaagataaggcaggcaggggtatctaccgcaagagagtgaagcaggagtgtgttctcaaagccgacggcacatgtcattgctcttgttcaaagccgaagctgctccacaggccatgcacccatgtcattgctgccgcagcggagtgtggcataccagatgcagtatatgtgtcgcagtacttcagtaagcaagcaatatatcatacatggagcggcgagatttacgggttcggcatagctggggagttcacagagactaacgatgaagtactcaatattcctgacccatcgaagctccgaggcaaggctggaaggaggaggactcgtcgcatccgcaacaatatggacgagtcggaggctggcaggggggctcagcttgggacgttccgggcacggacgtgcggtgagctactcacggttcacgactcctttgtcgagaggctacgtgaggccggcctcctaccgatgtgtcggctggtggaggctgcggccggcgacgcggacccgcccagacgatggactgtggacaggtccctcctagcagctttggtcgatcgatggaggccagagacgcacacttttcacttgccgtgcggtgagatagcccctaccctacaggaccgcgcaccgcacctcccgctcgagccgttggcacaccaccgcaacaccggacctacgaagaggtggctgcttcaattcaccgttgagcagctacaggcggaggccgacgagtactcctacagccgatgtttggaggcgtacttgctctggctttttggctgggtgatgttctgtggcggtcacgggcacgcggtcgacaagggactcgtgcactacgccaggagcatcgccgacgccgcggtaggcgaggtgcctcagtggagctggggttccgcgttgttggcggctctgtaccgtgcactttgtgagtcttgcatgaagacggatcccagcgcgacctttggtgggtgccctctctttctttctatctgggcagctgagaggattgcgatcggccgccctgaggtggaccagcacgcgtacgaggagtcactgtacgaggagcgaccagaggtcgactaccctacgatgggtactctgtggtgccgtcgtcagcgccgatgggctcacgtccaggttaggcggtcgtatcctgagtttgttatggagttcgaccgccttctgccgactgacgtcgtgtgggagcccaacagtgccgcagctacccaggctcgtgcgccgttgggtctgtccacactctgcaccagggaccaggcgtactggatgactatggttccgatggtattcgacatctgcgttgagcctcacgcccctttctgcgtaatgcggcagttcggcttccgtcagccctttccagtaccgtttccgaccaccgtcccagctgctgttcaccgggtcagcagtcagctggcgactggccccgccaagttggcgacttttgttgaggactggttgctcgcaaccgaggaggtcgtggaccacgagggagagccacacactgaggagtcgtaccaggcctacctacgctggtaccagccacgcacccgtactagggtcaccttcgctcccttggagcagcagccccacgttgcgagcactagagacctctatgccaggcaccgcgaccaggacttcgctcgtgctatgagtaccctgcatcgcaccattcctttatgttttcatgtcgacgacatcaaccgggtcgtcgttgatggttcaacgacgatccaacatttagatgcagggattccgacgacgttgctcgggcagacgcagctgtacagcggccacccgaaccgactggtccccatccagctgcgcacgttcctaggccgagaccccctccgcacggagggtttcgtgcaccgttcagcaccccgccttcctcggctaggccttctgttgtgccccccacaggccgcccacttctcccaggctgcagggtcagcgtctcaggcagctgtgtcgacctcgcactcagcgcagttctggcagtacaccgggacttcgtcacaggcagccggcacgtcgagtcagggtccaccactggaccatgctgggacctcgtcggaccgcttgctgccttccaccttcctcttcgacatcactgacttcgacttcgcttcaggctcgacagaggacgtcatcggcccctcacagttgggaggcgcaccgccggtgcagacgcaggatcaggcgcaggccactcctccgcgggacactcgtgctacccgtgctgtgccaccggatcgtttcacctactcctag

SEQ ID NO: 81215 - DNA, 3549 bp, Oryza sativa
  Clone ID: PAT_MRT4530_80764C.1
atgtcgaacaaacaaatattccaagtttaccatggaccaggaaacgtccgttacgggccaactggggtagatctgtcagattttattgtatcagaaaggggaattgatagaccggctgagaggagtgtaccttctataaaaagatggttaatgaggggcttgagagttgatccacagacaagtgacataacaatcaatgttatagtaagtcgggcaactgagggtttttattgggaactaatgccagttcaaaactctcgagtgtggagatggtatttggaaaatgcattgcaacgcgggtggcctctagctttggttccgtttgttcacccgaaggatccaggtgtgcagatgaacatggatgatggcgagggaccaagtgctgaagtaaacgagacttctgtggaggaggtcaacgcacgagaggacgggggcatagtagctccagtaggcattcaaccaggtagagtggctgacgagggggagactgtcggtgccattgtggatgaaatggagagggaggattctgacaacgagcgtgtagaggaaggtgattcgtcagatgatgagacggatattaatccagcagaatgggctagtgaggatttttctgggctgatcgtctctgaagaggatagtgtgagatgggagtacaaagaaaatgaggttattcagggagcgatttatagtagagcagaagatatgaaggaggcggtaaaacattttgcagtgtcacttcatagagagtttagggttgccaagtcgaaccggtcgcaatatgaagttcggtgtattaaggaaaaagatggttgtccctggagagtgcacgcgtataaggggaaatggaaggattattggacagtgtcagtcgttaccaagcatacatgttttctacctggtgttcagaaataccacaggaacattacttgtgcatttgttgcatctgagatgtatgcgcatgtcatcgataatctcacatatgaaccaaggtcaataatccgacacatcgaagagacatacaagtatactattagctatgccaaggcctggagggccaaacagaaaataatagagatgagatttggaacttacgaagcctcgtatgacaatttgccacgcctgcttggtgttatcgaggaaagaaaccctgggagctcttacgaattgaagaaattcccctcaattgaacatcctagcaagagtgtgctgcaaagggcgttcttagctctacatgcatgcaagatggcattcgtgaactgtcgtcctgttctctgcattgatgggacattcttgacaggaaagtatcggggccagatactaacagcaataggggtagatgggaacaatcaggtattgcccttggcatttgcttttgttgagagtgagaataccgacagctggtactggttcctgaaattggttaaaacaaaagttgttggtatgaggccaaatgtgtgcctgatacatgataggcacgctagcattctgcgagcgatagaagagttgcagtttgggagtatggaacgaggataccccggtgtttgggaagatgtacagagtaggtggtgcatgcgtcatatgggagctaatttcttcaagcaattcaagaacaaggagctcatgaacatgttcaagaggctgtgcaatcagaaccaggagaaaaaattcaatgagctttggaagagattagatgagttgacagccaaatgcagtgatcagcgtgcagcggctccatcgaccgccgttgctgaccctcctcaagctcttggacctctcccaacggatagtccaacattggttagaagaactggattggagattcggaaattttctcagtggattctgcatgaaccaaaagagaaatgggccaaggcgtatgacacaggtggtgctagatatggaataatgacaacaaatttggcagaagtttacaactgggtgatgcgcggtgtccgtggactgccactagttggcatagtagagttcattttatatgggacatgcaggtattttagggatcggttccaggcagttcttccctctatgccgaacaacagcattttgtttggagctttcatgcagaaaaagctaaaggagttgcgtaaaaaggccatgaaacatcgagctctagtgcaaggtacccaacagcacaggtttgagatactatgtcaagataaggcaggcaggggtatataccgcaagagagtgaagcaggagtgtgttctcaaagccgacggcacatgtcattgctcttgtgcaaagccgaagctgctccacaggccatgcacccatgtcattgctgccgcagcggagtgtggcataccagatgcagtatatgtgtcacagtacttcagtaagcaagcaatatatcatacatggagcggcgagatttatgggttcggcatagctagggagttcacagagactaacgatgaagtactcaatattcctgacccatcgaagctccgaggcaaggctggaaggaggaggactcgtcgcatccgcaacgatatggacgagttggaggctggcagggtgaagcgttgcagcaaatgcgatgaacatgggcacacctacaagcattgtcctaaagacaaggagaaaccaagtgtggcggaggcaggactatcaggatcagcagcagatggagctcgccctacgggtatgctgatgtatgtcggacttcgacacggagagccacacactgaggagtcgtaccaggcctacctacgctggtaccagccacgcacccgtactagggtcaccttcgctcccttggagcagcagccccacgttgcgagcactagagacctctacgccaggcaccgcgaccaggacttcgctcgtgttgtcgacgacatcaaccgggtcgtcgttgatggttcaacgacgatccaacgtttaggcgcggggattccggtacccgtagaggagcacctgacaacgtacacgcggatggtggagtcgatgcgctcgattctccgagtgctcacctgtcgtgcagacgacgttgctcgggcagacgcagctgtacagcggccacccgtaccgactggtccccgtccagctgcgcacgttcctaggccgactccccctccgcacggagggtttcgtgcaccgttcagcaccccgccttcctcggctaggccttctgttgtgccccccacaggtttcgcccagttcgctatgacgcaggccgcccacttctcccaggctgcagggtcagcgtcacaggcagccggcacgtcgagtcagggtccaccactggaccatgctgggacctcgtcggaccgcttgctgccttccaccgtgctcttcgacatcactgacttcgacttcgcttcaggctcgacagaggacgtcatcggcccctcacagctgggaggcgcaccgccggtgcagacgcaggaccaggcgcaggccactcctccgcgggacactcgtgctacccgtgctgtgccaccggatcgtttcacctactcccaggaccacgtgcgagcacaggcccggaggaccaagcgtggtcgcggcgcggggcagggccagtag

SEQ ID NO: 81216 - DNA, 3117 bp, Oryza sativa
  Clone ID: PAT_MRT4530_80765C.1
atgtcgaacaaacaaatatttcaagtttaccatggaccaggaaacgtccgttacgggccaactggggtagatctgtcagattttattgtatcagaaaggggaattgatagaccggctgagaggagtgtaccttctataaaaggatggttaatgaggggcttgagagttgatccacagacaagtgacataacaatcaatgttatagtaagtcgggcaactgaaggtttttattgggaactaatgccagttcaaaactctcgagtgtggagatggtatttggaaaatgcattgcaacgcgggtggcctctagctttggttccgtttgttcacccgaaggatccaggtgtgcagatgaacatggatgatggcgagggaccaagtgctgaagtaaatgagacttatgtggaggaggtcaacgcacgagaggacgggggcgtagtagctccagtgggcattcaaccaggtggagtggccgacgagggggagactgttggtgccattgtggatgaaatggagagggaggattctgacaacgagcgtgtagaggaaggtgattcgtcagatgatgagacggatattaatccagcagaatgggctagcgaggatttttctgggctgattgtctctgaagaggatagtgtgagatgggagtacaaagaaaatgaggttattcagggagcaatttatactagagcaaaagatatgaaggaggcggtaaaacattttgcagtgtcacttcatagagaattttgggttgccaagtcgaaccggtcgcaatatgaagttcggtgtgttaagaaaaaagatggttgtccctggagagtgcacgcgtataaggggaaatggaaggattattggacagtatcagtcgttaccaagcatacatgttttctacctggtgttcagaaataccacatgaacattacatgtgcatttgttgcatttgagatgtatgcgcatgtcatcgataatctcacatatgaaccaaggtcaataatccgacacatcgaagagacatacaagtatactattagctatgccaaggcctggagggccaaacagaaaataatagagatgagatttggaacttacgaagcctcgtatgacaatttgccacgcctgcttggtgttatcgaggaaagaaaccctgggagctcttacgaagtgaagaaattcccctcaattgaacatcctggcaagagtgtgctgcaaagggcgttcttagctctacatgcatgcaagatggcattcgtgaactgtcgtcctgttctctgcattgatgggacattcttgacaggaaagtatcggggccagatactaacagcaataggggtagatgggaacaatcaggtattgcccttggcatttgcttttgttgagattgttggtatgaggccaaatgtgtgcctgatacatgataggcacgctggcattctgcgagcgatagaagagttgcagtttgggagtatggaacgaggataccccggtgtttgggaagatgtacagagtaggtggtgcatgcgtcatatgggagctaatttcttcaagcaattcaagaacaaggagctcatgaacatgttcaagaggctgtgcaatcagaaccaggagaaaaaattcaatgagctttggaagagattagatgagttgacagccaaatgcagtgatcagcgtgcagcggctccatcgaccgccgttgctgaccctcctcaagctcttggacctctcccaacggatagtccaacattggctagaagaactggattggagattcggaaattttctcagtggattctgcatgaaccaaaagagaaatgggccaaggcgtatgacacaggtggtgctagatatggaataatgacaacaaatttggcagaagtttacaactgggtgatgcgcggtgtccgtggactgccactagttggcatagtggagttcattttacatgggacatgcaggtattttagggatcggttccaggcagttcttccctctatgccgaacaacagcattttgtttggaactttcatgcagaacaagccagaggagttgcgtaaaaaggccatgaaacatcaagctctagtgcaaggtacccaacagcacaggtttgagatactatgtcaagataaggcaggcaagggtatctaccgcaagagagtgaagcaggagtgtgttctcaaagccgacggcacatgtcattgctcttgttcaaagccgaagctgctccacaggccatgcacccatgtcattgctgccgcagcagagtgtggcataccagatgcagtatatgtgtcacagtacttcagtaagcaagcaatatatcatacatggagcggcgagatttatgggttcggcatagctggggagttcacagagactaacgatgaagtactcaatattcctgacccatcgaagctccgaggcaaggctggaaggaggaggactcgtcgcatccgcaacgatatggacgagtcggaggctggcagggtgaagcgttgcagcaaatgcgatgaacatgggcacacctacaagcattgtcctaaagacaaggagaaatcaagtgcggcgatgaacatggacgacgttgctcgggcagacgcagctgtacagcggccacccgtaccgactggtccctgtccagctgcgcacgttcctaggccgactccccctctgcacggagggtttcgtgcaccgttcagtaccccgccttcctcggctaggccttctgttgtgccccccacaggtttcgcccagttcgctatgacgcaggccgcccacttctcgcaggctgcagggtcagcgtctcaggcagctgcgtcgacctcgcactcagcgcagttctggcagtacaccgggacttcgtcacaggcagccggcacgtcgaatcagggtccaccactggaccatgctaggacctcgtcggaccgcttgctgccttccaccttgctcttcgacatcactgactttgacttcgcttcaggctcgacagaggacgtcatcagcccctcacagctgggaggcgcaccgccggtgcagacgcaggaccaggcgcaggccactcctccgcgggacactcgtgctactcgtgctgtgccaccggatcgtttcacctactcctag

SEQ ID NO: 81217 - DNA, 549 bp, Oryza sativa
  Clone ID: PAT_MRT4530_80766C.1
atggggatgcctagcgtgcaagccgtgttgcgttgcctcccgccgcaaatccggccgcactgtgccaccgctaaccccgctacactgcgttgcctcctgccgttaatctcaccgtcgaggccgccacagccatgtgcgaagcagcaagaagaggaggcaccggcggtacttgatgctagacatctcatactcacaagtattagagctcccccttcccatgccttgacccgcaagcatagcgatgggctagcaaggagcatgacagctttcagcgtcaccggtgtgataatctcaaggtttgcacaaagaactcgacgactctcctatccacttcgtcaactccgagccctccacgccaagaccggccgcctccaccttctagttggtgccccggaccttgtctccctccgcttcgccacctccctttccttcctcctcgcacatgacaacaccgatctcaccaccatagttgactccttccttgccgacccactgattctgatgatccccgatgccctcgccagtctccactctctcttatgcccttaa

SEQ ID NO: 81218 - DNA, 4593 bp, Oryza sativa
  Clone ID: PAT_MRT4530_80767C.1
atgtcgaacaaacaaatattccaagtttaccatggaccaggaaacgtccgttacgggccaactgaggtagatctgtcagattttattgtatcagaaaggggaattgatagaccggctgagaggagtgtaccttccataaaaggatggttaatgaagggcttgagatcacagacaagtgacataacaatcaatgttatagtaagtcgggcaactgagggtttttattgggaactaatgccagttcaaacctctcgagtgtggagatggtatttggaaaatgcattgcaacgcgggtggcctctagctttggttccgtttgttcacccgaaggatccaggtgtgcagatgaacatggatgatggcgagggaccaagtgctgaagtaaacgagacttctgtggaggaggtcaacgcacgagaggacgggggcgtagtagctccagttggcattcaaccaggtggagtggccgacgagggggagactgtcggtgccattgtggatgaaatggagagggaggattctgacaacgagcgtgtagaggaaggtgattcgtcagatgatgagacggatattaatccagcagaatgggctagtgaggatttttctgggctgatcgtctctgaagaggatagtgtgagatgggagtacaaagaaaatgaggttattcagggagtgatttatagtagagcagaagatatgaaggaggcggtaaaacattttgtagtgtcacttcatagagagttttgggttgccaagtcgaaccggtcgcaatatgaagttcggtgtgttaaggaaaaagatggttgtccctggagagtgcacgcgtataaggggaaatggaaggattattggacagtgtcagtcgttaccaagcatacatgttttctacctggtgttcagaaataccacaggaacattacttgtgcatttgttgcatctgagatgtatgcgcatgtcatcgataatctcacatatgaaccaaggtcaataatccgacacatcgaagagacatacaagtatactattagctatggcaaggcctggagggccaaacagaaaataatagagatgagatttggaacttacgaagcctcgtatgacaatttgccacgcctgcttggtgttatcgaggaaagaaaccctgggagctcttacgaagtgaagaaattcccctcaattgaacatcctagcaagagtgtgctgcaaagggcgttcttagctctacatgcatgcaagatggcattcgtgaactgtcgtcctgttctccgcattgatgggacattcttgacaggaaagtatcggggccagatactaacagcaataggggtagatgggaacaatcaggtattgcccttggcatttgcttttgttgagagtgagaataccgacagctggtactggttcctgaaattggttaaaacaaaagttgttggtatgaggccaaatgtgtgcctgatacatgataggcacgctggcattctgcgagcgatagaagagttgcagtttgggagtatggaacgaggataccccggtgtttgggaacatgtacagagtaggtggtgcatgcgtcatatgggagctaatttcttcaagcaattcaagaacaaagagctcatgaacatgttcaagaggctgtgcaatcagaaccaggagaaaaaattcaatgagctttggaagagattagatgagttgacagccaaatgcagtgatcagcgtgcagcggctccatcgaccgccgttgctgaccctcctcaagctcttggacctctcccaacggatagtgcaacattggttagaaaaactgaattggagattcggaaattttctcagtggattctgcatgaaccaaaagagaaatgggccaaggcgtatgacacaggtggtgctagatatggaattatgacaacaaatttggcagaagtttacaactgggtgatgcgcggtgtccgtggactgccactagttggcatagtggagttcattttacatgggacatgcaggtattttagggatcggttccaggcagttcttccctctatgccgaacaatagcattttgtttggagctttcatgcagaaaaagctagaggagttgcgtaaaaaggccatgaaacatcgagctgtagtgcaaggtacccaacagcacaggtttgagatactatgtcaagataaggcaggcaggggtatctaccgcaagagagtgaagcaggagtgtgttctcaaagccgacggcacatgtcattgctcttgtgcaaagccgaagctgctccacaggccatccacccatgtcattgctgctgcagcggagtgtggcataccagatgcagtatatgtgtcacagtacttcagtaagcaagcaatatatcatacatggagcggcgagatttatgggttcggcatagctggggagttcacagagactaacgatgaagtactcaatattcctgacccatcgaagctccgaggcaaggctggaaggaggaggactcgtcgcatccgcaacgatatggacgagtcggaggctggcagggtgaagcgttgcagcaaatgcgatgaacatgggcacacctacaagcattgtcctaaagacaaggagaaaccaagtgcggcggaggcaggactatcaggatcagcagcagatggagctcgccctacggagatggcacgtcaggatacacctcagttgttggacccggcgatagatcaccgacaccggtctcaccttactgcggtgcagggggctcagcttgggacgttccgggcacggacgtgcggtgagctactcacggttcacgactcctttgtcgagaggctacgtgaggccggcctcctaccgatgtgtcggctggtggaggctgcggccggcgacgcggacccggccagacgatggtctgtggacaggtccctcctagcaactttggtcgatcgatggaggccagagacgcacacttttcacttgccgtgcggtgaggtagcccctaccctacaggacgtatcgtatttgttggggctaccgctcgcgggagacgctgttgggccagtgaccacggctgtggattggcaggacgatctgacggcacgtttcgcactagtacagcgcgcaccgcacctcccgctcgagccgttggcacactaccgcaacaccggacctacgaagaggtggctgcttcagttcaccgttgagcagctacaggcggaggccgacgagtactcctacagccgatgtttggaggcgtacttgctctggctttttggctgggtgatgttctgtggcggtcacgggcacgccgtcgacaagggactcgtgcactacaccaggagcatcgccgacgccgcggtaggcgaggtgcctcagtggagctggggttccgcgttgttggcggctctgtaccatgcactttgtgagtcttgcacgaagacggatcccagcgcgacctttggtgggtgccctctctttctttctatctgggcagctgagaggattgcgatcggccgccctgaggtggaccagcacgcgtacgaggagtcactgtacgaggagcgaccagaggtcgactaccctacgatgggtactctgtggtgccgtcgtcagcgccgatgggctcacgtccaggttaggcggtcgtatcctgagtttgttatggagttcgaccgccttctgccgactgacgtcgtgtgggaccctacagtgcagcggctacccaggctcgtgcgccgttggttcggcttccgtcagccctttccagtaccgtttccgaccaccgtcccagctgttgttcaccggtactcgcgcaagggtcagcactcagctggcgattggcccgccaagttggcgacttttgttgagtactggttgctcgcaaccgaggaggtcatggaccacgagggagagccacacactgaggagtcgtaccaggcctacctacgctggtaccagccacgcacccgtactagggtcaccttcgctcccttggagcagcagccccacgttgcgagcactagagacctctatgccaggcaccgcgaccaggacttcgctcgtgctgtcgacgacatcaaccaggtcgtcgttgacggttcaacgacgatccaacgtttaggcgcggggattccagtacccatagaggagcacctgacgacgtacatgcggatggtggagtcgatgcgctcgattctccgagtgctcacctgtcgtgcagacgacgttgctcgggcagacgcagctgtacagcggccacccgtaccgactggtccccatccagctgcgcacattcctaggccgactccccctccgcacggaggtttcgcccagttcgctattacgcaggccgcccacttctcccaggctgcagggtcagcgtctcaggcagctgtgtcgacctcgcactcagcgcagttctggcagtacaccgggacttcgtcacaggcagccggcacgtcgagtcagggtccaccactggaccatgctgggacctcgtcggaccgcttgctgccttccaccttgctcttcaacatcactgacttcgacttcgcttcaggctcgacagaggacgtcattggcccctcacaactgggaggcgcaccgccggtgtag

SEQ ID NO: 81219 - DNA, 186 bp, Oryza sativa
  Clone ID: PAT_MRT4530_80768C.1
gtgttatcattccgccgcgcggttgctgtatctcggtgtctaaaaccctagcaggggaggcacggtgaggagaggagaggagggggaaggacgctgagactactacctccctccaaagtggtgagcatgtacaaaactaccatactgttatgatggagcccatggtggcgatgctactcacggaac

SEQ ID NO: 81220 - DNA, 4580 bp, Oryza sativa
  Clone ID: PAT_MRT4530_80769C.1
atgtcgaacaaacaaatattccgtccgttacgggccaactggggtagatctgtcagattttattgtatcagaaaggggaattgatagaccagctgagaggagtgtaccttctataaaaggatggttaatgaggggcttgagagttgatccacagacaagtgacataacaatcaatgttatagtaagtcgggcaactgagggtttttattgggaactaatgccagttcaaaactctcgagtgtggagatggtatttgaaaaatgcattgcaacgcgggtggcctctagctttggttccgtttgttcacccgaaggatccaggtgtgcagatgaacatggatgatggcgagggaccaagtgctgaagtaaacgagacttctgtggaggaggtcaacgcatgagaggacgggggcgtagtagctccaatgggcattcaacaaggtggagtggccgacgagggggagactgtcggtgccattgtggatgaaatggagagggaggattctgacaacgagcgtgtagaggaaggtgattcgtcagatgatgagatggatattaatccagcagaatgggctagtgaggatttttctgggctgatcgtctctgaagaggatagtgtgagatgggagtacaaagaaaatgaggttattcagggagcgatttatagtagagcagaagatatgaaggaggcggtaaaacattttgcagtgtcacttcatagagagtttagggttgccaagtcgaaccggtcgcaatatgaagttcggtgtgttaaggaaaaagatggttgtccctggagagtgcacgcgtataaggggaaatggaaggattattggacattgtcagtcgttaccaagcatacatgttttttacctggtgttcagaaataccacaggaacattacttgtgcatttgttgcatctgagatgtatgcgcatgtcatcgataatctcacatatgaaccaaggtcaataatccgacacatcgaagagatatacaagtatactattagctatgccaaggcctggagggccaaacagaaaataatagagatgagatttggaacttacgaagcctcatatgacaatttgccacgcctgcttggtgttatcgaggaaagaaaccctgggagctcttacgaattgaagaaattcccctcaattgaacatcctagcaagagtgtgctgcaaagggccttcttagctctacatgcatgcaagatggcattcgtgaactgtcgtcctgttctctgcattgatgggacattcttgacaggaaagtatcggggccagataccaacagcaataggggtagatgggaacaatcaggtattgctcttggcatttgcttttgttgagagtgagaataccgacagctggtactggttcctgaaattggttaaaacaaaagttgttggtatgaggccaaatgtgtgcctgatacatgataggcacgctggcattctgcgagcgatagaagagttgcagtttgggagtatggaacgaggataccccggtgtttgggaagatgtacagagtaggtggtgcatgcgtcatatgggagctaatttcttcaagcaattcaagaacaaggagctcatgaacatgttcaagaggctgtgcaatcagaaccaagagagaaaattcaatgagctttggaagagattagatgagttgacagccaaatgcagtgttcagtgtgcagcggctccatcgaccgccgttgctgacccccctcaagctcttggatctctcccaacggatagtccaacattggttagaagaactggattggagattcggaaattttctcagtggattctgcatgaaccaaaagagaaatgggccaaggcgtatgacacaggtggtgctagatatggaataatgacaacaaatttggcagaagtttacaactgggtgatgcgcggtgtccgtggactgccactagttggcatagtggagttcattttacatgggacatgcaggtattttagggatcggttccaggcagttcttccctctatgccgaacaacagcattttgtttggagctttcatgcagaaaaagctagaggagttgcgtaaaaaggccatgaaacatcgagctgtagtgcaaggtacccaacagcacaggtttgagatactatgtcaagataaggcaggcaggggtatctaccgcaagagagtgaagcaggagtgtgttctcaaagccgacggcacatgtcattgctcttgtgcaaagccgaagctgctccacaggccatgcagccatgtcattgctgccgcagcggagtgtggcataccagatacagtatatgtgtcacagtacttcagtaagcaagcaatatatcatacatggagcggcgagatttatgggttcggcatagctggggagttcacagagactaacgatgaagtactcaatattcctgacccatcgaagctccgaggcagggctggaaggaggaggactcgtcgcatccgcaacgatatggacgagtcggaggctggcagggtgaagcgttgcagcaaatgcgatgaacatgggcacacctacaagcattgtcctaaagacaaggagaaaccaagtgcggcggaggcaggactatcaggatcagcagcagatggagctcgccctacggagatggcacgtcaggatacacctcagttgttggacccggcgatagatcaccgacaccggtctcaccttactgcggtgcagggggctcagcttgggacgttctgggcacggacgtgcggtgagctactcacggttcacgactcctttgtcgagaggctacgtgaggccggcctcctaccgatgtgtcggctggtggaggctgcggccggcgacgcgaacccggctagacgatggactgtggacaggtccctcctagcagctttggtcgatcgatggaggccaaagacgcacacttttcacttgccgtgcagtgaggtagcccctaccctacaggacgtatcgtacttgttggggctaccgctcgcgggagacgctgttgggccagtgaccacggctgtggactggcaggatgatctgacggcacgtttcgcactagtacaacgcgcaccgcacttcccgctcaagctgttggcacaccaccgcaacactggacctacgaagaggtggttgcttcagttcaccgttgagcagctacaggcggaggccgacgagtactcctacagccgatgtttggaggcgtacttgctctggctttttggctgggtgatgttctgtggccgtcacgggcacgcggtcgacaagggactcgtgcactacgccaggagcatcgccgacgccgcggtaggcgaggtgcctcagtggagctggggttccgcgttgttggcggctctgtaccatgcactttgtgagtcttgcacgaagacggatcccagcgcgacctttggtgggtgccctctctttctttctatctaggcagctgagaggattgcgatcggccgccctgaggtggaccagcacgcgtacgaggagtcactgtacgaggagcgaccagaggtcgactaccctacgatgggtactctgtggtgccgtcgtcagcgccgatgggctcacgtccagattaggcggtcgtatcctgagtttgttatggagttcgaccgccttctgccgactgacgtcgtgtgggagccctacagtgccgcggctacccaggctcgtgcgccattggttcggcttccgtcagccctttccagtaccgtttccgaccaccgtcccagctgctgttcaccggtactcgcgcaagggtcagcagtcagctggcgactggcccgccaagttggcgacttttgttgaggactagttactcgcaaccgaggaggtcgtggaccacgagggagagccacacactgaggagtcgtaccaggcctacctacgctggtaccagccacacacccgtactagggtcaccttcgctcccttggagcagcagccccacgttgcgagcactagagacctctatgccaggcaccgcgaccaggacttcgctcgtgctgttgacgacatcaaccgggtcgtcgttgacggttcaacgacgatccaacgtttaggcgcggggattccagtacccgtagaggagcacctgacgacgtacacgcggatggtggagtcgatgcgctcgattctccgagtgctcacctgtcgtgcagacgacgttgctcgggcagacgcagctgtacagcggccacccgtaccgactggtccccgtccagctgcgcacgttcctaggccgactccccctccgcacggaggtaagtatttttattactatttctgtacatgcctcgcacatataagtgagccgtttcacttgccgagtttcacccagttcgctatgacgcaggccgcccacttctcccaggctgcagggtgagcgtcacaggcagccggcacgtcgagtcagggtccaccactggaccatgcttggacctcgtcggaccgcttgctgccttccaccgtgctcttcgacatcactgacttcgacttcgcttcaggctcgacagaggacgtcattggcccctcacagctgggaggcgcaccgcaggtg

SEQ ID NO: 81221 - DNA, 640 bp, Oryza sativa
  unsure (1)..(640): unsure at all n locations
  Clone ID: PAT_MRT4530_8076C.1
gtgcccgtttcgcctcgatccacattctccgtgttgtcgagcttgagaagaccgatgacatcaagcgcccttacatcaagcagctcacccaccaagggccttancctttccccctcccccaccgcgtccccaagatcaacaacaagaagatctttcagcgcgaggcgcccgtcgactttcgcttgagcggttgggtgattaccagggtttggagtgttttgcgggtgttctttacgggtccacggtcatggtcggttctcagcatttgctctttaggaagggcagcaatgaacgaagaataaacttcagcatggtctttcttcctagtcggacggcgcccctgggtttgaatcaggcggaagccggtccgcatttcagtgatttggagtttctctgggacaggagcaatggattcaaaaaaaagtgccaaattccatcttgtgccactgggttgttgcggtgcgtaggatgcttttagctacctaccttacctaacttgacttgcggtccagcaaggaagaatgagaccatgttcggtacggaaaaaaaaaaaaaaaaaaaaagactacttctttgaaatcaatgataaacgacacgatccactgtggctactgaggctaccaaaaaaaaaaaaaaaaaa

SEQ ID NO: 81222 - DNA, 3489 bp, Oryza sativa
  Clone ID: PAT_MRT4530_80770C.1
atgtcgaacaaaccaatattccaagtttaccatggaccaggaaacgtccgttacgggccaactggggtagatctgtcagattttattgtatcagaaagggaaattgagagaccggctgagaggagtgtaccttctataaaaggatggttaatgaggggcttgagagttgatccacagacaagtgacataacaatcaatgttgtagtaagtcgggcaactgagggtttttattgggaactaattccagttcaaaactctcaagtgtggagatggtatgtggaaaatgcaatgcaacgtgggtggcctctagctttggttccgtttgtgcacccgaaggatccaggtgtgcagatgaacatggatgatggcgagggaccaagtgctgaagtaaatgagacttctgtggaggaggtcaacgcaggagaggataggggcgtagtagctcctgtgggcattcaaccaggtggagtggccgacgaggggaagactgtcgcagccattgtggatgaaatggagagggaggattctgataacgagcgtgtagaggaaggtgattcgtcagatgaggagacggatattaatccagcagaatgggctagtcaggatttttctgggctgatcgtctctaaagaggatagtgtgagatgggagtacaaagaaaatgaggttattcagggagcgatttatagtagagcagaagatatgaaggaggcggtaaaacattttgcagtgtcacttcatagagagttttcggttgccaagtccaatcggtcgcaatatgaagttcagtgtgttaaggaaaaagatggttgtccctggagagtgcacgcgtataaggggaaatggaaggattattggacagtgtcagtcgttaccaagcatacatgttttttacctggtgttcagaaataccacaggaacattacatgtgcatttgttgcatctgagatgtatgcgcatgtcatcgataatctcacatatgaaccaaggtcaataatccgacacatcgaggagacatacaagtatactattagctatgccaaggcctggagggccaaacataaaataatagagatgagatttggaacatacgaagcctcgtatgacaatttgccacgcctgcttggtgttatcgagggaagaaaccctgggagctcttacgaagtgaagaaattcccatcaattgaacatcctggcaagagtgtgctgcaaagggcgttcttagctctacatgcatgcaagatggcattcgtgaactgtcgtccagttctctgcattgatgggacattcttgacaggaaagtatcggggccagatattgacagcaataggggtagatgggaacaatcaggtattgcccttggcatttgcttttgttgagagtgagaataccgacagctggcacgctggcattctgcgagtgatagaagagttgcagtttgggagcatggaaccaggataccctggtgtttgggacgatgtacaaagtaggtggtgcatgtgtcatatgggagctaatttcttcaagcaattcaagaacaaggagctcatgaacatgttcaagaggctgtgcaatcagaaccaggagaaaaaattcaatgagctttggaagagattagatgagttgacagccaaatgcagtgatcagcgtgcagcggctccatctaccgccgttgatgaccctcctcaatctcttggacgtctcccaacggatagtccaactttggttagaagaactggattggagattcggaaattttctcagtggattctgcatgaaccaaaagagaaatgggccaaggcgtatgacacaggtggtgctagatatggaataatgacaacaaatttggcagaagtttacaactgggtgatgcgcggtgtccgtggactgccactagttggcatagtggagttcattttacatgggacatgcaggtatcttagggatcggttccaggcagttcttccctctatgccgaacaacagcattttgtttggaactttcatgcagaaaaagctagaggagttgcgtaaaaaggccatgaaacatcgagctctagtgcaaggtacccaacaacacaggtttgagatattatgtcaagataaggcaggcaggggtatctaccgcaagagagtgaagcaggagtgtgttctgaaagccgacggcacatgtcattgctcttgttcaaagccgaagctgctccacaggccatgcacccatgtcattgctgccgcagcggagtgtggcataccagatgcagtatatgtgtcacagtactttagtaagcaagcaatatatcatacatggagcggcgagatttatgggttcggcatagctggggagttcacagagactaacgatgaagtactcaatattcctgacccatcgaagctccgaggcaaggctggaaggaggaggactcgtcgcatctgcaacgatatggacgagtcggaggctggcagggtgaagcattgcagcaaatgcgatgaacgtgggcacacctacaagcattgtcctaaagacaaggagaaaccaaagatggcacgtcaggatacacctcagctgttggacccggcgatagatcagcgacaccggtctcaccttactgcggtgcagggggctcagcttgggacgttccgggcacggacgtgcggtgagctactcacggttcacgactcctttgtcgagaggctgcgtgaggccggcctcctaccgatgtgtcggctggtggaggctgccgccggccacgtggacccggccagacgatggactgtggacaagtccctcctagcagctttggttgaccgatggaggccagagacgcacacttttcacttgctatgcggtgaggtggacgacatcaaccgggtcgtcgttgacggttcaacgacgagccaacgtttagacgcggggattccgacgacgttgctcgggcagacacagctgtacagcggccacccgtaccgactggtccccgtccagctgcgcacgttcctaggccgactccccctccgcacagagcttacaaggtcccgttgtcgatgtgtaggtttcgcccagttcgctatgacgcaggccgcccacttctcccaggctgcagggtcagcgtctcaggcagctgcgtcgacctcgcactcagcgcagttccagcagtacaccgggacttcgtcacaggcagccggcacgtcgagtcagggtccaccactggaccatgctgggacctcgtcggactgcttgctgtcttccaccgtgctcttcgacatcactgacttcgacttcgcttcaggctcggcagaggacgtcatcggcccctcacagctgggaggcgcaccgccggtgcagacgcaggaccaggcgcaggccactcctccgccagacactcgtgctacccgtgctgtgccaccggatcgtttcacctactcccaggaccacgtgcgagcacaggcccggaggaccaagcgtggtcgcggcgcggggcaggggcagtag

SEQ ID NO: 81223 - DNA, 4264 bp, Oryza sativa
  Clone ID: PAT_MRT4530_80771C.1
atgtcgaacaaacaaatattccgttacgggccaactggggtagatctgtcagattttattgtatcagaaaggggaattgatagaccggctgagaggagtgtaccttctataaaaggatggttaatgaggggcttgagagttgatccacagacaagtgacataacaatgaatgttatagtaagtcgggcaactgagggtttttattgggaactaatgccagttcaaaactctcgagtgtggagatggtatttggaaaatgcattgcaacgcgggtggcctctagctttggttccgtttgttcacccgaaggatccaggtgtgcagatgaacatggatgatggcgagggaccaagtgctgaagtaaacgagacttctgtggaggaggtcaacgcacgagaggacgggggcgtagtagctccagtgggcattcaaccaggtggagtggccgacgagggggagactgttggtgccattgtggatgaaatggagagggaggattctgacaacgagcgtgtagaggaaggtgattcgtcagatgatgagacggatattaatccagcagaatgggctagtgaggatttttctgggctgattgtctctgaagaggatagtgtgagatgggagtacaaagaaaatgaggttattcagggagcgatttatagtagagcagaagatatgaaggaggcggtaaaacattttgcagtgtcacttcatagagagtttagggttgccaagtcgaactggtcgcaatatgaagttcggtgtgttaaggaaaaagatggttgtccctggagagtgcacgcgtataaggggaaatggaaggattattggacagtgtcagtcgttaccaagcatacatgttttctacctggtgttcagaaataccacaggaacattacttgtgcatttgttgcatctgagatgtatgcgcatgtcatcgataatctcacatatgaaccaaggtcaataatccgacacatcgaagagacatacaagtatactattagctatgccaaggcctggagggccaaacagaaaataatagagatgagatttggaacttacgaagcctcgtatgacaatttgccacgcctgcttggtgttatcgaggaaagaaaccctgggagctcttacgaattgaagaaattcccctcaattgaacatcctagcaagagtgtgctgcaaagggcgttcttagctctacatgcatgcaagatggtattcgtgaactgtcgtcctgttctctgcattgatgggacattcttgacaggaaagtatcggggccagatactaacagcaataggggtagatgggaacaatcaggtattgcccttggcatttgcttttgttgagagtgagaataccgacagctggtactggttcctgaaattggttaaaacaaaagttgttggtatgaggccaaatgtgtgcctgatacatgataggcacgctggcattctgcgagcgatagaagagttgcagtttgggagtatggaacgaggataccccagtgtttgggaagatgtacagagtaggtggtgcatgcgtcatatgggagctaatttcttcaagcaattcaagaacaaggagctcatgaacatgttcaagaggctgtgcaatcagaaccatgagaaaaaattcaatgagctttggaagaaattagatgagttgacagccaaatgcagtgatcagcgtgcagcggctccatcgaccgccgttgctgaccctcaagctcttggacctctcccaacggatagtccaacattgaaaaagctagaggagttgcgtaaaaaggccatgaaacatcgagctctagtgcaaggtacccaacagcacaggtttgagatactatgtcaagataaggcaggtaggggtatctaccgcaagagagtgaagcaggagtgtgttctcaaagccgacggcacatgtcattgctcttgtgcaaagccgaagctgctccacaggccatgcagccatgtcattgctgccgcagcggagtgtggcataccagatgcagtatatgtgtcacagtacttcagtaagcaagcaatatatcatacatggagcggcgagatttatgggttcggcatagctggggagttcacagagactaacgatgaagtactcaatattcctgacccatcgaagctccgaggcaaggctggaaggaggaggactcatcgcatccgcaacgatatggacgagtcggaggctggcagggtgaagcgttgcagcaaatgcgatgaacatgggcacacctacaagcattgtcctaaagacaaggagaaaccatgtgcggcggaggcaggactatcaggatcagcagcagatggagctcgccctacgggtgaaggcactacctccactcgaccacgtcctagagatggcatgtcaggatacacctcagttgttggacccggcgatagatcaccgacaccggtctcaccttactgcggtgcagggggctcagcttgggacgttccgggcacggacgtgcggtgagctacttacggttcacgactcctttgtcgagaggtacgaacagtgtattactataacttagttgcgctgtactaatttttataatgacatattaatttgttattacaggctgcgtgaggccagagacgcacacttttcacttgccgtgcggtgaggtagcccctaccctacaggacgtatcgtacttgttggggctaccgctcgcgggagacgctgttgggccagtgaccgcgggtgtggactggcaagacgatctgacggcatgtttcgcactagtacagcgcgcaccgcatctcccgctcgagccgttggcacaccaccgcaacaccggacctacgaagaggtgactgcttcagttcaccgtcgagcagctacaggcagaggccgacgagtactcctacagccgctgtttggaggcgtacttgctctggctttttggctgagtgatgttctgtggcggtcacgggcacgcggtcgacaagggactcgtgcactaggccaggagcatcgccgacgccgcggtaggcgaggtgcctcagtggagctggggttccgcgttgttggcggctctgtatcgtggcctttgtgaggcttgcacgaagacggatcctagcgcgacctttggtgggtgccctctctttcttcctatctggacagctgagaggattgcgatcggtctgaggtggaccagcacgcgtacgaggagtcactgtacgcggagcgaccagaggtcaactaccctacgatcggtactctgtggtgccgtcgtcagcaccgatgggctcacgtccaggttaggcggtcgtatcctgagtttgttatggagttcgaccgccttctgccgattgacgtcgtgtgggagccctacagtgtcgcggctacccaggctcgtgcgccgttggttcggcttccgtcagccctttccagtaccgtttccgacgaccgtcccagctgttgttcaccggtactcgcgcaagggtcagcagtcagctggcgactggcccgccaagttggcgacttttgttgaggactggttgctcgcaaccgaggaggtcgtggaccacgagggagagccacacactgaggaggcgtaccaggcctacctacgctggtaccagccacgcacccgtactagggtcaccttcgctcccttggagcagcagccccacgttgtgagcactagagacctctacgccaggcaccgggaccaggacttcgctcgtgctgtcgacgacatcaaccgggtcgtcgttgacggttcaacgacgatccaacgtttaggcgcggggattccggtacccgtagaggagcacctgacgacgtacacgcagatggtggagtcgatgcgctcgattctccgagtgctcacctgtcgtgcagacgacgttgctcgggcagacgtagctgtacagcggccacccgtaccgactggtccccgtccagctgcgcacgttcctaggccgactccccctccgcacggaggtttcgcccagttcgctatgacgcaggccgcccacttctcccaggctgcagggtcagcgtctcaggcagctgcatcgacctcgcactcagcgcagttctggcagtacaccgggactttgtcacaggcagccggcacgtcgagtcagggtccaccactggaccatgctgggacctcgtcggaccgcttggtgccttccaccttgctcttcgacatcactgacttcgacttcgcttcaggctcgacagaggagcgtggtcgcgacgcggggcagggccagta

SEQ ID NO: 81224 - DNA, 477 bp, Oryza sativa
  Clone ID: PAT_MRT4530_80772C.1
atggggtatcttacaattgctgaagtttggtcaagttacccagttcttctggaagacttcctcactgctgccaccttccagtcggatcacgtcgttgctctactcgtcgccgctctacttgtcgccttcgcccactgtcaccttcgccgggtgcgcaaggaggaggcgcatttcatctgccggtcctccatcaccctatactgccagaacaccgctattgacgatgacccgagctacaccgtcatttccacctcgtcgccttcaccgtccgtcgtcgcaacgcctctcgatgagttcggctcgtcacactcaacctctcggtaccctccgttcatgctgccgtgcctgattcgccggcgatctttgggttccgagcaggtcgtcgccggtgaggacaaatttgatcaaccaatggaagtctatccagaagataccgaattcaaaaaggattgtgaagaccatggcatggcatattaa

SEQ ID NO: 81225 - DNA, 3750 bp, Oryza sativa
  Clone ID: PAT_MRT4530_80773C.1
ctacctcccttcggagaggccagtgatggtgccatcgctcaccactgattggcaatatgcaacgggtgagcccacctgacgattctgcaccatgtccattggcgccaactcaggaaatggcaagtcatggttaagatactgcatgacatgccacatgcttggccttgcagcaggtgattggtgtgagcaaagcaatcctagtttcaaagctaggaatgcttcatcagcatcatactcattttggagctttggatccattgcctcaagaagtgatctctcgttccaacaatcaatcacccagtctactaatttgagctgatcactattcatcttgtgttcaatgggtcttcgtccacaagtaacctcaagaacaaatatgccaaaggcgaacacgtcagttaggggtgaagccttaccattttgtaacaactcaggggcaagatatcctatagttccaaccaggcgtgttgtttgcatgtcagtgccatggtcatataatcttgcaaggccaaaatcacctaagcatgcattcatctcttcatcaagaagcacattactggctttgatgtctctgtggatgacaacttgctcccactctccatgaaggtaccataaaccagatgcaacacccttgattattcgaaaccgttgaatccagtctagaataggacggttactatgaccatacaaataattatcaaggctaccatttggcatatagtcgtaaaccaaaagaagttcacctttacgccggcaatagccaagtagctgcacaatattccggtgtcgaaggcggccgatgctaacaacctcagcaacaaattcccttatgccttgtctcgactcatgggacaccctcttcactgcaatttgtgacttagacttggaaagaagacccttgtacacccttccaaatcctccagtgcccaagagatgactattcttaaacccttcggtggctaaatataggtccttaaatgagaacctatgcggtccaaactcaatttcccaatcttctcgcaactcagcatacctcagccttcttctcacaaagaagaagatggccaagatcaccaaaaagacaaatgtgggagttgctagaggagaaattagtggcagcaagatgagctgagtagcttttccatctacacgagctttaggtagatttggtagatgagctgtgaagaaaggtggggctagtccattcatactaaagctccagcctaggatatagtgcctcgattctatttgacctgttgcagctgataaaccaacgtatgcaacgtttgtgagcacggctgagaggttataggacattgacaggagtgtcttggtgggtctggccattttgaatggagctaaagccacatcaatccatgttgcctctccatcgtagttgatccaaatttgcatggcctcgccactaatcagactcaagtttcggaaggaaccagtgatgtcatcgtagtagcctgcagaagaagatgttgccgagtgaagatcgcagatgtcgatgccgacatggttgccatctatgtccataaactcgttgttttgtgcagtgtcgatctcaacagcaaaaacatggttgctcaagttgccgttgttatctacccaaacttgcattggtttatctccaatgaggctcacatttgtgagcgcgccattgttgtcattatagaagccggcataagaggatcttactgagttgagactgttgatatcaatcccgacatgattattgtcgatgtctccgaactcatcattcctaatggtatcaagctcaattgcaaagaggtgattggtcgaactgccattgtttatatcattaagaagacccaaaaattggattggaaaggcagtggagaaatcattgcttggggcaatgaagaaagcaaatccatggcctcttatatcaccaaatgaagagagaataccaaatacaaaggagacagagaaagattgcaccgtgccattgggggacttgcggaagcgtagcggagctgggtgagatgcatggcctttgatccggaatgaatcgtttgtcagcccaagaaggccggtggctgtgatttttgctgcaccatctagagtcagattgctaccggtgaagccggtgtagatgaattggtcatgatctccactagcactgatggctgaaaggctaatgcttatggtaaggaagaggatgactggcgaagtgtgcttcatgctccgattcgggggctgcgggatctgtgcccccctcctccaacggcgagggcggtgcatcgatggcgccacctctggctcaaggggggagagggtgccggacttgtgcttcccccctccaaaagcggcagctgcctcctcccctcggcccgtccaatggcagcggcagtccgacttggggaccttgagcaatgatggcagcggactaacaggtaggtaccccttctccccttccccatccaccccggtgcgcgccatctctggtgctatatatccaaaggtaccagccacatgtgttgtttgtgggtcattgccatgctcatatagtcttgcaaggccaaagtctcctagatgaccgttcatttcagcatcaagaagcacattgcttgctttgatatctcggtggatgacaactttctcccaaatttcagcgataaactcctttattccttgcttcgattcatgagacaccctcttgatagcaacctccaatttagagtctggaagcacacctttatacaccttcccaaatcctccaacacctagaattttctcattgttaaatccttcagttgcatcaaataaatatttgtacgagaagcgatatggcccaaattcaacctcccaatcttcatatagttcagcatacctctttcgcctccacactaatgctgtgactgctgctcccacaagtaggatgactgtggtgatgactatcggtaggactatcttcaaagttttagaccggacttttgggccaaatcgaggtaactttggtaacttgatgatatctattgtcggagcaggactgttcattccaaagctccagccaagaacataattcaatgcaccgacattattagcaccggaagagaagccaatatatgatacaccttcatctaaaattgttgagatgttgaggattgctgacagcgttggtctcaaaggtttggttagcttgagaggagctatggtcacattcatctgtgtggcctctccatcatagtccacccatatttgcactgccttgccgccaacaaggggcaagtcattgaaaatgccgttcttgtcatcatagaagccagcaggatgggtctctagcggtctgctgaaactactgttgatagaaatgctgatgtcgttctcgttgttctccagaaaccttttgtcttggcaacttaaaaaattaactgcaagattgctctccctctgatcattcttgaggcccttgctcggaaatatcatgaaagccatgctgtcgggacatctaatagaaggagccatgaagagcacaaagttgactgagaaggactgtaatggtaccttcagaaattgccatggagtcgggtagagggcgtagcttgtttcgtaggtacttgcgccattggtaagctcaaggattccgtttggtgttaccatggctgtgccatcaaggataaggttgctgccggagaagccgttgtagatgaactggtcctgtccaatactgaccgtggtgaaggatgttaggaagaggaggaagcaggctaaatgctccat

SEQ ID NO: 81226 - DNA, 3795 bp, Oryza sativa
  Clone ID: PAT_MRT4530_80774C.1
atggagcatttagcctgcttcctcctcttcctaacatccttcaccacggtcagtattggacaggaccagttcatctacaacggcttctccggcagcaaccttatccttgatggcacagccatgtccttctcagtcaactttgtgctcttcatggctccttctattagatgtcccgacagcatggctttcatgatatttccgagcaagggcctcaagaatgatcagagggagagcaatcttgcagttaattttttaagttgccaagacaaaaggtttctggagaacaacgagaacgacatcagcatttctatcaacagtagtttcagcagaccgctagagacccatcctgctggcttctatgatgacaagaacggcattttcaatgacttgccccttgttggcggcaaggcagtgcaaatatgggtggactatgatggagaggccacacagatgaatgtgaccatagctcctctcaagctaaccaaacctttgagaccaacgctgtcagcaatcctcaacatctcaacaattttagatgaaggtgtatcatatattggcttctcttccggtgctaataatgtcggtgcattgaattatgttcttggctggagctttggaatgaacagtcctgctccgacaatagatatcatcaagttaccaaagttacctcgatttggcccaaaagtccggtctaaaactttgaagatagtcctaccgatagtcatcaccacagtcatcctacttgtgggagcagcagtcacagcattagtgtggaggcgaaagaggtatgctgaactatatgaagattgggaggttgaatttgggccatatcgcttctcgtacaaatatttatttgatgcaactgaaggatttaacaatgagaaaattctaggtgttggaggatttgggaaggtgtataaaggtgtgcttccagactctaaattggaggttgctatcaagagggtgtctcatgaatcgaagcaaggaataaaggagtttatcgctgaaattgttagtatcggccgcatccgacaccgcaatcttgttcaattacttggctattgcagaagaaaagatgaactcttattggtctatgactatatgccaaatggaagcctagacaagtatttacactgtaaagagggcaagtacacgctagattgggccaaaagatttcaaatcattagaggtgttgcatctggattattctatctccatgagaagtgggagaaagttgtcatccaccgagatatcaaagcaagcaatgtgcttcttgatgctgaaatgaacggtcatctaggagactttggccttgcaagactatatgagcatggcaatgacccacaaacaacacatgtggctggtacctttggatatatagcaccagagatggcgcgcaccggggtggatggggaaggggagaaggggtacctacctgttagtccgctgccatcattgctcaagggtaggcagggccgccactcgtcatggtctacgccgagaatagggggggtgcgtagatcggcagtccccaagtcggactgccgctgccattggacgggccgaggggaggaggcagctgccgcttttggaggggggaagcacaagtccggcaccctctccccccttgagccagaggtggcgccatcgatgcaccgccctcgccgttggaggaggggggcacagatcccgcagcccccgaatcggagcatgaagcacacttcgccagtcatcctcttccttaccataagcattagcctttcagccatcagtgctagtggagatcatgaccaattcatctacaccggcttcaccggtagcaatctgactctagatggtgcagcaaaaatcacagccaccggccttcttgggctgacaaacgattcattccggatcaaaggccatgcatctcacccagctccgctacgcttccgcaagtcccccaatggcacggtgcaatctttctctgtctcctttgtatttggtattctctcttcatttggtgatataagaggccatggatttgctttcttcattgccccaagcaatgatttctccactgcctttccaatccaatttttgggtcttcttaatgatataaacaatggcagttcgaccaatcacctctttgcaattgagcttgataccattaggaatgatgagttcggagacatcgacaataatcatgtcgggattgatatcaacagtctcaactcagtaagatcctcttatgccggcttctataatgacaacaatggcgcgctcacaaatgtgagcctcattggagataaaccaatgcaaaaaggccatgccttccacccgactcctttccggctccgtaagccgcccaactccgcggtgcagtccttctccgcctccttagtgtttggcatcgtcgtctctcccttgttgcatgccagcacagagggcatggccttctttcttgccccaagctctaatttttctgatgcgttaccggcacagtacctaggattgttcaattacagtaacaacggcaacttgagcaaccatgtttttgctgttgagatcgacactgcacaaaacaacgagtttatggacatagatggcaaccatgtcggcatcgacatctgcgatcttcactcggcaacatcttcttctgcaggctactacgatgacatcactggttccttccgaaacttgagtctgattagtggcgaggccatgcaaatttggatcaactacgatggagaggcaacatggattgatgtggctttagctccattcaaaatggccagacccaccaagacactcctgtcaatgtcctataacctctcagccgtgctcacaaacgttgcatacgttggtttatcagctgcaacaggtcaaatagaatcgaggcactatatcctaggctggagctttagtatgaatggactagccccacctttcttcacagctcatctaccaaatctacctaaagctcgtgtagatggaaaagctactcagctcatcttgctgccactaatttctcctctagcaactcccacatttgtctttttggtgatcttggccatcttcttctttgtgagaagaaggctgaggtatgctgagttgcgagaagattgggaaattgagtttggaccgcataggttctcatttaaggacctatatttagccaccgaagggtttaagaatagtcatctcttgggcactggaggatttggaagggtgtacaaggcatcggccgccttcgacaccggaatattgtgcagctacttggctattgccggcgtaaagggtgttgcatctggtttatggtaccttcatggagagtgggagcaagttgtcatccacagagacatcaaagccagtaatgtgcttcttgatgaagagatgaatgcatgcttaggtgattttggccttgcaagattatatgaccatggcactgacatgcaaacaacacgcctggttggaactataggatatcttgcccctgagttgttacaaaatgactgggtgattgattgttggaacgagagatcacttcttgaggcaatggatccaaagctccaaaatgagtatgatgctgatgaagcattcctagctttgaaactaggattgctttgctcacaccaatcacctgctgcaaggccaagcatgtggcatgtcatgcagtatcttaaccatgacttgccatttcctgagttggcgccaatggacatggtgcagaatcgtcaggtgggctcacccgttgcatattgccaatcagtggtgagcgatggcaccatcactggcctctccgaagggaggtag

SEQ ID NO: 81227 - DNA, 840 bp, Oryza sativa
  unsure (1)..(840): unsure at all n locations
  Clone ID: PAT_MRT4530_80775C.1
tcagatcatccgtgtaaaatccgaacggttcagatcgatcccacctccacctccctcaatcagcggacgacccgcaccgccccccccccctccctatcgctctcccaccacacctgcacctccgccctccgccggaattccgctcctgcacctccgccatcagtgctccgctccgtatcagccgccgcgccgtcctctgcatcgcatgtctgccaccgatccccgccgccggctcgccctccacgatcctccgcctccccgctgcacgaggtcctcccgtcgccaggtcgtcgccgccgttctgctccaccgatccccgccgcacgaggtgctcccgtcgctaggtagccaccgcgccgtcctctgcatcgcctgtctccaccaatcccctctgcatcgcaggggtgagctgcagctatggagttcctcgccggtgggggagcagcaggtgaatcccgtgagagagtacaatgaacgcggggtgctcggcgaaatgtcccgtccggctcctcacctgcaatgcatgtgttctggagagtgtttatggattctggatcttagaccccctcaacgacttggatcatcagtaaagcttcatcttgaagaatgtgatcacaataatgatacttgctgccatgatttctatcactcatgcacgcattgcccttgatgattgtatgcagttgngatatattgtcatcaagcaagaaaatccttggcgattctggtttatatgacttcctggaagcagtnagaacagcaagagttactgaaccataaaattgaacttgcctttctcatgcatcagatgaaccataagggaataacactactaccctc

SEQ ID NO: 81228 - DNA, 243 bp, Oryza sativa
  Clone ID: PAT_MRT4530_80776C.1
atggcaggagctagtgccaatatcgatgagggtccgtcaacaagatcgaagccctccacatcccagcaccaaacaaaggtcaaggtcgagccaactgctaaggatggtggcatggggcataggtggggccgtgggggcgtcagtcggttgcttgggtgcagatacacattgatggcgacgccatcggtgatgtataatgcagtagcaatggacacacatttgatggatggaatagttggataa

SEQ ID NO: 81229 - DNA, 177 bp, Oryza sativa
  Clone ID: PAT_MRT4530_80777C.1
atgtgagtagaagccgatgaggagttacaaatcgatgactctcagcgatcgtgctcgcttcctccaccgtgcatcgcccgtatacttttgctgcgccacccccttcttcctcctctcgccacaccgcctgtcccgttggtctaccgcggcgtgctccctgccttcgcccatttctga

SEQ ID NO: 81230 - DNA, 894 bp, Oryza sativa
  Clone ID: PAT_MRT4530_80778C.1
atggacgtgagggagaaggagggcggctcaccggcggcggcagcggcgacgacggcggcggcgacggtggcgcacggcggcgcaggagcggcggcacggcggcacgggaacggcggcgcaggaacggcggcgcggcggcacgggaacggcggcgcggcggcacgggaacggcggcgcggcggcacgagaacggcggcgcagtggagaggggagaggggagaggaaggcggcgcgggacgcgaggtggcgacgcgatgggcgagcggcgcgcgggtcgcggggcgcgagacggcgcgcggggcgcgaggcgacgggacggggcggcagcggcgacacgacgggcgcgcggcgatgggatgggcgggcggcagcggcgcggggcgcaaggtgcgatggcgacggacgagcggcgacgagacggtgcgcggcgcgatgggacggcgatgcggcggcgacgggcgacattggcgcgagacgacggcgacccgcggcgatggcgacagcgtggcagcggcggcgcgaggcgcgaggcagcggcacggggctcgaggcggcggcacggggcgcgaggccgacggcgacgatggcgacggcggcacggcgggcgagcggtgcaaggtggcgacgcgcggctcgggacggctagggcagaggcggcctgacacacgcctcgccccgtcccgtcggaaagatgagagcttccaggcactcgtccctagccggagccggcgtgggaactcctggagttggcacgtcagccccggccagatacattccaggcttcaacacaaccgtgctcccacgatgcatctgcctccggtggagtggagggagatccccggtgtcaggcgagagacggcgctgagcctcactcaaggacaagttgtgatttag

SEQ ID NO: 81231 - DNA, 966 bp, Oryza sativa
  Clone ID: PAT_MRT4530_80779C.1
tcaattcgtggtggcgggagcatctctaggtgtaacatcctttccccttctctcccacctctgccctagccgtcccgagccgcgcgtcgccaccttgcaccgctcgcccgccgtgccgccgtcgccatcgtcgccgtcggcctcgcgccccgtgccgccgtctcgagccccgtgccgctgcctcgcgcctcgcgccgccgctgccacgctgtcgccatcgccgcgggtcgccgtcgtctcgcgccaatgtcgcccgtcgccgccgcatcgccgtcccatcgcgccgcgcaccgtctcgtcgccgctcgtccgtcgccatcgcaccttgcgccccgcgccgctaccgcccgcccatcccatcgccgcgcgcccgtcatgtcgccgctgccgccccgtcccgtcgcctcgcgccccgcgcgccgtctcgcgccccgcgacccgcgcgccgctcgcccatcgcgtcgccacctcgcgtcccgcgccgctgccgcgccgcgtcatcgtcgcgtcgccatcgcggtcacaccaagccgccccgagccccgccgctcctcccctctctacaaataccccccctctctcattctccccaacccatctaaccctcctctcccctctcccctctccactgcgccgccgttctcgtgccgccgcgccgccgttcccgtgctgccgcgttgccgttcccgtgccgccgcgccgccgttcctgcgccgccgttcccgtgccgccgtgccgccgctcctgcgccgccgtgcgccaccgccgcgccgccgttctcgtgccgccgcgccgccgttcccgtgctgccgcgttgccgttcccgtgccaccgcgccgccgttcctgcgccgccgttcccgtgccgccgtgccgccgctcttgcgccgccgtgcgccaccgtcgccgccgccgtcgtcgccgctgctgccgccggtgagccgccctccttctccctcgcgtccat

SEQ ID NO: 81232 - DNA, 993 bp, Oryza sativa
  Clone ID: PAT_MRT4530_8077C.1
cacgcgtccgcacctcgggagggtacacggcgatcgagtagctcgagaacgagacgtggcaatggcgggagacggcgagctgaagctactggggatgtggaccagcgcgttcgtgctcagggtgcgcttcgtcctcaacctcaagtcactgccgtacgagttcgtggaggagaacctgggcgacaagagcgacctcctcctcgcctccaacccggtcaacaagaccgtccccgtcctcctccacgccggccgccccgtcaacgagtcgcaggtcatcctgcagtacatcgacgaggcctggcccgaccgcccccccgccgtgctgccctccgacccctacgagcgcgccgtggcgcggttctgggcggcatacgtcgacgacaaggtgcggctggcgtggctggggatcctgttccggagcggacggaggaggagagggcggcggcggtggcgcaggccgacgcggcgctggagacgctgagggcgcgctccgggagtgctccggggggaagcccttcttcggcggcgacggcgtcgggctcgtcgacgtcgtgctcggcggctacctcgggtggttcacggcgatcaagaagctgatcgggcgcaggatgatcgacccggcgaggacgccggcgctgccgcgtgggaggatctcttccgcgccaccgatgcggccaggggcgtcttgccggatgacgccgacaagatgctcgagttcaggcagacggcactcgccttgggcgcctccaaaaaaatcactctgtgacactaaagacatgtatgtggcacgccatgcgtatccaagctaagtttgtgaggctgcgacaggcagccatatacatctagttttgtttcttccatggcccatggcgtgcttaattaaattgttttcttctcgatgctacttttgactttgtatcaaagacaatgtaataagtggttgtaaaggcttgattttatccattataagaacaaatggcatgcttaataatt

SEQ ID NO: 81233 - DNA, 253 bp, Oryza sativa
  Clone ID: PAT_MRT4530_80780C.1
acctataagtgggttcgcggctgacccacttacacccctggagggactccatatcgatctcgtccccggttcggttcctcgttatcgtcacaggtcagcgatggcgatgatgacgacgtactgggttcggatcgatcagggcacacatggcggagtacggcgatcgaccacatggcgcgcatcgcctgcaagcagtctgttcaacgccctggccggccgagctcaagctgggcgtcgacgcgacggccactag

SEQ ID NO: 81234 - DNA, 285 bp, Oryza sativa
  Clone ID: PAT_MRT4530_80781C.1
atgagagcacggttgtctgctgatgacgtgaccggcgtcggaccagtgacagaccggtcattcttgtccactacgcgtcagttcggcatgccacacacctgcccttcttcatacagtgccttccttgcaatggttgcgatgaagcctggcatgaatcgagccgggactgacgtgctaatcccaggagttaccatgctggctccagctagggatgagtgccaagaggctctcatcattccgacggaacggggcgaggcgtatgacaggctgcctgctgccatctaa

SEQ ID NO: 81235 - DNA, 564 bp, Oryza sativa
  Clone ID: PAT_MRT4530_80782C.1
atggggaaagctgcacacgcccgcaggcaccgatcctgtatagtcggcgcgatccacgcgttcgttcagtcatagaaggaacgcagcatgaagaagactcatatcaagaggatatcgatgaaaaggatatgttaaaaagggagctccaggatgagcgtaaaactcttccaatctataaattcagggatgaactgctcaaggctgttgaagagtatcaggttattgtcatagtaggagaaactggctctggtaaaacaacacaaatacctcaatatcttcatgaagctggatatacagcaaaaggaaaggtggcatgtacacaacctcgtcgagttgcagcaatgagtgttgcagcgagggtgtcccaagagatgggtgttaaactaggacatgaggttggctactctataaggtttgaggattgcacgtctgagaaaacattgattaagtatatgactgatggcatgcttctgagggagtttcttggcgaaccagatttggcaagctatagtgtagtaatggttgatgaaggctcatgagcgtacactgtctactgatatctta

SEQ ID NO: 81236 - DNA, 4864 bp, Oryza sativa
  Clone ID: PAT_MRT4530_80783C.1
gcacgaggccccaaatcaagctagctttaggcttttttttttcaccacaagcaataatgctcgaaattggcaccaattaccccagaaatttactgggccagtatgatctctctacaggatacatcagccattcaattaaaaattggctactcatcgtacaccctacagatcgcgaattttctctactgtacagtatttcttacaaaaggtgacccaggcacaatatgattctctgccaactctcttcaaattatctttgcagaggcttgactttgatcctaatcttagtagttgtcaatgtccgtgtagtatctactggcgtacccacatttgatatcttgggttcaggaattcgcattggagctggtggccttgccgatgaggttccttgcgagtctgaaggtttcgctgtgttcttctgttcggaagaagaaaccccttcaccttccttctgctttttgcctttttctttctccatccttttcttctctttcttaagccgttttttctccagatactcaggatcatctttcttatctcgatgccgctttttgtctttcttgtccttcttcttctccttcgtttccaatccattcatggagtctggggcttgatttccatcatagcttgtggagactacttctagctgactccgtggcttgtctaggacttcctgtccattaacaacgggagagaagtgatccttggggagagcatctagcctggaatcggctgtgcactgtagctccttggatacttcatgcttgtccattagtttgacattgccaatgcttgctgacatccttgattccctatcgtggcaagagttttgttccctatcatggcatgagttttgctcctcgatgttatgattacttacatttactggttctggtgcttcagtcataggtgcatccactgacatagagctacatggacctgcttcattttcatttctaccatgtgaatgatctctgtgatcagcatcatctgctttactggatgatgaagcacgtttaacccttattttgacaacattccttctctcactgcagttagatatattatccgcatcttttgtgggtatagaaataacattccttctctcactgcagttagatatattatccgcatcttttgtgggtataaaaataacattccttctctcactgcagttagatatattatccgcatcttttaagggtccagaggtaggtaagacttcacggacactaggagtgctagtggaaggttcttgaggccttgattgttgaggaactgaggaatcagctttagtgtgctgatcactagatatctccaggacaacttgaggtggagtgacaaccttcggaactccatgcagtgttggagaccttccagcagcaatttgcaatatgcagaacacattatgtcgaagatatacattgttgtaggcctttttgccagcaagcaggcaaaggaggccaactctcaaagatctttcttcattagcatatttcaagaataataaaagagctgcatcaagtcctttatggtgaaactcgagatcaataagaaccctgccagcttccattcgaactttccatggtttgtccatgttgcgatagggcacaattagttcacagacgcgatcaaggcaaatggaagatgacaccctctgtgcaatacgtgcaagggtgcgaatgcagctgacagtcaaaaccccattgtatccaggcataaagttatcaaattgcaggagccgatcaatgcgcttgagaagagacgacaatagacctacaccctgctggccaaattctaattcacctatcgcctgcaccattgcagatagccagtagacatcagagtatacatttccgttgttatcattatactttagaagctgaaggataaattcaatggcttcttttgggctgctcttgtctgctgatctaacaagagctactgcatgaggaattgcctcaagaacaaagtactccggaatatcatggaagtcattcggcctgggtaatccaatatctgcatcaaatcggcggcttttatagaacttaaccagatgaagcagtccagttagttctgtgccctctgatgcagttacagctaaagcatatgctgcttcaactctaactctccaaaatgcctttgtatcatttaagaaattattgagggcattagtcacagcaaaagtgagttgaggtgatttctccagtacagatattgcttgtgattgtgaaatgacatctttgtccttttccaattgattgatccacatctgcacaggctggtgaaaatgtatctcagcgagatactccatttctgggtccactctgatccacagtaaaggtgcatccatactcgcacggttatcttgatttgaagcatctatgttttcatcagaaccatcaggctttgagccttttttagttttctgaaagcgctttgctgctactttggaatgacattgtatttccaccacctgcaaagcttcaccagccatgggtacaattggatgatcgtacactccatcagtttcatggacacgtacgctcatcattcctggccatccagtatcaccttctcgagaatcaccattcgtgcgaatatcaggaccaggatcaacttttgtggtgcaaccacgtgaaacagctaattcaaccaagtttctcctcttgctataggagattcccaatctcataactgggcatccagaagattcaacccaccttgggaagaattctttcaggaatggccgttcaagattaccgaccttgtttgcaagatgcctgaactcttttgtacttagtgttcttgaggcacgagttggagcaactatcatctgcagaatcttccgaaaagagtctggccccatctgtttctccaacatttgaagaacagatactgccttcaaagaacgaattttcccatatgaaccgattgtttgagttccaaataaatcacttgaagctgaaggagagctcaaagcagttgcaccactgacatcaaactcacacacaatgcaattggccgcccgacaccaaccgttaagattaaggtgaatgaatgcaagacaagaagcaaacacataatttgccagtgaatttggttggaaggtgaatgacaagttaatatgtgaatcaacaccaaaactgtgtgcaacataactctcgtgcactggtttcaaaagcaaagtaaatatggtcaaatcagcagcaacatccttgaaacgcctatatcgtgcctcattattgccaagataacgcttgacaaaatgctcagtgagaaaaccagccaaaccatccaataaccactcatcggttgcctcctctgcatttgtgtatatgccaaaccattgccttgcaagagcatatgctactttgattctcgtgtcaattatctgatctataaccttttcgtcgtgtaagatatctgaattgaagatgcaagtggaagctcctaagcttgttggtgatactatcatttcaggtggaagaaaaacctgtttgtatagtccaaaaggaaatgatgcagcaagataatcttcataacagctgtagacactgtggaaaaatgagatggtattttcaagctttgataaactctgagataagcacatgtgtgatacacttatgtcattcctgtcaggaagaacttcaaatggaccaacaaccaaagatatccactgtgcactaactggagtgctcaatttatacacatatgtttttcttggaggatcttccttgcttaagacctggtaaagcaagtcaccgttactgacagcaactagattcgtgctaactgtgaactctaggtcaaatggacagcgctgtgttgcactatcaatgcaaggaaaccagcagtgtgcacgccttatttgattgttactatgtaagatgttgccagtgaagtaaagtccagtttcagccttctccaaaatataatctatgtgaaccagttttgtgttcttcaccttttcaatctcattatcattttccttgtccttctcatttccattttcctcttcattctccttctccttctcctccaacttctcctccttatccttcttctcctcctcctccaacttctcctcctcattctcatcctccttctccttctccttctccttctcatcagttcccattagctgctccttttctttttcattgtccttcttagtttcctcttccttgtcctccttttctttttcattgtccttctcagtttcctcttccttgtcctccttttctttttcattgtccttctcagtttcctcttctttgtccttcttatcagcagaaccgttgcagccattaacagcttgatcatcagatatttgagcaggtttcccaccattttcttcacatttttcaccattttcattttgtttttcaccattttcttcatgtttttcaccattttcttcgtggttttcaccattttcttcgtactgtggctcagttattgccttgcttgatctctctgacgagatgatgagattaggtgcagcttcactatttagagaagagatatatactgagcatgcagcatcagcagcagtcttcgaacatgatactgaagaccaactctgttgatcaccagcatttttccactgaggagaatactcaaactcagcagcttgaccatccactaatatgttcctaatcgtcatgttgtcagcatgcagagcaaaagtatcattttcagcttgaacttttatctcagtgtacccatagatcagccggttctccatgtcgatggagaggcacagcttctggtggagcacggtggcgccccctcccccgccgccagccccgccgccgtcgggcttctgctcttcgcccttctgcttcctcgccttcgccat

SEQ ID NO: 81237 - DNA, 5268 bp, Oryza sativa
  Clone ID: PAT_MRT4530_80784C.1
atgggtttcgtttctggcatcgacgacttcgccttccctcccgggcaggcgttccggttcggcagcctcgacttcatcaccaacaacttcggcaagatttctctccttgactcggattcagaccagtcggggagagaccagccaaaacatctcccactcggagatctaggcgagctccggcatcggccccgatccagtctagatccaggaaggtcggcgttatactccaacctcttgggacagtctcgacggaagaattggatggctccctctgctcccccggcgtcagttctcgaccaaccgagatcctcgactacgacgacttcggctaccactacgaccacggcgacctcgacaacttcgacgacagctatgaggataactacatgcccctcttcttcggcgtattcatggctgacaacgaaacggaagaacagcgccgagcccgagaagcggaccaagatcgcgcacggcaaggagctgaacgtcgctgactggaggaagtgcgacagcgacaggagcgagaacgactacagcgaggctgaagatcgacggcaacgcgccttggaatctgggcgccgagcgagagagctcattgggcaacaagacgtcgacgggacatcggtcttccgcaccgcccagcagaacgcggttgcagcaatcactctcctcgacaccctcctcaaggaagacgcactcaaccaagccgatcatgttgtcaacatcttgaaccagacgaagaccatgatcgctgcctcggttccagccaactccccaagcctcagcatcaccggcacaggatccagtcgcaggagcaggggtcacgacgaacgatctgttcactcgcctcctgaacgtcacagggagcgccgagtcgaacggcctcgctctccacctcatcagcgccccgtcgatcttcgcgacatgatcaaccagcaccgtgcagcacgaggtcaccgccattcaccaaatcgctacgacgacgacgtggatagagtggctaccttcactaatgacctacgtcgagtggattggccagtcggctttaagccgactggaatcgagaagtataacggcaccactaatccggagtcttggctcaccgtctacggaatcgcgatccgtgcagcaggaggagacagcaaggccatggcaaactatctacctgtggccctagcggactccgcccgatcctggctccacggactaccccgtcgcacgatcggatcatgggcggaacttcgcgatcacttcatcgccaacttccagggcacctttgagcgccccggcacacaatttgacctctacaacatcgttcagaagtctggagaatcccttcgagattacatccgacgcttctctgaacaacgcaacaagatctccgacatcaccgacgacgtcatcatcgccgccttcactaaaggcattcgccacgaggacctagtcggcaagttcggacgtaaacctcccaggacggttaagcagatgttcgaaaaagccaacgagtatgccaaagccgaagatgcaatcaccgcgtccaaacagtcgggcaccacttggaagccaaagaaggacgcaccgactgcaggggggagtggaagtaacaaccacaaagatcgcaagcataagcccgaagaacttgtggcgaccacctctccatcttaccgacaacgtccccgcgtcaacaccttcgacaagataatgaactcccaatgtccgcatcatcccaactccaaccacacggagatcaaggcacatcaaagaagagatgatgaagacgatgccccgactggttttcaagatcatcgcaaagaacttaatcacatcttcggcggacccctggcttatgagtccaagagaaaacagaagctaatggaacgggagatcaatgcggttcagcctaacacgccccaatatcttcagtggtcagaaacagcaattaagttcgaccgctcggatcatcccgaccgagtggtccacccggggtggtaccccctggtactagacccagtggttcgcaatgtcaagctccgacggactctcatcgatggcggcagcgcactcaacatccttttcgctaaaaccctggacgatatgcagattcctcgcacggaattaaagccgagtaatgcacccttccatggcgttatcccaggattgtcagctacaccactcggccagatcactcttccagttaccttcggcactcgggagaattttcgcacagaaaatgtttgtttcgaagtcgctgatttcgagatagcatatcatgctatactcagacgaccggctctagccaagttcatggctgtcccgcactacacctacatgatgatgaagatgtctggtcctcgaggggtcatatcactacggagcgacatcaagcaagccgtcacatgtgacaaagaaagttgcgagatggctcaaacccacgagaccactctcgcccgcgaagagatccgactggctgcgaccacggcaagcgagggagaagtgcctgcaaccaagctgacgaagaccgaagaaagtgatgccaagacgaaaaagattcccttagatccctccgatcctgacaagactgctaataataaagatatttttgcgtggaaaccatccgatatgcctggtatccccagagaagtgattgagcactctttacatgttaaggaagacgccaaacccatcaagcaacgactccgccgttttgcacaggacaggaaggatgcgatcaaggaggaattaaccaagctgttagcagcaggcttcattaaggaagtccttcatcccgactggctggctaacccagtcctggttcggaaaaagacggggcaatggcgcatgtgtgtcgactatatcgacctcaataaatcttgtcccaaagacccttttgggttacctcgcattgaccaggtggttgattcaacggccggctgcgagttactcagcttcttggactgttactcgggatatcatcagatccgactaaaagaatccgactgcttgaagacctcgtttattacgccctttggggcctactgctacatcaccatgccctttggattgaagaacgcaggagcaacctatcaacgcatgattcaaaagtgtttttcaactcagatcggtcgcaatgttgaagcctatgttgatgatgtagtcgtcaagaccaagcagaaggatgacctgattgcggatttagaagaaacttttacaagcattcgtgctttcaagatgaaactaaacccggaaaagtgcatcttcggagtaccgtcagggaagttgctcggatttatggtatctcaaagaggcatacaggccaacccagagaaaatcaatgccatcctcaacatgaaaccgccaagctcccaaaaagacgtccaaaagctgactggttgcatggcggcgctcagccggttcgtctcacgactcgttttggcctcgccacatccgcaagagccgctactgttatatgtgtcagcgacctcccaggttgtgagtacggtcctggttgtcgagcgtgaagaggaaggccatattcaaaaagtccaacaaccgatctattttgtcagcgaggttttagccgactccaagacaagtggaccgagtgccaagaagacatgccagaggaaaagatggaatattggactatgcatttttgatgggtcgaagaggcttacaggcactggagctggggtcgtcttaatttccccgactggagaaagattgagcgacgtattgtggatacatttttctgcgtcccataacgtggcggaatacgaggcgctactccatggattaaggattgcaatctctttaggcatccgccgattaatcgtccgtggagactctcagttggttgtcaatcaagtcatgaaagagtggtcttgtctagatgataatatgaccgcttatcgacaagaggtacgcaagttggaagacaaattcgatggacttgagctcacccatgtcctccgacataacaatgaggcagccgacagactggccaattttggttcaaaacgggaagcagctccttcagatgtgttcgtcgaacatctttacgaaccgaccgtgcccagaaaagagacaactgaagccatggatactcaaggcgtaagcatgattgaagccgactggagagaacctctcataaaatttttgaccaaacaagaactccctcaagacaaaaatgaagccgagcggatttccaggcgcagcaggctttacattattcacgaagctgaactgtacaagaaaagtccatcaggaatactgcagcgttgtgtatctttggaggaagggagacaattgctgaaggatatacattctggtatttgtggtaatcatgctgttgcacggaccatcgtcggcaaagcttaccggcaaggttttttctggcctacagctgtgtccgatgcggacaagattgggcttgacatggtcggcccatttaaaagggcagtcggtggttacacgcatctctttgtggctatcgacaaattctccaagtggattgaggctaaaccggtcatcacgatcacagcagataaagttagagattttttcatcaacattgtgcatcggtttggggtacctaatcggatcatcactgataatggcactcaattcactggcggagcatttaaagatttttgtgaagacttcggcattaaaatttgttatgcctccgtggcacaccctatgagtaacggacaagttgagcgcgctaacggcatgatactgcaagggatcaaagcacgagttttcgaccgattacgcccctatgctggcaagtgggtagatcagctgccgtccgtactttggtctttacgcactactcctagtcgggctaccggccagtcgccgttctttttggtttatggcgcagaagcaatgttgccgagtgaagtggaatttgaatcactacgattttggaacttcaacgaggagggctatgaagaaggccgagtagacgacatcaaccgactagaagaagcccgagaagcagctttaattcagtcgactcgatatttgcaagggttgcgccgttatcataatcggaatgttcgatcgcgagcctttttagtcggtgacctggttctaaggaaaattcaaaaaacacaggatcggcataaattatctcccttatgggaaggaccgttcataattgctgaagtcactcggccgggttcttatcgactcaagcgcgaagatggtactatcatcaataattcttggaacattgaacaccttcgtcaattttatgcttag

SEQ ID NO: 81238 - DNA, 618 bp, Oryza sativa
  Clone ID: PAT_MRT4530_80785C.1
atggaatggaagaagaaggaaccaaagtggacaagggaaagttggcgaggcgagaagaaacggcaggcagccaaaccaaccacaggattccaaccaaccaacgccgacgtggacccgcccgccggttacaggccaccacgcacccgatgcactgcacggcccagatcatccactccctccaccatggaaatcgtgtatgcaacgaacaacgtgcatgtgcatccttgtagacttgtagctcatgctcagcagcaggagcttctccaaaaattatgtttctttgcttgtttctttgtttttctagctggaaccaatctagccggagatgcccctgatcctccctgtttctcatcctctgctgccgctgtgaattccagatgggggcgggagctcgacccagatgcagaggttgtgatttggcaatctgtagagcccaggcttgtggtcgctactactggggatacccgtagaccggatatagggggtattggggtccgttggtacgaggatctacgtagtacgacatcaagcaaacaaaagacaaggattatactggttcagagattgagagatgaaggccaaagcagtggcggcgacgtcatggaggatgaacagcag

SEQ ID NO: 81239 - DNA, 3165 bp, Oryza sativa
  Clone ID: PAT_MRT4530_80786C.1
atggcacggggctccgctctgcttgacggtagcgtactaccgccttctcgcatcgtgagcgagaggcaggccgggctgccgcgccgcttcatgccggaatctgccaccggtcgggagatagtgatgctgggcgagggacgcccggcaccagactacccggggcggtccgtcttctttctcccctttgcaatggcagggctggttccgccattttcttctttcttcatggatgtcctggagttctacgatctccagatggcgcaccttacccccaacgcaatgatgacattgggcatctttgcacacctgtgcgagatgttcattggggtgcgcccatctcttcggctgttccggtggttcttcaccgtgcagtcggtatcgccaccgtcggtggtcggcggctgctatttcctgccgcgggggccggtgttgaaccgctacatcccttgcgtcctccgcaaaaagtgggatgactggaagagcgactggttctacacccccctcgccgacgaagcgcgcctccgacttccgagccagcccccggcgcaggcctccagctggcgggcgccggtagatctgggggatggctatgacgccgtcctcgaccgcctcgcgggcctgcgatcccaggggcttaccggggccatggtgtacggcgactacctccgtcgtcggattgcgccgctccagcggcgcgctcggggcgcctgggagtacaccgggtccgaagactacatgcggacccaccagggagtcagatgggattgggctcccgaggacttcaagatactggtccaacgggtgctaaatctcaactccgtggaggcgtcccttatcccccacggtatcctccccctctgcagcgatccagatcgcgtctccatcttgaccattatgacggcggtcggggcctcagaggagcaggctcctaagggccatgacggcactggcgggagccgccgaggggatcaatctacccccggagggggtcgtgcttctgggccccgcgtcgggggctcggggagcaaccgccctaccgacgcccgggggaagaggaagctgggaggaacaccttccccatctcctccccgagggggcggggcggtgcgtgccagcagcaggcgcccggagagggccgcgccaacatcgcagcccgagggggagcgcaagaagaagcggctgcgtaagatgggggagacagaaccatcccggggaaacctaatttcccctccaaggtggtcatttaaccgaccccctcgcagtgacatcccatcgcgttcctcccgccatcccaagtccggccagtccgaggccgaagatccagcggccgcagaggaacggaggcgagaatctgaccggcgagaggccgcggatcgccttcgggaagctgaagaggccgcccgggaggccgcccgggctcatcaagcggaggataccgctcgggaggaggccgcccgggctcgccaagccgaagaagctgctaaggaggaggccgcccgggttcgtcaggctgaggaagccgctcaggaggaggccgcccgggctcgccaggctgaggcgatggtgtcttccgaggcagctcacgacaaagctgctggcgcgtcgcttgggcccactccctcgggcgacactcaggcgacagcctccggggcggctcgcgacgaggccgcgggcgcatcgcctgggcccacttccccgagcgacgcccaggaccagacgggtccgggggacatccccgagcccagcgcgtcctccggcgggccgagccgcgtcgcattctctccaaggcggctcttctcctcgtcttctgtcgccccgctgagcgccgagccccttctcgcccaagtggaggccctgcgagcggaacgagcggagctcgaggccgcatgggcgcgtgacgaggaggggcggcgctcggtggacgtcatggtggaggtgggccgtaaggctcaccgccgtcacgtctcggagcttgaagcccgcaaagcggcgctggcggagatcgcccgagaggtggaggaggagcgggaggccaccctcatcgccaccaccgcgatgatcgaggtgcaggagaccctccgccttcaacacgggagctgggaggcggagctaaagaaaaagctcgacgccgcccaaggggtccttgacaccgccgctgcccgagagcggcgggcaacggagactgaagcggcgtcccggcggcgcgaggaggcccttgaggcccgtgccatggcactggaagaacacgccagcgccgtggagaggggcttggcggaccgcgaggccgccgccgctatccgggaggcaacgctggcggtgcacgaggccgcctgcgccgaagaggagtccgcgctccgcctccgcgaggacgcactcgctgagcgggagcgagctctcgaggaggccgaggctgcggcgcaacggctagcggacagcctgtccctccgcgaggcagcgcaggaggagcaggcgcgccacaatctggaatgcgttcgcgccgagagagccgcactggagcagcgggctgctgacctcgaggcgcgggaaaaagagctggatgcgagggcgcgcatcggtggggcggctgcgggcgaaagcgacttagccgcccgcctcgcagctgccgaacacaccgttgccgacatgcagcgcgccctagactcatccgccggggaggccgaggccctccgcttggcgggcgagatagggcccggcatgctttgggatgcggtctcccgcctggatcgcgccggtcggcaagcgggcctctggaaaggccagacaacgacgcactccaccaatctggaaggcctcgctccgcacctcacgaagatggcctgggctctccaacaactccccgaggagctcgagaagaccatcaagtcatcctcgagggacctcgcccaaggagcggtcgaactcgtactagcgagttaccaggccagggaccccaacttctctccatggatggcgctggatgagttccctcccgggaccgaggacgacgcgcgcgcgcgggtccgggatgccgccgaccacatcgtccacggcttcgagggctcggcccctcggttcgcgttcgcccccaactccgacgaggagggcgacgccagcggtgcagacgacggtgacgacgaggccagcgacccgggcacatcggaatga

SEQ ID NO: 81240 - DNA, 150 bp, Oryza sativa
  unsure (1)..(150): unsure at all n locations
  Clone ID: PAT_MRT4530_80787C.1
actactaaangaaagactcgattacaaatttacaattgcacnatacccttaacaaagccaaccattcaaccaacccaaacacttactttcacttgcaaaaaaagggttatacaacttcactaacattcttttgttgcatacacaatttga

SEQ ID NO: 81241 - DNA, 3003 bp, Oryza sativa
  Clone ID: PAT_MRT4530_80788C.1
atggcacggggttccgctctgctcgatggtagcgtgctgccgccttcccggatcgtgagcgagaggcaggctgggctgccgcgccgcttcatgccggaatctgccaccggccgggagatagtcacgctgggcgagggacgcccggcgccagactacccggggcggtccgtcttctttctcccctttgcaatggcagggctggttccaccattttcttctttcttcatggatgttctggagttctacgatctccagatggcgcacctcacccccaacgcggtgatgacattggccatcttcgcgcatttgtgcgagatgttcattgggccacgggggccggtgctgaaccgctacatcccctgcaccctccgcaagaagtgggacgactggaagagcgactggttctacactcccctcgccgacgaggcgcgcctccgacttccgagccagcccccggcgcaggcctccagctggcgggcgccggtagatctgggggatggctatgacgccgtcctcgaccgcctggcgggcctgcgatcccaggggctcacaggggccatggtgtacggcgactacctccgtcgtcggattgcgccgctccagcgacgcgctcggggcgcctgggagtacaccgggtccgaagacttcacgaggacccaccagggagtgagatgggactgggctcctgaggacttcaagatattggtccaacgggtgctgaatctcaactccgtagaggcggccctcattccccaaggaatcctccccctctgcagcgatccagaccgcgcctccatcctgaccattatgatggcggtcggggcctcagaggagcgagctccaaagggtcacgacggcgtaggcgggagccgcaggggggaacaatctaccccgagagggggtcgtgcttctgggtcccgcgacaggggcccggggagcagccgccctgccgacgcccgggggaagaggaagcagggaggaacacctcccccatctcctccccgagggggcagggcggcgcgtgccagcagcaggcgcccggagggggccgcgccaacatcgcagcccgagggggagcgcaagaagaagcggccccgcaagatgggggagacagaaccatctcggggaaacctcatttcccctccaaagtggtcgtttaaccgaccccctcgcagcgagatcccgtcgcatccctcccgccattccaagtccggccagtctaaggccgaggatccggcggccgcagaggccctcaggcgggaatctgaccggcgagaggccgcggatcgcctacgggaagccgaggaggccgcccaggaggccgcccgggctcgccaggccgaggaaactgctcgggaggaggccgcccgggcccgccaggccggggaagccgctcgggaggaagtcggatttcgccaggacgaggcgatggcgacttccgaggcagctcgcgacgaggccgcgggcgcgtcgcttgggcccactccctcgggcgacgctcaggaccaaccgggtccgggggacatccccgagtccggcacttccattggcggcccgagccgcgtggcatcctctccaaggcggctcttccccacgccttctatcgccccactgaacgcagagccccttctgcaggccttggccgccgcaaacaccacggtgttggatgggttaagtgcccaggtggaggtcctgcaggcagagcgggcggagctcgacgccgcgtgggcgcgtgtcgaagaggggcgacgctcggtggaggccatggtggaggtgggccgtaaggctcaccgccggcacgtctcggagcttgaaacccgtaagaaggtgctggcggagatcgccaaggaagtggaggaggagcggggggctgccctcattgccaccaccgtgatgaacgaggcgcaggacaccctccgccttcaatacgggagctgggaggcggagctaaggaagaagctcgacgccgcccagggggtgcttgacgctgccgctgcccgagaacagcgggcggcggagaccgaagcggcgtcccggcagcgtgaagaggcccttgaggcgcgcgccatggcgctggaagagcgcgcctgcgtcgtggagagggatctggcggaccgcgaggccgctgtcaccatccgggaagcaacgctggcggcgcacgaggctgcctgcgccgaagaagagttcacgctccgcctccgcgaggacgtgctcaccgagcgggagcgagctctcgagggggccgaggccgcggcgcaacagctggcagtcagcctgtccctccgcgaggcagcgcaggaggagcaggcgcgccgcaatctggaaggtgcccgcgccgagagggccgtactgaaccaacgggccgctgagctcgaggcgcgggcgaaggagctggacgcgagggcgcgcagcggcggggcggccacgggcgaaagcgacttagccgcccgcctcacagctgccgaacgcaccatcgccgatctgcagggcgcgctggactcgtccgccggggaggtcgaagccctccgcttggcaggcgaggtagggcccggcatgctttgggacgccgtctcccgcctagattgcgccggtcggcaagtgggcctctggagagggcggaccgtaaagtacgccgccaaccagggaggcctcgtccagcgcctctcgaagatggccggggctctccaacggctccccgaggagctcgagaagacaattaagtcatcctcgagggacctcgcccaaggagcggtggagctcgtcctggcgagttaccaggccagggaccccaatttctccccatggatggcgctggatgagttccctcctgggaccgaggaccgcgcgcgcgcgcaggtccgggatgccgccgaccatatcgtcgacagcttcgatggcttggcccctcggcttgcgttcgcccccaactccgacgaggagggcaatgccggtggtgcagacgacagtgacgtcgaggccggcgatccgggcgcatcggattga

SEQ ID NO: 81242 - DNA, 509 bp, Oryza sativa
  Clone ID: PAT_MRT4530_80789C.1
gatggacacacaagcaaagcaggcatgcagcttggcagcctggcaagaggattgaattgattatgtgctgttgtagacaaacagaatagagaggtacagtagagtagatgctaatgagcgaggagtatgaggtcgagcatgtaggcctccagctggagggcctccttggccatctctcccatgcagaacccaatggaagccaatgctaatgctactccttgatcttgctgctgctgctgctgtgacaggaacgaccgcaccagcatctctggtgcatcctcgtcgtcacagcaacaggtgtcactgccgctgctgacccggatgccggcctccaggtcctcctcgtctctgctgctgctgctgtgatacgactgagtcggaggaggaggtcggcgcttcgctccagggatgcggagacgaggcagtggaagcgctgcgttgcatcctcgtctgctgctggtattggagttggatgtgcctgtgtgtagaggtagagcagctgcgccatc

SEQ ID NO: 81243 - DNA, 424 bp, Oryza sativa
  Clone ID: PAT_MRT4530_8078C.1
aagtttttggtttcggcggggactcgtatctacccatgggtataagtttgtgcacccggggtcattgtaaactatctccgatcaataaaaatactctcggcgtatcgccaccatctttttcgaggtttttacttatcatccggtgaaacttggcacctgacacggggctgcatcagctttcgatcttcggtgaaggggtaagtcctactgtttgccggcccagacagttgtatcggctacattggtgttgttcaaggcttcatcgcttcgatctcttgcatcgctctggtttggttagtatatttgcctatctatttatcatatatcttagttaatctagtttgatagctcgattaactgtataggctgggatgtgctttagggtttttgccggtatcggctaaattgctttgccagattaggt

SEQ ID NO: 81244 - DNA, 3168 bp, Oryza sativa
  Clone ID: PAT_MRT4530_80790C.1
atggcacggggctctgctctgcttgacggtagcgtgctgccgccttcccgcattgtgagcaagaggcaggccgggctgccgcgccgcttcatgccggaacctgccaccggccgggagatagtcatgctgggcgagggacacccggcgccagactacccggggcggtccgtcttcttcctcccttttgcaatggcagggctggttccgccattttcttctttcttcatggatgttctggagttttacgatctccagatggcgcacctcacccccaatgcggtaatgacattggccatcttcgcgcacttgtgcgagatgttcatcggagtgcgcccatcccttcggctgttccggtggttcttcaccgtccagtcggtgtcgccgccgtcggtggttggtggctgctacttccagccgcgggggccggtgctgaaccgctacatcccctgcgtcctccgcaagaagtgggatgactggaagagcgactggttctacacccccctcgcagacgaagcgcgcctccgacttccgagccagcccccggcgcaggcctccagctggcgggctccggttgatctgggagatggctatgacgccgtcctcgaccgcctggcgggcctgcgatcccaggggctcacaggggccatggtgtacggcgactaccttcgtcgtcggatcgcgccgctccagcgacgcgcccggggcgcttgggagtacaccgggtccgaagactacatgaggacccatcagggagtcagatgggactgggctcctgaggacttcaagatagtagtccaacgggtgctgaatctcagctccgtggaggcatccctcattccccaaggagtcctccccctctgtagcgatccagaccgcgcctccatcctgaccattatgcaggcgatcggggcgtcggaggagcgggctcctcgaggccacgagggcgcgggcgggagccgcaggggggaacaatctaccccgagagggggtcgtgcttctgggccccgcgacgggggcccggggagcagccgccctgccgacgcccgggggaagaggaagcagggaggatcccctcccccatctcctccccgagggggcggggcggcgcgtgccaacagcaggcgcccggagggagccacgccgacgtcgcagcccgagggggagcgaaagaagaagtggctccgcaagatgggggagacagaaccatctcggggaaacctcatttcccctccaaggtggtcgtttaaccgaccccctcgcagtgagaccccgtcgcgttcctcccaccattccaaggccggccagcccgaagtcgaggatccggcggccgcagaggcccggaggcgggaatctgaccggcgagaagccgcagatcgcctacgggaagccgaggaggccgctcgggaggccgcccgggctcgccaggctgaagaaaccgcttgggaggaggccgcccgagctcgccaggccgaggaagccgctcgggaggaggccgcccgggctcgccaggacgaggcgatggcgacttccgaggcagctcgcgacgaggccgcgggcgcgtcgcttgggccctctcccttgggcgacgctcaggcgacgacttccggggcagctggcgacgaggccgcgggcgtatcgcttgggcccaccccctcgggcgacgctcaggaccaaccaggtccggaggacatccccgagtccggcacgttcatcggtgggccgagccgcgcggcatcctctccgaggcggcttttccccataccttctgttgccccactgagcgcggagccccttctgcaggccttggccgccgccaacaccacggtgttggacgggttaagtgcccaggtggaggccctgcaagcagagcgggcggagctcgacgccgcgtgggcgcgtgtcgaagaggggcgacgctcggtggaggccatggtggaggtgggccgtaaggctcaccgccggcacgtctcggagcttgaagcccgtaagaaggtgctggcggagatcgccaaggagatggaggaggagcggggggctgccctcatcgccaccgccgtgatgaacgaggcgcaggacaccctccgccttcaatacgggagctgggaggcagagctagggaagaagctcgacgccgcccaaggggtccttgacgctgccgctgcccgagaacggcgggcagcggagaccgaggtggcatcccggcggcgcgaagaaacccttgaggcccgcgccatggcgctggaagagcgtgcctgcgccgtggagagggacctggcggaccgcgaggccgccgttgccatccgggaggcaacgctggcggagcacgaggccgcctgcgccgaagaagagtccgcactccgcctccgcgaggacgcgctcactaagcgggagcgagctctcgagggggccgaggccgcgtcgcaacggctggcggaaagcctgtccctccgcgaggcagcgcaggaggagcaggcgcgccgtaatctagaaggtgcccgcgccgagagggccgtactgaaccagcgggccgctgagctcgaggcgcgggcgaaggagctggacgcgagggcgcgcagcggcggggcggccgcgggcgaaagcgacttagccgcccgcctcgcagctgccgaacacaccatcgccgatctgcagggcgcgctagactcgtccgccggggaggtcgaggccctccgcttggcaggcgaggtagggcccggcatgcttcgggacgccgtctcccatctagatcgcgccggccggcaggtgggcctctggggcgggcggactgtgaagtacgccgccaaccaggggggcctcgcccagcgcctctcggagatggccggaactcttcaacgtctccccgaggagctcgagaggacgatcaagttatcctcgagggacctcgcccaaggagcggtggagcttgtactggcgagctaccaggtcaggaatcccgacttctctccatggacagcgctggacgagttccctccctggaccgaggacggcgcgcgcgcacaggtccgggacgctgccgaccacatcgtccagagcttcgagggttcggcccctcggcttgcgtttgccctcaactccgacgaggaggacgatgacggcggagtgggcggcaatggcgacgaggctggcgacccgggcgcgtcggattga

SEQ ID NO: 81245 - DNA, 1614 bp, Oryza sativa
  Clone ID: PAT_MRT4530_80791C.1
atggatagcctgccaaagagagacgctaactacgtccctttgagccccatcaccttcctccacagagccgcctccgtctacgccgaccgcacctccgtcgtgtacggcgccaccagcttcacgtggcgccagacgcaccaccgctgcctccgcctcgccgccgcgctccagtccctcgccgtctcaaagaacgacgtcgtgtccgtcatcgcgcccaacacgccggcgctgtacgagatgcacttcgccgtgccgatggccggagcggtgctgaacgccatcaacacccgcctcgacgcggccaacgtcgccgccatcgtcaggcacgccgagcccaaggtgctcttcgtcgactaccagttcatccgcgtcgccaccgacgcgctcaaggccgtcatgggcgacggcgacggcgacggcggcgaggtcagggcgcccttgccgctgctcgtcgtcatcgacgacgccgacaagccgacgggcgcccgcgtcggcgagctcgagtacgagcagctggtggcgcgagaagacccggcgaggtacccgcctcgtccgtggggcgtcggccacgagccggtctacctgtggtcgctcccgatgttccactgcaacggctggaccttcacctggggcgtggcggcgcgcggcggcacgaacgtctgcatccgcgcgccgaccgccgacgccatgtacgcggcgttcgccgcgcacggcgtcacccacatgtgcgccgcgccggtgctcttcaacatcctcctcgacggcgcgtgccgggagccgctgcgccgccccgtggaggtgctcaccggcggcgcgccgccgcccgcggcgctgctcgagcgcgtcgagcggctcggcttccacgtcacgcacgcctacggcatgacggaggccaccggcgtggtgatggtgtgcgagtggcgggagcagtgggacgccctgccaccgtcggagcgcgcgcggctcaaggcgcggcagggcgtgagcgcgctcaccctcgccgacgccgacgtgaaggacctcaagacgatggagagcgtgccccgcgacggcgccaccatgggcgaggtcgtgctccgcggcagcaacgtcatgaagggatacttcaagaacccgcgcgccacggcggacgcgttccgggacgggtggttcctcaccggcgacgtgggcgtcgtccacccggacgggtacgtggagatcaaggaccggtccaaggacgtgatcatctccggcggcgagaacatcagcagcgtggaggtggaggcggcgctgtaccagcacccggcggtgcgggaggcggcggtggtggccatgccgcacccgcactggggcgagacgccgtgcgcgttcgtggcgctgaagcgggagttcgccggcgccggcgaggtgagcgagcaggaggtggtgtccttctgccggaacaggatggcgcactacatggtgccgaggaaggtggtgttcgtcgacgagctccccaagaactccacggggaaggtgcagaagctcgcgctgcgcgacatggcgcgccgcctccgcctcagggcgcccgacaaggcgaggcccgtcgctgcccctgcccgccatgggccgttgactcaaactgctaggctttga

SEQ ID NO: 81246 - DNA, 531 bp, Oryza sativa
  Clone ID: PAT_MRT4530_80792C.1
tacccatgccgtcattatagaagccgagcacaatggggtggcccgtatgtgcgccatgctaagacacaatcgccgaaccctgatgggtgagtcgggttggctggggaagcaactccatattgacagtggccttgcctggtagatggtgtgattggcccatggctttatgcgtgatgctgcgagggatggaagcccgacagttctataagaagtaagtagggccagagtgagagtgtggcgcggtgtgtacgtccgtcggtgtgtcccccagaaagagccacgcggggtgtatcccggtgtcccgtaacgtaaaggccgtcgtcgtgttaatcggcagggttaaacgtgtagtagagtgtatgaggtacgtagtgcacagcccaaaagtaagaaaagccagtagtcaaagcgttggttgtggagtgccttgttgcccagtagttttatgtactttgttttgccaagaaccaaaattaaaccaaactgaggtcatgatgtcctttttctttccaaaaaaaaaaaaaaaaaaaa

SEQ ID NO: 81247 - DNA, 3030 bp, Oryza sativa
  Clone ID: PAT_MRT4530_80793C.1
atggcacggggctccgcaccgctcgaaggtagcgtgctgccgccttcccgcatcgtgagcgagaggcaggccgggctgccgcgccgattcatgccggaatctgttaccggccgggaggtggtcgcgctgggcgagggacgcccggcgccacactacccggggcgatccgtcttcttcctctctttcgcaatggcagggctggtcccgccattctcttctttcttcatggatgttctggagctttacgatctccagatggcgcacctcactcccaacgcggtaatgatgttggccatcttcgcgcacctgtgcgagatgttcatcggggtgcgcccatctctccggctgctccagtggttcttcaccgtacagccggtgtcgccgccgatggtagtcgatggctgctacttccagccgcgggggcaggtgctgcaccgctacattccctgcatccttcgcaagaagtgggacgactggaagagcgattggttctatactcccctcgccgacaaagcgcgcctccgacttccgagccagcccccagcgcaggcctccagctggcgagccccggtagatctgggagacggctacgacgccgttcttgaccgcctggcgggtctgcgatcccaggggctcacgggggccatggtgttcggcgactaccttcgtcgccggatcgtgccgctccagcggcgcgcccggggcgcctgggagtacaccgggtccgaggactacatgaggacccaccaggggagcaaatgggactgggtccctgaagacttcaagatggtggtccaacgggtgctgaatctcagctccgtggaggcatccctcatcccccaaggtatcctccccttctgcagcgattcagagcgcgccaacatcctgaccatcatgcagacggtcggggcgtcgggggagcgggcccctcgaggccacgatggcgcgggcgggagccgcaggggggaacaatctaccccaggagggggtcgtgcttctgggccccgcgacgggggcccggggggcagccgccctgccgacgccagggggaagaggaagcagcagggtaccccttccccatctcctccccgagggggtggggcggcgcgtgctagtcagcaggcgcccggagggtgccgtgccgtcgtcgcagcccgaggggagcgaaagaagaagtggctccgcaagatggggggaccgaaccatgccggggaaacctcatctcccccccaaggtggtcgtttagccgacctcctcgcaggttcatccccgcgcccactgcggccgtattcattctcccatctcccaaggcaagttttcactcacccgtttctttttgtcttctggtttttcttctgcctcagcgagatcccgtcgctcccccttcgccattccaagtccggccggtctgaggccgaggagacagcgaccgcggaggcccggaggcgggaagctgaccggcgagaagccgcggaccgccttcgggaagccgaggaagctgcccaggaggccgtccgggctcgccaggctgaggaaaacgctcgggaggaggccaggctccgccgggctgaggagtccatccgggaggcagaggcggcgcgcgcacgccaggcggcctgccaagcccccgacccgactccgcccgaggcgacgacaacttccgaggccacccacgacgaggctacgggcgcaccgctcgggcccgacccttcgggcgacgctcaggacgagccagcttcggggggcgtccccgagtccggcacgtcgatcggcgggccgagccgtgcggcaacctcaccaaggcggctctcccctatgccttccactgccccactgagcgcggagccccttctgcaggccttggctgccgcgaacaccacggtgttggacgggttaagtgcccagatggaggtcctgcaggcagagcggacggagctcgacgcggcgtgggcacgcgtcgaagaggggcgacgctcggtggaggcaatggtggaggcgggccgcaaggcacaccgccggcacacctcagagctcgaggcccgtcggagggagctggcggagatcgccagggaggtggaggaggagcgggagagtgccctcctcgccgccgccgtgctgaacgaggcgcgggacgacctccgcctccaatacgggagccgggcggcggagctagagaagaagctcgacgccgcccggggagtccttgacgccgccgctgcccgggaacggcgggcggcggagagcgaggcggcatcccggcggcgcgaagaggcccttgaggctcgcgccacggcgctggaggagcgcgcccgcgtgaaggagcgggacctggcggaccgcgaggccgtcgtcgccatccgggaggcaacactggcggcgcacgaggccgcctgcgccgaagaggagtccgcactccgcctccgcgaggacgcgctcaccgagcgggagcgagctctcgaggaggccgaggccacggcgcagcggctggcggacagcctgttccaccgcgaggcagcgcgggaggagcaggcgcgccggcgcgctggactcgtccgcttggcgggcgaagtagggcccggcatgcttcgggatgccgtctcccatctagaccgcgccgggcggcaggcgggcctctggggcgggcggactgcgaagtacgctgccaaccaagggggcctcgcccagcgcctctcagagatggccgggaccctccctcggctccccgaggaactcgaggagacgatcaagtcatcctcgagagacctcgccctgggggcagtggagctcgtactggcaagctaccaggccagggaccccgacttctccccgtgggcagcgctggacgagttccctcccggaaccgaggacggcgcgcgcacgcaggttcgggacgccaccgaccacatcgtccacagttttgagggtacgacccctcggctcgcgttcgcccttgactccgacgaggagggcggtgatggtggtgcggacgccagcggcgacgaggccggcgacccgggcgcgtcggaatga

SEQ ID NO: 81248 - DNA, 2039 bp, Oryza sativa
  Clone ID: PAT_MRT4530_80794C.1
cggacgcgtgggcggacgcgtgggcggacgccaaagctcgaatcttgctgaaaaaggagggagcttttggggtagggatcatggctcacctgctgcagcttccagacctcgcggcggcgaggccgccggcggcgcggaggaggatcgcggcggcggcggtggtggtggcggaggccaggggcggggtgaagcagcagcagcagcaggtggcggtggggagggtgatcagggtcgccgaccccgtgcgggaggggaggctgctgctgctgccgccgccgctcttctccgtgccggtcacgccgtcggagtcgccggcggcggcgaggcggcgggaggaggacgaggaggagcggcggaggtactacctcaacatggggtacgccatccggacgctgagggaggagctccccgatgtcttctccaaggagcccagcttccacatctacagagatgaagttgtcttgaatgatcctctacatagattcgattgtattcaaagatcttatcaaaaaatttgagcgttgtgctaattataaaaagattttctgggaatagcgcttcaccagccgaatcttatatgaagccctatggatagatatagtaagtatagggcagcctgctgagaatcttatcatgattcgctggattgcccatggcattcctcgagtcccactgggaggcccatggtcgctttgatggtgcttctgagtataaactcgacaagaatgggaagatctacgagcataaggtgcacaatgttgctatgaatccaccaacaaagttcaaggtcctgccagtccacgagctaatcagatcgcttggctgcccctccacaccgaaaccaccttattttgagacttcatctcaatctttgagcgttgagccaggttatttaagattggcactggacaagatgctacctactgttatgccatatgcttgcggtctgggacttcgccagacaggatacaaacagggtcacctttgcactcaaggttggccttgcttgcctccttgtgtcactgctcatactcttccgtgcaccctatgacatctttggggctaacatcatctggtccatcctcactgttgctataatgttcgagtacactgttggtgcaacattcaatcgcggattcaatcgagccgtcggaagtgtatttgctggagtatttgcagtagttgttattcaggtggctatgtctagtggccatattgcagaaccatacatcattggtttcagcatatttctcattggggagcaactgcacagggagctagttaacagcttcaactctctcgcagactccttagaagagtgtgtcaagaagtatctaagtgatgatggttccgaacatccagagttctcaaagacagtcatggataacttccctgatgaaccagcattcaggaagtgccgagctacgttaaattcgtcagcgaagtttgactctctggccccatacaacctaaggtgtgccttcaagtccgagatcttagatgccacaaagcaagcagcggagctgttgcgcggtttggcaaaagatttaaacaacatgaagtggagcctccaaactagcttacttaagcatgttcatgtctcgaccgagcgtctgcaacattcaattgacttgcactcctacctgttcaccgcaagtcaggaagacaactatgccaaaccacaattgaaaatctcaagggttgtgtctttcaagaaccagtccggtgaaccagaaagcaagacaactgaaaccagaacaccaatggcgatggaagttgaatcctaccatgagatgatgaaaaggcagcagaggaagctgcattcatggccttccagggaggtggatgattttgaagatgacgaaaatgttgtttctgatctcattccaaggatgcgtgcacttgaaagcaccacagcgctgtcacttgcaactttcacatcactactgattgaatttgttgctaggcttgatcatttggttgaggctgctgagaggcttgctacgatggcaaggttcaagcagcagattgcaaactaa

SEQ ID NO: 81249 - DNA, 1131 bp, Oryza sativa
  Clone ID: PAT_MRT4530_80795C.1
atggcggtccgcctccgtgcctgtggcttctgcaatggcggacgagagcaatggcggcggcgcgtcgccagtcgccagccgccgtcgtcgtgtcgcccgtcgccggccgccgacgccctcgtcctctccctcctctccccaccgaaggcagcaacccaccgacgtcctccccagctgcctacccaaacaggagaagaggccaccggactaccagaggaggatgagagggagaagaagattgtgattcctcgcgtcccctggatggcgacctgccaggacgccgagacgaggggaagcaccggggcgcgttggagccttttgagagacgtcacgctgtttggcgccgaggacggacggggcgaacgcgaggcgcaccacccgaggctcgcgtccgcaccccgcgccgcccgatcccgatccgacggcccgcgcgctccccgaccggccgcggagacgcggagccgcaccccccgcaacccaggagcccgggaggctggaacttgttccgcccacgaggccgcgtggatcgacggcgccgaggcgcagggccacgccaccgtgttcgtcgccaagttctttggccgcgccggcctcatgtccttcctcaccgccgtccccgagccgcagcgcgcagcggtgttccagtcgctgctgtacgaggcggcggggaggacgatcaacccggtgggcggcgcggtcgggctgctctccggcgggagctggcacctctgccaggcggcggtcgacaccgtgctgcgcggcggaggcatccaaccgctgccggaccaggtcgacgccgccgccgccggtggccgcgacgtgttcgcctccacggcgaggcgcgccatgggcgggtgctccacgttctcgacggcgaagcggtcgacgacgacgacgacgaccaagaaccccggtactccgcatgacgccgccgccgcggcgccccagccggaaccgtcgtgcgacctcggcctgtggctcagccccggctccccgccggcgcccggggaccggcgatccggcggcaggcgggccgacacgccgtcgatgaactccgagggatccgtcacgacgtgcggcgtcgtcggcgacggcgagagggagcccgagctgctgaatctttttgtctag

SEQ ID NO: 81250 - DNA, 2901 bp, Oryza sativa
  Clone ID: PAT_MRT4530_80796C.1
atggcacggggctccgctctgctcgacggtagcgtactaccgccttcccgcattgtgggcgagaggcaggctgggctgccgcgccgcttcatgccggaatccgccaccggccgggagatagtgatgctgggcgaggcgcgcccagcaccagattacccggggcggtccatcttcttcctccccctcgcaatggccgggttggttcctcctttttcttctttctttatggatgttctggagttctacgatctccagatggcgcacctcacccccaacgcagtgatgactttggccatcttcgcgcacctgtgcgagatgttcattggggtgcgcccatctcttcggctgttccggtggttcttcaccgtgcagtcggtgtcgccgccgtcggtggtcggtggttgctacttccagccgcgggggccggtgttgaaccgctacatcccctgcgccctccgcaagaagtgggacgattggaagagcgactggttctacaccccccttgccaacgaagcgcgcctccgactcccaagccagcccccggcgccggtctccagctggcgggcgccagtagatctgggggatgactatgacgccgtcctcgaccgcctggcgggcctgcgatctcaggggctcacaggggccatggtgtacggcgactacctccgtcgccggattgcgccgcttcagcggcgcgcccggagcgcatgggagtacaccgggtccgaggactacatgaggacccaccggggagtcagatgggattgggctcccgatgacttcaagatcgtggtccaaagggtgctgaatctcagctccgtggaggcgtctcttattcctcaaggactcctccccctctgctgcgatccagaccgcgcctccattctgaccatcatgatgggggtcggggcctcagaggaggtggctcctaagggccacgacggcgccggcgggagccgccaggaagaatcaaccccaggagggggccgtgcttctgggccccgcgacgggggctcggggagcaaccgccctgccgccgcccgggggaagaggaaacagggaggaacacctcccccatctcctccccgagggggcggggcggtgcgtgccagcagcaggcgcccggagggggccgcgccgacgtcacagcccgagacggagcgcaagaagaagcggctccgcaagacgggggagacggaaccatcccggggaaacctgatttcccctccaaggtggtcgttcaaccgaccccctcgcagcgatgtcccgtcgcgttcctcccgccatcccaagtccggccaatccgaggccaaagatccggcggccgcagaggaacggaggcgagaatctgaccggcgagaggccgcagatcgccttcgggaagctgaagaggccgcccgggaggccgctcgggttcggcaggcggaggataccgctcgggaggaggccgcccgggctcgccaagccgaagaagctgctcgggaggaggccgcccgggctcgtcaggctgaagaagccactcgggaggaaaccgcccgggctcgccaggctgaggcgatggcgtcttccgaggcggttcacgacaagaccgccggcgcgtcgctcgggcccactccctcgggtgacgctcaggcgacaacctccggggcggctcgcgacaaggccgcgggcgcatcgcctgggcccgctccctcgggcgacgcccaggaccaaacgggtccgggggacatccccgagctcacgcccaggtggaggccttgcgagcggaacgagcggagctcgaggccgcatgggcgcgcgtcgaggaggggcggcgctcggtggacgccatgtggaggtggccgtaaggctcaccgccgccacatctcggagcttgaagcccgcaaggcggcgctggcggagatcgcccgagaggtggaggaggagcgagaggccgccctcatcgccaccaccgcgatgattgaggcgcaggactccctccgccttcaacacgggagctgggaggcggagctaaagaaaaagctcgacgccgcccagggggtccttgacgccgccgctgcccgagagcagcgagcaacggaggctgaagcggcatcccgacggcgggaagaggcccttgaagcccgtgccatggcgctggaagatcatgccggcgccgtggagatcagcttggcggaccgcgaggccgccgccgctatccgggaggcgacgctggcggcgcacgaggccgcctgcgccgaagaggagtccgcgctccggctccgcgaggacgcgcttgctgagcgggagcgagctcttgaggagtccgaggccgcgacacaacggctggcggacagcctgtccctccgcgaggcagcgcaggaggagcaggcgcgccgcaatctggaatgcatccgcgccgagagagccgcgctggagcagcgggctgctaacctcgaggcgcgagaaaaggagctggacgcgagggagcgcagcggcggggcggctacgggcaaaagcgacttagtcgcccgcctcgcagctgccgaacacaccgtcgcggacatgcagcgcgccctggactcatccaccggggaagcggaggccctccgcttgtcggagctcgagaagaccatcaagtcatcctcgagggacctcgcccaaggagcggtggaactcgtgttagcgagttaccaggccagggaccccggcttctccccatggatggcgctggaggagttccctcccgggaccgaggacgatgcgcgcgcgcgggtccgggatgccgccaaccacatcgtccaaagcttcgaggggtcggcccctcggctcgcgttcgcccccagctccgacgaggagggcgacgccagcggtgaggacgacggtggcgacgaggccggcgacccgggcgcattggaatga

SEQ ID NO: 81251 - DNA, 2847 bp, Oryza sativa
  Clone ID: PAT_MRT4530_80797C.1
atggcacggggctccgcaccgctcgacggtagcgtgctgccgccttctcgcatcgtgagcgagaggcaggccgggctgccgcgccgattcatgccggaatctaccaccggccgggaggtggtcgcgctgggtgagggacgcccggcgccacactacccggggcggtccgtcttcttcctctctttcgcaatggtagggctggtcctgccattctcttctttcttcatggatgttttggagctttatgatctccagatggcgcacctcacccccaacgcggtaatgacgttggccatcttcgcgcacctgtgcgagatgttcatcggggtgcgcccatctctccggctgttccggtggttcttcaccgtacagccggtgtcgccaccgtcggtagtcggtggctgttacttccagccgcgggggccggtgctgaaccgctacattccctgcgtccttcacaagaagtgggacgactggaagagcgactggttctacacccccctcgccgacgaagtgcgcctccgacttccgagccagcccccggcgcaggcctccagctggcgggcgccggtagatctgggagacggctacgatgccgttcttgaccgcctggcgggtctgcgatcccaggggctcacgggggccatggtgtacggcgactaccttcgtcgccggatcgcgccgctccagcggcgcgccaggggcgcctgggagtacaccgagtccgaggactacatgaggacccaccagggggtcaaatgggactgggtccctgaagacttcaagatggtgatccaacgggtgctgaatctcagctccgtggaggcatccctcatcccccaaggtgtcctccccctctgcagtgatccagagcgcgccaacatcctgatcatcatgcaggcggtcggggcgtcgggggagcaggcccctcgaggccacgatggcgcgggcgggagccgcaggggggaacaatctaccccgggagggggtcatgcttctgggccccgcgacgggggtccagggggcagccgccctgccgacgcccggggaaagaggaagcaggagggtacctcttccccatctcctccccaagggggcggggcgcgagatcccgtcgcgcccctccaccccccccccccccgccattccaagtccggccggtctgaggccggggagacggcgaccgcggaggccaggaggcgggaagctgaccagcgagaagccgcggaccgccttcgggaagccgaggaagctgcccaggaggccgtccgggctcgccaggctgaggaagccgctcgggaggaggccagactccgccgggccgaggagtccgtccgggaggcggaggcggcgcgcacacgccaggcggcctgccaagcccccgacccgactccgcccgaggcgacgacgacttccgaggccacccacgacgaggccgcgggcgcaccgctcgggcccgacccctcgggcgacactcaggacgagccagcttcgggggacatccccgagtccggcacgtcgatcggcgggccgagccgtgcggcaccctcaccgaggcggctctcccccatgccttccgctgccccactgagcgcggagccccttctgcaggccttggccgccgcgaacaccacggcagagcgggcggagctcgacgcggcgtgggcgcgcgtcgaagaggggcgacgctcggtggaggccatggtggaggcgggccgcaaggcacaccgccggcacacctcagagctcgaggcccgttggagggagctggcggagatcgccagggaggtggaggaggagcgggagactgccctcattgccaccgccgtgctgaacgaggcgcgggacgacctccgcctccaatacgggagccgggcggcggagctagagaagaagctcgacgccgcccggggggtccttgacgccgccgctgcccgggaacggcgggcggcggagaacgaggcggcgtcccggcggcgcgaagaggcccttgaggctcgtgccacggcgctggaagagcgcgcccgcgtgaaggagagggacctggcgcaccgcgaggccgccgtcgccatccgggaggcaacactggcggcgcacgaggccgcctgcgccgaagaggagtccgcactccgcctccgtgaggacgcgctcaccaagcgggagcgagctctcgaggaggctgaggccgcggcgcagcggctggcggacagcctgtccctccgcgaggcaacgcgggaggagcaggcgcgccgcaatctggaaggcgcccgcgccgagagggccgcactggatcagcgggccgctgagctcgaggcgcaggcaaaggagctggacgcgagggcgcgcagcggcggggcagccgcgggcgacagcgacctagtcgcccgcctcgcagctgccgagcacaccatcgccaagctgcagggcgcgctggactcgtccgccggggagaccgcgccgggcggcaggcgggcctctggggcgggcaggaccgcgaagtacgccgccaaccaggggggcctcgcccagcgcctctcagagatggccaggaccctccagcggctccccgaggagctcgaggagacgatcaagtcatcctcgagagaccttgcccggggggcagtggagctcgtactggcaagctaccaggccagggaccccgacttctccccgtgggcagcgctggacgagttccctcccggaaccgaggaaggcgcgcgcgcgcaggtccgggacgccgccgaccacatcgtccacagcttcgagggtacggcccctcggctcgcgttcgccctcgactccgacgaggaggttggtgacggtggtgcggacgacagcgacgactag

SEQ ID NO: 81252 - DNA, 300 bp, Oryza sativa
  Clone ID: PAT_MRT4530_80798C.1
atgacggcggagcttggccgctcaatcgcacgtgctgcagagggggaacactgtattggtggacttggatctgatcaatttgatgaaggctttaggggaaaagtttgtaacggaaggcaccagtacaagagtttgaattggctgatcaaatcattttttgagtatgacaagtgtgctcaatgtgaatcacaaggatcatcaggtgttgggcaatataaatctactgctgatgctgccggccgggacgacaatgttgatggagcttcatcctcgtcaatagcgacaggtcgttcatcatga

SEQ ID NO: 81253 - DNA, 218 bp, Oryza sativa
  Clone ID: PAT_MRT4530_80799C.1
atggaagccacaaactcagcacagcactatgataggagatacacagctcttcgtagggagccgagtgttgcgaatctccgagctagggcgtcggggcagattgggacagaacacatgcacattagcctgagattgggcacgaggctaaagtacatgtacctccagaagctgcaaagaattgtggtcatattatcctctcatcctcacctcgccataag

SEQ ID NO: 81254 - DNA, 2109 bp, Oryza sativa
  Clone ID: PAT_MRT4530_8079C.1
agctcgcccccggtgcccccgcgctccggcgggcgctgtccgccgccgcgagccgcccccgcccctcgacgcctccctctcccccccccccgcccccccctcctcctcctcctccccctccctcgccgccgccccaccctgcccagttcggctggtcctctcccgctagctctgctcttgttctctcttcaacaaacaaacccggccatcgatcgccgattccttcgagggctctggacacctgctacaccttgatatacctaagttgctctgctgtatttctcaatggagcatctttccgaggaactgatcatagagattctcaagaggattacaaggacaagcgatctgaattctgtttctcttgtgtcgaagcagctctacgccatcgatgcggagcaaagggctactatttgcattgattgtggactttcaacagaagatttctcagcactttgttcccggtttcctaatttgctcaaagtagagatcgataactctggttcgacacctggcaatgggaaccatattgacaaccaaggtctctttgttcttacatcttcttgtaattcgcttaatgatctcaccttaagcttctgctcaaagatcaatgatgctggtattgctagcctaacttactgcaagaagttgatgtctctgaagctgaactccataccagatgtaacttcaagtgggcttctcttggtagctttcggttgcaaggctctatcttctctctaccttaatgattgcaagggaattgcagccagcactgagtggctggagtaccttggcagtgatggatcattggaagaactcgtcgtcaataattgcccgggaataagccagtatgactttttaaagtttggtcgaggatggatgaagcttaagaaatttgtgtttgtaaacaaggaaaccatggtgaaccacttcatcactcgccatgacccctcatacaatgctaactgtgtgtataaatatgatctgtgctgtgagaatttggaggatttaaggctggctcgacttcgaacagagccagaaggtccagaaataggactacgttttctgctaaggaagtgcaaggcgttagagaaactatgcctcgagtatgttggcggtcttattgacaaggacatgattgtgctatcccagagctgcaagaaccttaaaagcatctcactttggatgatgcctcgacgcttccatgaacatgaggttcttaggatgggtttcaccgatgaaagccttgagatgctagcccacaactgtccattacttcaggatctcgagctcacatttgcaggtgttgaggacttggaatatccggaaataggcttcacacaggagggacttgtgaagctcatgcattcttgtccaatccgttctctcacactaaacggcaccctcttcttcaatgacaaggggatgaagggactctcatctgcaccgttcctgaagacactccgcctcgtcgattgcaagaagataactgattacggaatgtgcttccttgtgcactacccatgcctggctgatctcaagcttcagtattgttctggtttgacagatgttggaatagctgagcttgtacatgcacagaaattacagtctctggttgttgaaggctgctctaatatatctgaacatgctgtgcagggctcagctagatcagtccagtactttcccaactcggccagatcaggtgctacccatcttaaaagactcgttgattgagtcattgcttagagtgcatcattagcattaaccagttatctttttctcgtcttactattcaccatcattttgtacttgccagtacttaattgctgtggaaagctctagcataagaacgtgttatggtgtagattgtggaatgaacgaaaatcctcagtgacttccagcactagtgttctcaagatggttctgcttattttgtcttgaatgaagttcagaattcatctttcaccatcattttgtacttgctagtactatcagttagtctttttattgctgtggtccctgtagcataagaacggcttcttgtgtattttggaagatggctcaatgaatgaaaatcctcaatgatttccagcaaaaaaaaaaaaaaaa

SEQ ID NO: 81255 - DNA, 668 bp, Oryza sativa
  Clone ID: PAT_MRT4530_807C.1
ccggccgggaaaaatccaccgcgccgcctcctctccatcggtctccctcaccggcgcatcctcctccgccgcatctcccctcctcccgtcgcctccccagcaacctccgccgccgccgccacgacgacgagcctccgagtccgacaaccggcaatggcgccaaccctgccttccgcacgccgcacctccgcaccgcctaccgcaagccggtgccacccgtggcggcgacgggggagggcgaggcggtcctcgccgtggctcctcactccccgctcctcaccttcctcttccccatcggccttctccccgatcgcctccctcgtccaactactcctcccttccagagaagcgctgccactgtgatccttttccagacgcgagctcgaaggcgctggttgcccccaagctcgaagaggtcgaggaggctttgggctgttcgatctggcgccgctgagctcagcacgatgaaggccgaggaggcgaggcgcacctccaccgttgcccctcgcctccccatcttcctctccctgcccgatctggcccgaggactcgaggagtggagagggggaggagccacggtgatgttgtggtcgctcgccgagtcgccgttgtctgcagcttctggaaaggttcattccgatcttacttaccctcgcgcttccacctag

SEQ ID NO: 81256 - DNA, 3432 bp, Oryza sativa
  Clone ID: PAT_MRT4530_80800C.1
atggcacggggctccgcaccgctcgatggtagcgtgctgccgccttctcgcatcgtgagcgagaggcaggccgggctgccgcgccgattcatgccggaatctgccaccggccgggaggtggtcgcgctgggcgagggacgcccggcgccacactacccggggcggtccgtcttcttcctctctttcgcaatggcagggctggtcccgccattctcttctttcttcatggatgttctggagctttatgatctccagatggcggacctcacccccaacgtggtaatgacattggccatcttcgcgcacctgtgcgagatgttcatcggggtgcgcccatctcttcggcagttccggtggttcttcaccgtacagccggtgtcgccaccgtcggtagttggtggctgctacttccagccgcgggggccggtgctgaaccgctacattccctgcgtccttcacaagaagtgggacgactggaagagcgactggttcaacacccctctcgccgacgaagcgcgcctccgacttccgagccagcccccggcgcaggcctccagctggcgggcgccggtagatctgggagacggctacgacgccgttcttgaccgcctggctggtctgcgatcccaggggcttacgggggccatggtgtacggcgattaccttcgtcaccggatcgcgccaccccagcggtgcgcccggggcgcctgggagtacaccgggcccgaggacatcatgaggacccaccatgggcgcaaatgggactgggaccctgaggacttcaagatagtgatccaacgggtgttgaatctcagctccgtggaggcattcctcatcccccaaggtgtcctccccctctgcagcgatccagagcgcgccaacatcctgaccatcatgcaggcggtcggggcgtcaggggagcgggctcctcgaggccacgatggcgcgggcgggagccgcaggggggaacaatctaccccgggagggggtcgtgcttctgggccccgtgacgggggcccggggggcagccgccctgtcgacgcccgggggaagaggaaacaggaggataccccctccccatctcctccccgagggggcggggcggtgcgtgccagcagcaggcgcccggagggtgctgtgccgacgtcgcagcccgagggggagcgaaaaaagaagcggctccgcaagataggggggatcgaaccatgccggggaaagctcatctccccccaaggtggtcgtttagccgacctcctcgcaggttcgtccccgcgcccactgcggccgtattcattctcccatctcccaaggcaagttttcactcacccatttttcgtcttctggtttttcttctgcctcagcgagatcccatcgcgcccttcctgccattccaagtccggccggtctgaggccgaggagacggcgaccgcggaggcccggaggcgggaagctgaccggcgagaagccacaaaccacctccaggaagccgaagaagctgcccaggaggccgtccgggctcgccaggctgacgaagccgtttgggaggagaccagactccgccgggccgaggagtccgtccgggagacggaggcggcgcgcgcacgccaggcggcctgccaagcccccgacccgactccgcccgaggcgacgatgacttccgaggccacccacgatgaggccgctggcgcaccgctcgggcccgacccctcgggcgacgctcaggacgagccagcttcgggggacgtccccgagtccggcacgtcgatcggcgggccgagccgtgcggcatccttaccgaggcggctctcccccatgccttccgctgccccattgagcgcggagctccttctgcaggccttggccgccgcgaacaccacggtgttggacgggttaagtgcccagatggaggtcctacaggcagagcgggcggagctcgacgcggcgtgggcgcgtgtcgaagaggggagacgctgtcgcgaccgagaaaattgccttttcccgaacgctagtgtattgatccccgtcccaggaaaagccgggactgagccacaaactaagccttacccactagacatgtggaagtacggtagtgctttgcaacagaggcccgagcttaatccttatagtacccgagggaatgatttttatttcgggatgaatttatcaggacgtgacagacgctcggtggaggccatggtagaggcgggccgcaaggcacaccgccggcacacttcagagctcgaggcccatcggagggagctggcggagatcgccagggaggtggaggaggagcgggagactgccctcatcgccaccgccgtgctgaacgaggcgcgggacgacctccgcctccaatacgggaaccgggcggcggagctagagaagaagctcgacgccgcccggggggtccttgacgccgccgctgcccgggaacggcgggcggcggagaacgaggcggcgtcccggcggcgcgaagaggcccttgaggctcgcgccgcggcgctggaagagcgcgcccgcgcgaaggagagagacctggcggaccgcgaggccgccgtcgctatccgggaggcaacactggcggcgcacgaggccgcctgtgccgaagaggagtccgcactccgcctccgcgaggatgcgctcaccgagcgggagcgagctctcgaggaggccgaggccgcggcgcaaaggctggtggacagcctgtccctccgcgaggcagcgcgggaggagcaggcgcgccacaatctggaaggtgcccgcgccgagagggccgcactggatcagcgggccgctaagctcgaggcgcgggcaagggagctggacgcgagggcgcgcagcggcggggcggccgcaggcgacggcgacctagccgcccgtctcgcagccgctgaacacaccatcgccgagctgcagggcgcgcttgactcgtccgccggggaggtcgaagccctccgcttggcgggcgaggtagggcccggcatgcttcgggacgccgtctcccgtctagaccgtgccgggcgacaggcgggcctctggggagggcggaccgcgaaatacgccgccaaccaggggggcctcgcccagcgcctctcagagatggccgggaccctccagcggctccccgaggagctcgaggagacgatcaagtcatcctcgagggacctcgcccgggggacggtggagctcgtactggcaagctaccaggccaaggaccctgacttctccccgtgggcagcgctggacgagttccctcctggaaccgaggatggtgcgcgcgcgcaggtccgggacgccgccgaccacatcgtccacagcttcgagggtacggctcctcggctcgtgttcgccctcgactccgacgaggagggcggtgacggtggtgcggacgacagcgacgatgaggccggcgacccgggcgcgtcggcgtga

SEQ ID NO: 81257 - DNA, 1989 bp, Oryza sativa
  Clone ID: PAT_MRT4530_80801C.1
atgggtcccgtttctggcatcgacgacttcatcttccctcccgggcaggcgttccggttcagcagcctcaatttcatcaccaatgacttcggcaagatctctctccttgattcggattcaaaccagtcggggagagaccaggtccctgtgccgttcggtattccaaactcggccgaggcttactccaagatcatctctcccgagtcggcttcaaaccactcggacgagatccaatctactcttccgcgaccagatcaagacgacgggtcctatcccccaatcctgatgaaacttcctgatgatttggccactgtcttcacagtcaagatatctcccactcgaagatctaggcgagctccggcttcggccccgatccaatctagatccagggaggttggcgttatactccaacctcttgggacagtctcgacggaagagttggatggctacctcagctcccccggcgtcagttctcgaccaaccgagatcctcgactacgatgacttcggctaccactacgaccatggcgacctcgacaacttcgacgacagctatgaggataactacacgcccctcttcttcggcgtattcatggccgacaacgaaacggaggaacagcgccaagcccgagaagcggaccaagatcgcgcacggcaagaagctgaacgtcgccgactggaggaagagcgacagcgacaagagcgagaacgactacagcgtgagcaacaggatcgcgaacagattgcaaaggaggctgaagaccgacgacagcacatcttggaatctgggcagcgagcgagagagctcattgggcaacaagacgtcgatgggacagcggtctttcgcaccccccagcagaacgcggttgcagcaatcactctcctcgacaccctcctcaaggaagtcgcactcaaccaagctgatcatccaactccgcaagcactcgcacctcgactggtagctgagtccctcatcttcgatctcaagactatcactagccaagcctcagcattgccggcgccggatctagtcgcaggagcaggggacatgatgaacgccagctttaagccgactggaatcgagaaatatgacggcaccaccaatcccgagtcttggcttaccgtctatggtctcgcaatccgcgcagcaggaggagacaacaaagccatggcaaattatctacctgtggccctagcggattctgctcggtcatggctccacgggctaccccgcggcacgatcggatcatgggcagaactacgcgaccacttcattgccaacttccagggtacctttaaacgccccagcacacagtttgatctctacaacgtcgttcagaagcctggagaatcccttcgagattacatccgacgcttctccgagaaacgcaacaagatctccgacatcactgacgacgtcatcatcgccgcctttaccaaaggcattcgccacgacgacctagtcggcaagttcggacgcaaacctcccaggacggtcaagcagatgtttgaaaaagtcaacgagtatgccaaatccaaagatgctattaccgcgtccaagcagtcgggcaccatttggaagccaaagaaggacaagccgactgcaggagggagtggaagtaacaaccacaaggatcgcaagtgtaagcccgaagaacttgtggcaacaacctctccatcttcccgacaacgttcccgcgtcaacaccttcgacaagataatgaactcccaatgtccgcatcatcccaactccaaccacatggccaaagattgcttcgtctacaaacagttagcggagcaatacgtcaagaatgcacataaaccctcagacggagatcaaggcacatcaaagaagaaagatgatgaagacgatgccccgactggttttcaagatcatcgcaaagaactcaatcacatcttcggcggacccctgacttatgaatctaagagaaagcagaagttaacagaactggagatcaatgcagtttag

SEQ ID NO: 81258 - DNA, 3054 bp, Oryza sativa
  Clone ID: PAT_MRT4530_80802C.1
atggcacggggctccgcactgctcgacggaagcatgctgccgccttctcgcatcgtgagcgagaggcaggccgggctgctgcgccgattcatgccggaatctgccaccggccgggaggtggtcgagctgggcgagggacgcccggcgccacactacccggggcggtccgtcttctttctctctttcgcaatggcagggctggtcccgccattctcttctttcttcatggatgttatggagttttataatctccagatggcgcacctcacccccaacgtggtaatgatgttggccatcttcgcgcacctgtgcgagatgtttatcggggtgcgcccatctcttcggctgttccggtggttcttcaccgcacagccggtgtcgccgccgtcggtagtcggtggctgctacttccagccgcgggggccggtgctgagccgctacattccctgcgtcctccgcaagaagtgggacgactggaagagcgactggttctacaccccctcgccgacgaagcgcgcctccgacttccgagccagcccctggcgcaggcctccagctggcgggcgccgaggggccatggtgtacggcgactaccttcgtcgccggatcgcgccgctccagcggcgtgcccggggcgcctgggagtacaccgggtccgaggattacatgaggacccaccaggggggcagatgggactgggcccctgaggacttcaagatggtggtccaacgggtgttgaatctcagctccgtggaggcatccctcatcccccaaggagtcctccccctctgcagcgatccagatcgcgccaacatcctgaccatcatgcaggcggtcggggcgtcggaggagcgggctcctcgaggccacgatggcgcgggtgggagccgcaggggggaacaatctaccccgggagggggtcgtgcttctgggccccgcgacgggggcccgaggggcagccgccctgccgacgcccgggggaagaggaagcaggagggtaccccttccccatctcctccccgagggggcggggcggtgcgtgccagcagcaggcgcccggagagtgccgtgccgacgccgcggcccgagggggagcgaaagaagaagcggctccgcaagatgggggagaccgaaacatgccggggaaacctcatctcacccccaaggtggtcgtttagccgacctccccgcagcgagatcccgtcgcgcccccctcgccattccaagtccggccgatctgaggccgaggaggcggcgaccgcggaggcccggaggcgggaagctgaccggcgagaagccgcagaccgtctccgggaagccgaggaagctgcccaggaggccgtcccggttcgccaggctgaggaagtcgctcgggaggaggccagactccgccgggccgaggagtccgtccgggaggtggaggcggcacgcgcacaccaggcggtctgccaatcccccgacccgactccgcccgaggcgacggcgacttccgaggccacccacgacgaggccgcgggcgcaccgctcgggtccgacccctcggacgacgttcggaacgagccaacttcgggggacgcccccgagtccggcacgtcgatcggcgggccgagccgcgcggcgcccacaccgaggcggctctctcctctgccttctgctgccctaccgagcgcggagcccctcctgcaggccttagccgccgcgaacaccacggtgttggacgggttaagcgcccagatggaggtcctgcaggcggagcgggtggagctcgacgcggcgtgggcacgcgtcgaagaggggcgacgctcggtggaggccatggtggaggcgggccgcaaggcacaccgccggcacgcctcagagctcgaggcccgtcggagggagctggcggagatcgccagggaggtggaggaggagcgggagactgccctcatcgccaccgccgtgctcgacgaggtgcgggacgacctccgtctccaatacgggagccgggcggtggagctagagaagaagctcgacgccgcccggggagtccttgacgccgccgctgcccgggaacggcgggcggcggagaacgaggcggcgtcccggcggcgcgaagaggcccttgaagctcgctccacggcgctggaagagcgtgcccgcgcaaaggagagggacctggcggaccgcgaggccgccctcgccatctgggaggccacactggcggcgcacgaggccgcctgcgccgaagaggagtccgcactctgcctctgcgaggatacgctcaccgagcgggagcgagctctcgaggaggccgaggccgcggcgcagcggctggcggacaacctgttcttccgcgaggcagcgcaggaggagcaggcgcgccgcaatctggaaggcgcccgcgccgagagggccgcactggctcggcgggccgctgagctcgaggcgcgggctaaggagctggacgcgagagcgcgcagcggtggggcggccgcgggcgacagcgacttagccgcccgcctcgcagctgccgaacacaccatcgccgagctgcagggcgcgctggactcgtccgccggggaggtcgaggccctccgcttggcgggcgaggtagggcccggcatgcttcgggacgccgtctcccgtttagaccacgccgggcggcaggcgggcctctggggcgagcggaccgcgaagtacgccgccaaccaggggggcctcgcccagcgcctctcagagatggctgggaccctccagcggctcctcgaggagctcgagaagacgatcaagtcatcctcgagagacctcgcccggggggcagtggagctcgtactggcaagctaccaggccagggaccccgacttctccccgtgggcagcgctggacgagttccctcccggaaccgaggacggcgcgcgcgcgcaggtccgggacgccgccgactacatcgtccacagcttcgagggtacggcccctcggctcgcgttcgccctcgactccgacgaggagggcggtgacggtggtgcggatgacagcgacgacgaggctggcgacccgggtgcgtcgaagtga

SEQ ID NO: 81259 - DNA, 1512 bp, Oryza sativa
  Clone ID: PAT_MRT4530_80803C.1
gaccaccccggccgggtttgcaaggttctggtaaaactactacttgtaccaaatatgcatattatcatcagcgcaagggatttaagccagcacttgtttgtgctgatacatttagggctggtgcttttgatcagttaaaacagaatgcaacaaaggccaagattcctttttacggaagctacatggagtctgatccagtgaaaattgctgttgagggtgtggagaggttcaagaaagaaaactgtgatctcatcattgtagatacgagtggaaggcacaaacaagaagcagccctttttgaagaaatgcgccaagtttcagaagcgacgaaaccagatctggtaatatttgtgatggacagtagtatcggtcaggctgcatttgatcaggcacaagcatttaagcaaagtgtttctgttggtgctgtgattgtcactaaaatggatggccatgcgaaaggaggtggcgcacttagcgcggttgcagcaacaaaaagtccagtgatatttattggaacaggagaacacatcgatgagtttgaagtttttgatgtgaaaccatttgtcagtcgtcttttaggcatgggagactggtcggggtttatggacaagattcatgaagtagtacccactgatcaacaacctgagcttttgcagaagctgtctgaaggaaccttcactctgagacttatgtatgagcagttccagaacatcttgaaaatgggtcctattggccaggttttctcaatgttgcctggatttagttctgaattgatgccaaagggacatgagaaggaaagccaagctaagattaaacggtacatgacgatgatggattccatgacagatggagagcttgacagcacaaatcctaaattgatgactgaatcgcgtattcttcggattgctcggggatctggccgacctgtcagagatgttgtcgacatgctcgaagagtacaagcggcttgctaaaatctggagcaagatgaaagggctcaagataccaaagaaaggagaaatgagtgcactgtcccgcaacatgaacgttcagcacatgagcaaagttctcccgccgcagatgctgaagcagataggcggcatgggtggcctgcaatctttgatgaaacaaatgggctcaaaagaaatgggtggcatgtttggaggcatgggtggtgataagtaaacagatcctgattgcatttgacaaatcgtcagagatatggctgtagacagattgttcaccagggtgctaaatgagagttttgaagatgatactgactgctgcaattatgttaccagatgaggatacacatgcaccccgatgtaaaatttgtttatcataggcaaatcgtagctccccaaagttcttaccgagattttatttatagaatctgtttgggaagaattaccgaatccgcgttttgttttgtttcctgcgtgctactcagacgtgtaagcaccctaaataaaatcaacgaagttttgggcctcttttaaaaaaaaaaaaaaaa

SEQ ID NO: 81260 - DNA, 4584 bp, Oryza sativa
  Clone ID: PAT_MRT4530_80804C.1
atgtcgaacaaaccaatatttcaagtttaccatggaccaggaaacgtccgttacgggccaactggggtagatctgtcagattttattgtatcagaaaggggaattgagagaccggctgagaggagtgtaccttctataaaaggatggttaatgaggggtttgagagttgatccacagacaagtgacataacaatcaatgttatagtaagtcgggcaattgggaactaatgccagttcaaaactcccaagtgtggagatggtatgtggaaaatgcaatgcaacgtgggtggcctctagctttggttccgtttgtgcacccgaaggatccaggtgtgcagatgaacatggatgatagcgagggaccaagcgctgaagtaaatgagacttctgtggaggaggtcaacgcaggagtggacgggggcgtagtagctccagtgggcattcaaccaggtggagtggccgacgagggggagactgtcgcagccattgtggatgaaatggagagggaggattctgacaacgggcgtgtagaggaaggtgattcgtcagatgaggagacggatattaatccagcagaatgggctagtcaggatttttctgggctgatcgtctctgaagaggatagtgtgagatgggaatacaaagaaaatgaggttattcagggagcgatttatagtagaacagaagatatgaaggaggcggtaaagcattttgcagtgtcacttcatagagagttttgggctgccaagtccaaccggtcgcaatatgaagttcggtgtgttaaggaaaaagatggttgtccctggagagtgcacgcgtataaggggaaatggaaggattattggacagtgtcagtcgttaccaagcatacatgttttctacctggtgttcagaaataccacaggaacattacatgtgcatttgtcgcatctgagatgtatgcgcatgtcatcgataatctcacatacgaaccaaggtcaataatccgacacatcgaggagacatacaagtatactattagctatgccaaggcctggagggccaaacagaaaataatagagatgagatttggaacatacgaagtctcgtatgacaatttgccacgcctgcttggtgttatcgaggaaagaaaccctgggagctcttacgaagtgaagaaattcccatcaattgaacatcctggcaagagtgtgctgcaaagggcgttcttagctctacatgcatgcaagatggcattcgtgaactgtcgtccagttatctgcattgatgggacattcttgacaggaaagtatcggggccagatactgacagcaataggggtaaatgggaacaatcaggtatttcccttggcatttgcttttgttgagagtgagaataccgacagctggtactggttcctgaaattggttaaaacaaaagttgttagtatgaggccaaatgtgtgcctgatacatgataggcacgctggcattctgcgaacgatagaagagttgcagtttgggagcatggaacgaggataccctggtgtttgggacgatgtacagagtaggtggtgcatgcgtcatatgggagctaatttcttcaagcaattcaagaacaaggagctcgtgaacatgttcaggaggctgtgcaatcagaaccaggagaaaaaattcaatgagctttggaagagattagatgagttgacagccaaatgcagtgatcagcgtgcagcggctccatcgactgccgttgatgaccctcctcaagctcttggacctcttccaacggatagtccaactttggttagaagaactggattggagattcggaaattttctcagtggattctgcatgaaccaaaagagaaatgggccaaggcgtatgacaccggtggtgctagatatggaataatgacaacaaatttggcagaagtttacaactgggtgatgcgcggtgtccgtggactgccactagttggcatagtggagttcattttacatgggacatacaggtattttagggatcggttccaggcaattcttccctctatgccgaacaacagcattttgtttggaactttcatgcagaaaaagctagaggagttgcataaaaaggccatgaaacatcgagctctagtgcaaggtacccaacaacataggttcgagatactatgtcaagataaggcaggcaggggtatctaccgcaagagagtgaagcaggagtgtgttctcaaaaccgacggcacatgtcattgctcttgttcaaagccgaagctgctccacaggccatgcacccatgtcattgctgccgcagcggagtgtggcataccagatgcagtatatgtgtcgcagtacttcagtaagcaagcaatatatcatacatggagcggcgagatttaccggttcggcatagctggggagttcacagagactaacgatgaagtactcaatattcctgacccatcgaagctccgaggcaaggctggaaggaggaggactcgtcgcatctgcaacaatatggacgagtcggaggctggcagggtgaagcgttgcagcaaatgcgatgaacgtgggcacacctacaagcattgtcctaaagacaaggagaaaccaagtgcggcggaggcatgactatcaggatcagcagcagatggagctcgccctacggagatggcacgtcaggatacacctcagctgttggacccggcgatagatctccgacaccggtctcaccttactgcggtgcagggggctcagcttgggacgttccgggcacggacgtgcggtgagctactcacggttcacgactccttcgtcgagaggctgcgtgaggccggcctcctaccgatgtgtcggctggtggaggctgccgccggccatgcggacccggccagacgatggactgtggacaggtccctcctagcagctttggtcgaccgatggaggccagagacgcacacttttcacttgccgtgaggtgaggtagcccctaccctacaggacgtatcgtgcttgttggggctaccgctcgcgggagacgctgttgggccagtgaccacggctgtagactggcaggacgaactgacggcacgtttcgcactagtacagcgcgcaccgcacctcccgctccagccgttggcacaccaccgcaacaccggacctacgaagaggtggctacttcagttcaccgttgagcagctacaggcggaggccgacgagtactcctacagccgatgtttggaggcgtacttgctctggctttttggctgggtgatgttctgtggccgtcacgggcacgcggtcgacaagggactcgtgcacgacgccaggagcatcgccgacgccgcggtaggcgaggtgcctcagtggagctggggttccgcgttgttggcggctctgtaccgtgcactttgtgagtcttgcacgaagacggatcccagcgcgacctttggtgggtgccctctctttctttctatctgggcagctgagaggattgcgatcggccgccctgaggtggaccagcacgcgtacgaggagtcactgtacgaggagcgaccagaggtcgactaccctacgatgggtactctgtggtgccgtcgtcagcgccgatgggctcacgtccagattaggcggtcgtatcctgagtttgttatggagttcgaccgccttctgccgattgacgtcgtgtgggagccctacagtgccgcggctacccaggctcgtgcgccgttggttcggcttccgtcagccctttccagtaccgtttccgaccaccgtcccagctgctgttcaccggtactcacgcaagggtcagcagtcagctggcgactggcccgccaagttggcgacttttgttgaggactggttgctcgcaaccgaggaggtcgtggaccacgagggagagccacacactgaggagtcgtaccaggcctacctacgctggtaccagccacacacccgtactagggtcaccttcgctcccttggagcagcagccccacgttgcgagcactagagacctctatgctaggcaccgcgaccaggacttcgctcgtgctgtcgacgacatcaaccgggtcgtcgttgacggttcaacgacgatccaacgtttagacgcagggattccggtacccgtagaggagcacctgacgacgtacacgcggatggtggagtcgatgcgctcgattctccgagtgctcacctgtcgtgcagacgacattgctcgggcagacgcagctgtacagcggccacccgtaccgactggtccccgtccagctgcgcacgttcctaggccgactccccctccgcacggaggtttcgcccagttcgctatgacgcaggccgcctacttctcccacgctgcagggtcagcgtctcagccagctgcgtcgacctcgcactcagcgcagttccagcagtacaccggggcttcgtcacaggcagccggcacgtcgagtcaaggtccaccactagaccatgctaggacctcgtcggaccgcttgctgtcttccaccgtgctcttcgacatcactgacttcgacttcgcttcaggctcggcagaggacgtcatcggcccctcacagctgggaggcgcaccgccggtg

SEQ ID NO: 81261 - DNA, 876 bp, Oryza sativa
  Clone ID: PAT_MRT4530_80805C.1
atgggcgagaatccagcaaaaagaggcaagatgataacaggggaccagggcatacaaccacaacattacgaacaatacatggcctggtactcattgcagaatcgcatccggctgcttccaccccaggatactgacaagcgaggaccacccactattggccaaatatatgatatgcagctagcacccccggctcacttgacgtccgacattgcaggggaattagtaaaggaggcgaaaactttgtgggagaagcttagagatggtatctcgtgtactaaccaggaagttatggccgcagtcgactacctccgtagaaaagcacaaccgaaacgggtacccccacatagctcaacgcccatcacctctcaatggcagagtgggtttgcgtcgtttgctgagggagcgcgaatggtccgtcccgtgcctcaaatgcctcttgcaaggccacatatgattcctcagatggctcccgatgtggcaacctcacactggcaaggaggatttgcaccattcgcaggtacgtcgtttggtgctggagtacagggttatatggacttgttgcaacaagggtcgtattgccctgaactaatgtcagggtttaggccgtacacagcatcgtacggcgacatatccagcttcgatggagggtcgtcatcggtacccgatgagcttcgggcttcgcaaactaatgaagcgccccaggcgacacagcccacacaaccagaggttggcgatttacaaggaaatgacaatgacccgcatagatctaaccatgagcaccttgagcccaaccgtttgtcactctcaggccctcgacatgccgcagtagcaaggaaaaagactaaaaaaagcgagctacaacatctagaactatga

SEQ ID NO: 81262 - DNA, 4707 bp, Oryza sativa
  Clone ID: PAT_MRT4530_80806C.1
atgtcgaacaaacaaatattccaagtttaccatggaccaggaaacgtccgttacgggccaactggggtagatctgtcaaattttattgtatcagaaaggggaattgatagaccggctgagaggagtgtaccttctataaaaggatggttaatgaggggcttgagagttgatccacagacaagtgacataacaatcaatgttatagtaagtcgggcaactgagggtttttattgggaactaatgccagttcaaaactctcgagtgtggagatggtatttggaaaatgcattgcaacgcgggtggcctctagctttggttccgtttgttcacccgaaggatccaggtgtgcagatgaacatggatgatggcgagggaccaagtgctgaagtaaacgagacttctgtggaggaggtcaacgcacgagacgacgggggcatagtagctccagtgggcattcaaccaggtggagtggccgacgagggggagactgtcggtgccattgtggatgaaatggagaaggaggattccgataacgagcgtgtagaggaaggtgattcgtcagatgatgagactgatattaatccagcagaatgggctagtgaggatttttctgggctgatcgtctctgaagaggatagtgtgagatgggagtacaaagaaaatgaggttattcagggagcgatttatagtagagcagaagatatgaaggaggcgaaataccacaggaacattacttgtgcatttgttgcatctgagatgtatgcgcatgtcatcgataatctcacatatgaaccaaggtcaataatccgacacatcgaagagacatacaagtatactattagctatgccaaggcctggagggccaaacagaaaataatagagatgagatttggaacttacgaagcctcgtatgacaatttgccacgcctgcttggtgttatcgaggaaagaaaccctgggagctcttacgaagtgaagaaattcccctcaattgaacatcctagcaagagtgtgctgcaaagggcgttcttagctctacatgcatgcaagatggcattcgtgaactgtcgtcctgttctctgcattgatgggacattcttgacaggaaagtatcggggccagatactaacagcaataagggtagatgggaacaatcaggtattgcccttggcatttgcttttgttgagagtgagaataccgacagctggtactggttcctgaaattggttaaaacaaaagttattggtatgaggccaaatgtgtgcctgatacatgataggcacgctggcattctgcgagcgatagaagagttgcagtttggaagtatggaacgaggataccccggtgtttgggaagatgtacagagtaggtggtgcatgcgtcatatgggagctaatttcttcaagcaattcaagaacaaggagctcatgaacatgttcaagaggctgtgcaatcagaaccaggagaaaaaattcaatgagctttggaagagattagatgagttgacagccaaatgcagtgatcagcgtgcagcggctccatcgaccgccgttgctgaccctcctcaagctcttggacctctcccaacggatagtccaatattggttagaagaactggattggagattcggaaattttctcagtggattctgcatgaaccaaaagagaaatgggccaaggcgtatgacacaggtggtgctagatatggaataatgacaacaaatttggcagaagtttacaactgggtgatgcgcggtgtccgtggactgccactagttggcatagtggagttcattttacatgggacatgcaggtattttagggatcggttccaggcagttcttccctctatgccgaacaacagcattttgtttggagctttcatacagaaaaagctagaggagttgcgtaaaaaggccatgaaacatcgagctctagtgcaaggtacccaacagcacaggtttgagatactatgtcaagataaggcaggcaggggtatctaccgcaagagagtgaagcaggagtgtgttctcaaagccgacggcacatgtcattgctcttgtgcaaagccgaagctgctccacaggccatgcacccatgtcattgctgccgcagcggagtgtggcataccagatgcagtatatgtgtcacagtacttcagtaagcaagcaatatatcatacatggagcggccagatttatgggttcggcatagctggggagttcacagagactaacgatgaagtactcaatattcctgacccatcgaagctccgaggcaaggctggaaggaggaggactcgtcgcatccgcaacgatatggacgagtcggaggctggcatggtgaagcgttgcagcaaatgtgatgaacatgggcacacctacaagcattgtcctaaagacaaggagaaaccaagtgcggcggaggcaggactatcaggatcagcagcagatggagctcgccctatgggtgaaggcactacctccactcgaccacgtcctaggcgtcgtcgtgccacgtctggctacgtgggggctcagcttgggacgttccgggcacggacgtgcggtgagctactcacggttcacgactcctttgtcgagaggctacgtgaggccggcctcctaccgatgtgtcggctggtggaggctgcggccggcgatgcggacccggccagacgatggactgtggacaggtccctcctagcagctttggtcgatcgatggaggccagagacgcacacttttcacttgccgtgcggtgaggtagcccctaccctacaggacgtatcgtacttgttggggctaccgctcgcgggagacgctgttgggccagtgaccacggctgtggactggcaggacgatctgacggcacgtttcgcactagtacagcgcgcaccgcacctcccgctcgagccgttggcacaccaccgcaacaccggacctacgaagaggtggctgcttcagttcaccgttgagcagctacaggcggaggccgacgagtactcctacagccgatgtttggaggcgtacttgctctggctttttggctgggtgatgttctgtggcggtcacgggcacgcggtcgacaagggactcgtgcactacgccaggagcatcgccgacgccgcggtaggcgaggtgcctcagtggagctggggttccgcgttgttggcggctctgtaccgtgcactttgtgagtcttgcacgaagacggatcccagtgcgacctttggtgggtgtcctctctttctttctatctgggcagctgagaggattgcgatcggccgccctgaggtggaccagcacgcgtacgaggagtcactgtacgaggagcgaccagaggtcgactaccctacgatgagtactctgtggtgccgtcgtcagcgccgatgggctcacgtccaggttaggcggtcgtatcctgagtttgttatggagttcgaccgccttctgccgactgacgtcgtgtgggagccctacagtgccgcggctacccaggctcgtgcgccgttgggtctgtccacactctgcaccagggaccaggcgtactggatgactacggttccgatggtgttcgacatctgcgttgagcctcacgcccctttccgcgtaatgcggcagttcggcttccgtcagccctttccagtaccgtttccgaccaccgtcccagctgctgttcaccggtactcgcgcaagggtcagcagtcagctggcgactggcccgccaagttggcgacttttgttgaggactggttgctcgcaaccgaggaggtcgtggaccacgagggagagccacacactgaggagtcgtaccaggcctacctacgctggtaccagccacgcacccgtactagggtcaccttcgctcccttggagcagcagccccacgttgcgagcactagagacctctatgccaggcaccacgaccaggacttccctcgtgctgtcgacgacatcaaccgggtcgtcgttgacggttcaacgacgatccaacgtttaggcgcggggattccggtacccgtagaggagcacctgacgacgtacacgcggatggtggagtcgatgcgctcgattctccgagtgctcacctgtcatgcagacgacgttgctcgggcagacgcagctgtacagcggccacccgtaccgactggtccccatccagctgcgcacgttcctaggccgactctccctccgcacggagggtttcgtgcaccgttcagcaccccgccttcctcggctaggccttctgttgtgccccccacaggtttcgcccagttcgctatgacgcaggccgcccacttctcccaggctgcagggtcagcgtctcaggcagctgtgtcgacctcgcactcagcgcagttctggcagtacaccgggacttcgtcacaggcagccggcacgtcgagtcagggtccaccactggaccatgctgggacctcgtcggaccgcttgctgccttccaccttgctcttcgacatcactgacttcgacttcgcttcaggctcgacagaggatgtcatcggcccctcacagctgagaggcgcaccgccggtgcagacgcaggaccaggcgcaggccactcctccgcaggacactcgtgctacccgtgctgtgccaccggatcgtttcacctactcccaggaccacgtgcgagcacaggcccggaggaccaagcgtggtcgcggcgcggggcagggccagtag

SEQ ID NO: 81263 - DNA, 5279 bp, Oryza sativa
  Clone ID: PAT_MRT4530_80807C.1
tactgtatctatagccttgagttacaacgatatgtaacttcacagcaattctcaactgcaaagagaagcatgagaaattgccgtgaaatatgcttcgttcgcaaaacgggggcggagagagaactgagaagagcagactgacccttccggaggaggagcgaggacagtcgggggcggcaagctgacgtggcaaacggggggaggaacgggcggtgacggaaggagggttttttgcaggaaaacccttgccgccctctggtggggcggcaaggggcccgaatgcaaaaaagccagtcggggccggctattttgcaggcggccccttgccgccctctggccgggcggcaggcctcgctgcctataaaaggcctgctgcccagccctcagccctcattcttctctcctcaattccagtgaaaaaaaaagaagagaggggaggagaagagaagaaggggcgaagccctgccggattcagacgccgatttcagggttttagttgtactaatctagaagtgcgtattgtagatatcgatatgtcgaacaaacaaatattccaagtttaccatggaccaggaaacgtccgttacgggccaactggggtagatctgtcaaattttattgtatcagaaaggggaattgagagaccggctgagaggagtgtaccttctataaaaggatggttaatgaggggcttgagagttgatccacagacaagtgacataacagtcaatgttatagtaagtcgggcaactgagggtttttattgggaactaatgccagttcaaaactctcgagtgtggagatggtatttggaaaatgcattgcaacgcgggtggcctctagctttggttccgtttgttcacccgaaggatccaggtgtgcagatgaacatggatgatggcgagggaccaagtgctgaagtaaacgagacttctgtggaggaggtcaacgcacgagaggacgggggcgtagtagctccagtgggcattcaaccaggtggagtggctgacgagggggagactgtcggtgccattgtggatgaaatggagagggaggattctgacaacgagcgtgtagaggaaggtgattcgtcagatgataagacggatattaatccagcagaatgggctagtgaggatttttctgggctgatcgtctctgaagaggatagtgtgagatgggagtacaaagaaaatgaggttattcagggagcgatttatagtagagcagaagatatgaaggaggcggtaaaacattttgcagtgtcacttcatagagagttttgggttgccaagtcgaaccggtcgcaatatgaagttcggtgtgttaaggaaaaagatggttgtccctggagagtgcacgcgtataaggggaaatggaaggattattggacagtgtcagtcgttaccaagcatacatgttttctacctggtgttcagaaataccacaggaacattacttgtgcatttgttgcatctgagatgtatgcgcatgtcatcgataatttcacatatgaaccaaggtcaataatccgacacatcgaagagacatacaagtatactattagctatgccaaggcctggagggccaaacagaaaataatagagatgagatttggaacttacgaagcctcgtatgacaatttgccacgcttgcttggtgttatagaggaaagaaaccctgggagctcttacgaagtgaagaaattcccctcaattgaacatcctagcaagagtgtgctgcaaagggcgttcttagctctacatgcatgcaagatggcattcgtgaactgtcgtcgtgttctctgcattgatgggacattcttggcaggaaagtatcggggccagatactaacagcaataggggtagatgggaacaatcaggtattgcccttggcatttgcttttgttgagagtgaaaataccgacagctggtactggttcctgaaaatggttaaaacaaaagttgttcgtatgaggccaaatgtgtgcctgatacatgataggcacgctggcattctgcgagcgatagaagagttgcagtttgggagtatggaacgaggataccccggtgtttgggaagatgtacagagtaggtggtgcatgcgtcatatgggagctaatttcttcaagcaattcaagaacaaggagctcatgaacatgttcaagaggctgtgcaatcagaaccaggagaaaaaattcaatgagctttggaagatattagatgagttgacagccaaatgcagtgatcagcgtgcagcggctccatcgaccgccgttgctaaccctcctcaagctcttggacctctcccaacggatagtccaacattggccaaggcgtatgacacaggtggtgctagatatggaataatgacaacaaatttggcagaagtttacaactgggtgatgcgcggtgtccgtggactgccactagttggcatagtggagttcattttacatgggacatgcaggtattttagggatcggttccaggcagttcttccctctatgccgaacaacaacattttgtttggagctttcatgcagaaaaagctagaggagttgcgtaaaaaggccatgaaacatcgagctctagtgcaaggtacccaacagcacaggtttgagatactatgtcaagataaggcaggcaggggtatctaccgcaagagagtgaagcaggagtgtgttctcaaagccgatggcacatgtcattactcttgtgcaaagccgaagctgctccacaggccatgcacccatgtcattgctgccgcagcggagtgtggcatactagatgcagtatatgtgtcacagtacttcagtaagcaagcaatatatcatacatggagcggcgagatttatgggttctgcatagctggggagttcacagagactaacgatgaagtactcaatattcctgacccatcgaagctccgaggcaaggctggaaggaggaggactcgtcgcatccgcaacgatatggacgagtcggaggctggtagggtgaagcgttgcagcaaatgcgatgaacatgggcacacctacaagcattgtcctaaagacaaggagaaaccaagtgctgcggaggcaggactatcaggatcagcagcagatggagctcgccctacggagatggcacgtcaggatacacctcagttgttggacccggcgatagatcaccgacaccggtctcaccttactgcggtgcagggggctcagcttgggacgttccgggcacggacgtgcggtgagctactcacggttcacgactcctttgtcgagaggctacgtgaggtcggcctcctaccgatgtgtcggctggtggaggctacggccggcgacgcggacccggccagacgatggactgtggacaggtccctcctagcagctttggtcgatcgatggaggccagagacgcacacttttcacatgccgtgcggtgaggtagcccctaccctacatgacgtatcgtacttgttggggctaccgctcgcgggagacgctgttgggccagtgaccacggctgtggactggcaggacgatctgacggttgagcagctacaggcggaggccgacgagtactcctacagccgatgtttggaggcgtacttgctctggctttttggctgggtgatgttctgtggcggtcacgggcacgcggtcgacaagggactcgtgcactacgccaggagcatcgccgactccgcggtaggcgaggtgcctcagtggagctggggttccgcgttgttggcgtctctgtaccgtgcactttgtgagtcttgcacgaagacggatcccagcgtgacctttggtgggtgccctctctttctttctatctgggcagctgagaggattgcgatcggccgccctgaggtggaccagcacgcgtacgaggagtcactgtacgaggagcgaccagaggtcgactaccctacgatgggtactctgtggtgccgtcgtcagcgccgatgggctcacgtccaggttaggcggtcgtatcctgagtttgttatggagttcgaccgccttctgccgactgacgtcgtgtgggagccctacagtgcagcggctacccaggctcgtgcgccgttgggtctgtccacactctgcaccagggaccaggcgtactggatgactacggttccgatggtcttcgacatctgcgttgagcctcacgcccctttccgcgtgatgcggcagttcggcttccgtcagccctttccagtaccgtttccgagcaccgtcccagctgctgttcaccggtactcgcgcaagggtcagtactcagctggcgactggcccgccaagttggcgacttttattgaggactggttgctcgcaaccgaggaggtcgtggaccacgagggagagccacacactgaggagtcgtaccaggcctacctacgctggtaccagccacgcacctgtactagggtcaccttcgctcccttggagcagcagccccacgttgcgagcactagagacctctatgccaagcaccgcgaccaggacttcgcttgtgctgtcgacgacatcaaccgggtcgtcgttgacggttcaacgacgatccaacgtttaggcgcggggattccggtacccgtagaggatcacctgacgacgtacacgcggatggtggagtcgatgcgctcgattctccgagtgctcacctgtcgtgcagacaacgttgctcgggcagacgcagctgtacagcggccacccgtaccgactggtccccgtccagctgcgcacgttcctaggccgactccccctccgcacggagggtttcgtgcaccgttcagcaccccgccttccttggctaggccttctgttgtgccccccacaggtttcgcccagttcgctatgacgcacgccgcccacttctcccaggctgcagggtcagcgtctcaggcagctgtgtcgacctcgcactcagcgcagttctggcagtacaccgggacttcgtcacaggcagccggcacgtcgagtcagggtccaccactagaccatgctgggacctcgtcggaccgcttgctgccttccaccttgctcttggacatcactgacttcgacttcgcttcaggctcgacagaggacgtcattggcccctcacagctgggaggcgcatcgccggtgcagacgcaggaccaggcgcaggccactcctccgcgggacactcgtgctacccgtgctgtgccaccggatcgtttcacctactcccaggaccacgtgcgagcacaggcccggaggaccaagcgtggtcgcggcgcggggcagggccagtag

SEQ ID NO: 81264 - DNA, 4149 bp, Oryza sativa
  Clone ID: PAT_MRT4530_80808C.1
atggtgccatggggtgggagcgacgctagggtgcactgcgataaatgcaaccaagggctcgatgctgaggagaaacgctcgattcgagcttccgagcgcagccaggcccggtggctacagcgggttgcatccgcgggtgcaaggaagataggtggaaagattgaactgaatttcctctacggttatcagaaagcaaatgtgaatatgggaagccttaagccagcgatcaagatgcgagggatgcactgcatagccaggaccaagttcaagcttgaatatcttcacaccaacgcccgagtggtttcgcataatgttgtccactatggcgatgaaatccacagaaataatctatcggcgagaaaatttgcaaaaatagaccctgccgctccaatggtgggcggcaagctgacgtggcaaacgggggaggaacgggcggtgacggagggtgtgcagatgaacatggatgatggcgagggaccaagcgctgaagtaaatgagacttctgtggaggaggtcaacgcaggagtggacaggggcgtagtagctccagtgggcattcaaccaggtggagtggccgacgagggggagactgtcgcagccattgtggatgaaatggagagggaggattctgacaacaagcgtgtagaggaaggtgattcgtcagatgaggagacggatattaatccagcagaatgggctagtcaggatttttctgggctgatcgtctctgaagaggatagtgtgagatgggagtacaaagaaaatgaggttattcagggagcgatttatagtagagcagaagatatgaaggaggcggtattgcccttggcatttgcttttgttgagagtgagaataccgacagctggtactggttcctgaaattggttaaaacaaaagttgttggtatgaggccaaatgtgtgcctgatacatgataggcacactggcattctgcgagcgatagaagagttgcagtttgggagcatggaacgaggataccctggtgtttgggacgatgtacagagtaggtggtgcatgcgtcatatgggagctaatttcttcaagcaattcaagaacaaggagctcatgaacatgttcaagaggctgtgtaatcagaaccaggagaaaaaattcaatgagctttggaagagattagatgagttgacagccaaatgcagtgatcagcgtgcagcggctccatcgactgccgttgatgaccctcctcaagctcttggacctctcccaacggatagtccaactttggttagaagaactggattggagattcagaaattttctcagtggattctgcatgaaccaaaagagaaatgggctaaggtgtatgacaccggtggtgctagatatagaataatgacaacaaatttggcagaagtttacaactgggtgatgcgcggtgtccgtggactgccactagttggcatagtggagttcattttacatgggacatgcaggtattttagggatcggttccaggcagttcttccctctatgccgaacaacaacattttgtttggaactttcatgcagaaaaagctagaggagttgcgtaaaaaggccatgaaacatcgagctctagtgcaaggtacccaacaacataggttcgagatactatgtcaagataaggcaggcaggggtatctaccgcaagagagtgaagcaggagtgtgttctcaaagccgacggcacatgtcattgctcttgttcaaagccgaagctgctccacaggccatgcacccatgtcattgctgccgcagcggagtgtggcataccagatgcagtatatgtgtcgcagtacttcagtaagcaagcaatatatcatacatggagcggcgagatttacgggttcggcatagctggggagttcacagagactaacgatgaagtactcaatattcctgacccatcgaagctccgaggcaaggctggaaggaggaggactcgtcgcatccgcaacaatatggacgagtcggaggctggcaggatggagctcgccctacgggtgaaggcactacctccactcgaccacgtcctaggcgtcgtcgtgccacagatggcacgtcaggatacacctcagttgttggacccggcgatagatcaccgacaccggtctcaccttactgcggtgcagggggctcagcttgggacgttccgggcacggacgtgcggtgagctactcacggttcacgactcctttgtcgagaggctacgtgaggccggcctcctaccgatgtgtcggctggtggaggctgcggccggcgacgcggacccggccagacgatggactgtggacaggtccctcctagcagctttggtcgatcgatggaggccagagacgcacacttttcacttgccgtgcggtgaggtagcccctaccctacaggacgtatcgtacttgttggggctaccgctcgcaggagacgctgttgggccagtgaccacggctgtggactggcaggacgatctgacggcacgtttcgcactagtacagcgcgcaccgcacctcccgctcgagccgttggcacaccaccgcaacaccggacctacgaagaggtggctgcttcagttcaccgttgagcagctacaggcggaggccgacgagtactcctacagccgatgtttggaggcgtacttgctctggctttttggctgggtgatgttctgtggcagtcacgggcacgcggtcgacaagggactcgtgcactacgccaggagcatcgccgacgccgcggtaggcgaggtgcctcagtggagctggggttccgcgttgttggcggctctgtaccgtgcactttgtgagtcttgcacgaagacggatcccagcgcgacctttggtgggtgccctctctttctttctatctgggcagctgagaggattgcgatcggccgccctgaggtggaccagcacgcgtacgaggagtcactgtacgaggagcgaccagaggtcgactaccctacgatgggtactctgtggtgccgtcgtcagcgccgatgggctcacgtccaggttaggcggtcgtatcctgagtttgttatggagttcgaccgccttctgccgactgacgtcgtgtgggagccctacagtgccgcggctacccaggctcgtgcgccgttgggtctgtccacactctgcaccagggaccaggcgtactggatgactacggttccgatggtcttcgacatctgcgttgagcctcacgcccctttccgcgtaatgcggcagttcggcttccgtcagccctttccagtatcgtttccaaccaccgtcccagctgctgttcaccggtactcgcgcaagggtcagcatttagctggcgactggcccgccaagttggcgacttttgttgaggactggttgctcgcaaccgaggaggtcgtggaccacgagggagagccacacactgaggagtcgtaccaggcctacctacgctggtaccagccacgcacccgtactagggtcaccttcgctcccttggagcagcagccccacgttgcgagcactagagacctctacgccaggcaccgcgaccaggacttcgctcgtgctatcgacgacattaaccgggtcgtcgttgacggttcaacgacgatccaacgtttaggcgcggggattccgacgacgttgctcgggcagacgcagctgtacagcggccacccgtaccgactggtccccgtccagctgcgcacgttcctaggccgactccccctccgcacggaggcctcccacttctcccaagctgcaggatcagcgtctcaggcagctgcgtcgacctcgcactcagcgcagttctggcaatacaccgggacttcgtcacaggcagccggcacgtcgagtcagggtccaccactggaccatgctgggacctcgtcggaccgcttgctgccttccaccttgctcttcgacatcactgacttcgacttcgcttcaggctcgacagaggacgtcatcggcccctcacagctgggaggcgcaccgccggtgcagacgcaggaccaggcgcaggccactcctccgccagacactcgtgctacccgtgctgtgccaccggatcgtttcacctactcccaggaccacgtgcgagcacaggcccggaggaccaagcgtggtcgcggcgcggggcagggccagtag

SEQ ID NO: 81265 - DNA, 231 bp, Oryza sativa
  unsure (1)..(231): unsure at all n locations
  Clone ID: PAT_MRT4530_80809C.1
agatcgcgtccatngaaatctggccattgaccctgtgtatgattccagcatgctgtctcgcaccacaaagatctacgcggacaggcgcgggagtgcaattcaacaagtggtgactccagagcaagaggctcatcacatagtaaatgctgctagggctggaaaatcggcaaggcttatgcacgcaacaaggaagctgagagggaacatctgataccgtgcccagatggaggc

SEQ ID NO: 81266 - DNA, 158 bp, Oryza sativa
  Clone ID: PAT_MRT4530_8080C.1
gtcgcacccggaacgtgagccggctcgtgccgtgcgaccgaccgaccctgcagcacggcaccttgttgcgactcgcgacccgcccgaaatttccacccccttcgtctcccggggctcccgccttgcgcctccacctccgcctccgcctcgtgacctag

SEQ ID NO: 81267 - DNA, 4585 bp, Oryza sativa
  Clone ID: PAT_MRT4530_80810C.1
atgtcgaacaaacaaatattccaagtttaccatggcccatgaaacgtccgttacgggccaactggggtagatctgtcagaatttattgtatcagaaaggggaattgatagaccggctgagaggagtgtaccttctataaaaggatggttaatgaggggcttgagagttgatccacagacaagtgacataacaatcaatgttatagtaagtcgggcaactgagggtttttattgggaactaatgccagttcaaaactctcgagtgtggagatggtatgtggaaaatgcattgcaacgtgggtggtctctagctatggttccgtttgttcacccgaaggatccaggtgtgcagatgaacatgaatgatggcgagggaccaagtgctgaagtaaatgagacttttgtggaagaggtcaacgcatgagaggacgggggcgtagtacctccagtgggcattcaaccaagtggagtggtcgacgagggggagactgtcggtgccattgtggatgaaatgaagagggaggattctgacaacgagcgtgtagaggaaggtgattcgtcagatgatgagacggatattaatctagcagaatgggctagtgaggatttttttggtttggtcgtctctgaagaggatagtgtgagatgggagtacaaagaaaatgaggttattcagggagcgatttatactagagcagaagatatgaaggaggcggtaaaacattttttagtgtcacttcgtagagatttttgggttgccaagtccaactggttgcaatatgaagttcggtgtgttaaggaaaaagatggttgtccctggagagtgcacgcttataagggaaaatggaaggattattggacagtgtcagttgttaccaagcatacatgttttctacctggtgttcagaaataccataggaacattacatgtgcatttgttgcatctgagatgtatgcgcatgtcatcgataatctcacatatgaaccaaggtcaataatgcgacacatcgaagagacatacaagtatactattagctatgccaaggcgtggagggccaaacaaaaaataatagagatgagatttggaacttacgaagcctcgtatgacaatttgccatgcctgcttggtgttatcgaagaaagaaaccctgggagctcttacgcggtgaagaaattcccctcaattgaacatcctggcaagagtgtgctgcaaagggtgttcttagctctacatgcatgcaagatggcattcgtgaactgtcgtcctgttctctgcattgatgggacattcttgactggaaagtatcggggccagatactaacagcaataggggtagatgggaacaatcaggtattgcccttggcatttgcttttgttgagagtgagaataccgacagctggtactggttcctgaaattggttaaaacaaaagttattggtatgaggccaaatgtgtacctgatacatgataggcacgctggcattctgcgagcgatagaagagttgcagtttgggagtatggaacgaggataccttggtgagtggaaagatgtacagagtaggtggtgcatgcatcatatgggagctgatttcttcaagcaattcaagaacaaggagctcatgaacatattcaagaggctatgcaatcagaaccaggagaaaaaattcaatgagctttggaagagattagatgagttgttagccaaatgcagtaatcagcgtgcagcggctccatcgaccaccgttgctgaccctcctcaatctcttggacctctcccaacggatagtccaacattggttagaagaactggagtggagattcggaaattttctcagtggattctgcatgaaccaaaagagaaatgggccaaggcgtatgacacaggtgatgctagatatggaataatgataacaaatttggcagaagtttacaactgggtgatgcacggtgtccgtggactcccactagttggcatagtggagttcattttacaagggacatgcaggtattttagggatcggttccaggcagttcttccctctatgccgaacaacagcattttattcggaactttcatgcagaaaaagctagaggagttgcgtaaaaaggccatgaaacatcgagctctagtgcaaggtacccaacagcacaggtttgagatactttgtcaagataaggcaggcaggggtatctaccgtaagagagtgaagcaggaatgtgttctcaaagccgacggcacatgtcattgctcttgtgcaaagccgaagctgctccacaggccatgcacccatgtcattgctgccgcaacggagtgtggcataccatatgcagtatatgtgtcacagtacttcagtaagcaagcagtatatcatacatggagtggcgagatttatgggttcggcatagctggggagttcacagagactaacaatgaagtactaaatattcctgacccatcgaagctccgaggcaaagctggaaggaggaagactcgtcgcatccgcaatgatatggacgagtcggaggctggcagggtgaagcgttgcagcaaatgcaatgaatgtgggcacacctacaagcattgtcctaaagacaaggagaaaccaaatgcggcggaggcaggactatcaggatcagcagcaaatggagctcgccctacgggtgaaggcactacctcaactcgactacgtcctaggcgtcgtcgtgccacgtctggctacgtggtgtagttcttgtgttctatgttggcatgtggctttgcttgtaatttgtttcgaacttaccgatgtgtttatgtttccaggttgcgtgaggccggcctcctaccgatgtgtcggctggtggaggctgcagccggccacgcggacccggccaaacgctggaatgtggaccggtccctcctagcagctttggtcgaccgatggaggccagagacgcacacttttcacttgccatgcggtgaggtagcccctaccctacaggacgtatcgtacttgttggggctaccgctcgcgggagacgctgttgggccagtgaccacgggtgtggactggaaggatgatctgacggcacgtttcacaccagtacatcgcgcaccacatctcccactccagccgttggcacaccaccgcaacaccggacctacgaagaggtggctacttcagttcatcgtcgagcagctacaggcggaggccgacgagtactcctacagccgttgtttggaggcgtacttgctcttactttttggctgggtgatgttctgtggcggtcacgggcacgcgttcgacaagggactcgtgcactacgccaggagcatcgccgacgccgtggtaggcgaggtgcctcagtggagctagggttccgcgttgttggtggctcagtaccgtggcctttgtgaggcttgcacgaagtcggatcccagcacgacctttggtgggtgccctctctttctttctatctgggcagctgagaggattacgatcggccaccctgaggtggaccagcatgcgtacgaggagtcactgtacgcggagcgaccggaggtcgactaccctacgatgggtactctgtggtgccgtcgtcagcgccgatgggctcacgtccaggttaggcggtcgtatcctgagttcgttatggagttcgaccgccttctgccgactgacgtcgtgtgggagccctacagtgccgcggctacccaggctcgtgcgccgttggtttggcttccgtcaaccttttccagtaccgtttccgacgaccgtcccagctgctgttcaccggtactcgcacaagggtcagcagtcagctggcgactagcccgccaagttggggacttttgttgagaactggttgctcgcaaccaaggaggtcgtggagcacgagggagagccacacaccgaggaggcgtaccaggcctacctacgctggtaccagccacgcacccgtactagggtcaccttcgctcccttggagcagcagacccacgttgcgatcactagagacctctacgccaggcaccgtgactaggacttcgcttgtgctgtcatcgacatcaacagggtcgtcgttgacggttcaacgacgatccaacgtttaggcgcggggattccgatacctgtagaggagcacctgacgacgtacacactgatggtggagtcgatgcgctcgattctccgagtgctcacctgtcgtgcagacgacgttgctcgggcagacgcagcaccacagcggccacccgtaccgactggtccccgtccaactgcgcacgttcctaggccgactccccctccgcacgaaggtttcgcccagttcgctatgacacaggccgcccacttctcccaggctgcagggtcagcgtctcaggcagctgcgtcgacttcgcactcagcgcagttctggcagtacatcgggacttcatcacacgcagctggcacgtcgagtcagggtccaccactagaccatgttgggacctcatcggaccacttggtggcttccgccttgctcttcgacatcactgacttcgacttcgcttcaggctcgacagaggacgtcatcggcccctcacagctaagaggcgcactgccggtg

SEQ ID NO: 81268 - DNA, 162 bp, Oryza sativa
  Clone ID: PAT_MRT4530_80811C.1
atggtggtggccggcggcggcggcgcgatgcacggcaccgagcaaaacttgagcagcactgagctggggcaacaaatggagcagattagggcagcggcagtcgaggaagcaaatctccaagctcaacacaagatccaactgcacaggagacaggtggggtag

SEQ ID NO: 81269 - DNA, 2292 bp, Oryza sativa
  Clone ID: PAT_MRT4530_80812C.1
atgtcgcggcggccgtccgtagcaccggagccggctccgcggctggtctgcaatgcaaccacgggtgatctaccggcaggctgcaacctcggcctgctggcccgtatcgaactcctggtgctcttctgctccgccatcctcgcgctcctcgtcttcctcggctcctccaggcgccggagcagcagcgccaccgtccgcctcgtcgtgtggggcgccttcacggtgtcctacccggtggcggcctacaccatcggcctcatgcagtcgtcccctttccaccacgagctcttcgtggtctggtcctgcttcttcctcttcgtcctcgccagctccgactccatcaccgcctacaccctcgccgacatcaagagcccggccaccgtgctgctcaaccgaggcctccaggtcatctacgtctccgtgctcctccactactacgcctccgtgctctccccgaagctcaagatctacctcttcatcgtttggctcgtgagcttggggaagatcgcgttgagcgccctcggctaccggctggcgctgcgctccgacaggttggaggcggacaacaagctcgtcgctgattacatgacctacgagcacgacctgagccggcagggcggcagcgacggagatccggtgaccatggaagggtacaagtacatagtcagaggggaggagacggacgtcatggagctaacggcgccggactacgtcaagaagatcaaggtggacggcgcgcgtgcgctggtgacggtcgagagcgtctggcggtgcaaggggcggttgctgatgggcagctccgtcgccgacgccagcgccgccgcgcgacgggatctttgcctctcctttgccctgttcaagctgctccggcggaggtgcagcaactatcccctggccgagtccggccaacccaagacgagggactttgtcctcaggggcctcctcggacagggaaaagacgacgacgacgacggcgacggcgaccggagatcaagacgagacggcagagctttccgggtgatcgaagtggagctcggcttcctctacgacctgttctacacgaggtatcccttcatctgccacgccgcggtgagcacggcaccgcacctcgccatgtgcgccctcgtgatgaccatcggcgtgctcaccctctcctcccactcgctgcgacactaccaccctactcaccatagaagcatcgaggtcaatggcgtcaacctcgacgtcgccctcaccatgttcatcatagcgctagtcatcgtcctcgaggcgtaccagttcgtcgccgtgctcttctccgactggcagaaggtgaagatgctgtgcaggtacgtcctccggccgtcatggcaggggaacccgttcttcgaggcggtgttgcgcgtgctgtgctactgcggcagtggcgtgtactggaagaagacgatgagccagtactccatcgtccgccacgcctctcctggccacgccgtgaaggactggctgtcgcgggcgactcgccggtggctggacaggctcatgttcaacggcggcaaggcgcgatcggtgaaggtgtcggccgcggtggagagcgcgctcgcgtctgcactgagggatcgcgacgacgatgacggcgtcctcggcggcggcggccgcgccgcgctgcggcaacacaggctagactgggcgtggggaggcgcgacgtggcgcacgtgcgcgcacgccattctcatctggcacatcgccacttgcctctgtgacatgcagatgccggcggcaataacccacaagaagacgcggccgcgagcgagaaaggccgccggcggcggcgacggcgacggcgaccgtgcagtggcgacgagcctgtcgaggtactgcgcttacctggtgtcgtcggcgccggagctgttgccggagcaccagtacaccacccggacgatcgccgaggcggtgctcctcgagctccgggtctgcctccgtggctgcgcgtcggacaaggaggtcttggacaggttgaaggcggtggcggagacggcgaccgcgagctcgccggagagcggcatccatgtgcacggtgcgaggctttggacacagctgatggtgatcccggaccaggagatgacgtggaagctcctggccagggtgtgggcggagctgatgctgttcgtcaccccggcggacaatgcgacggcgcacgtccagcatttgacgatgggcggcgagcacattacccacctctgggcactgctgacacacgctggcatcgtcgaccggcctaattctccgtccccacacccacatccggcgccgtaa

SEQ ID NO: 81270 - DNA, 4647 bp, Oryza sativa
  Clone ID: PAT_MRT4530_80813C.1
atgtcatggcacagggccggtgtcctgctgctagggggctcaatcctgcctgcctgtcccgggggttccggccttggcctgggttggcttgggacgagctgggacccagggtcgggttgccagttcggtctgaatcatcgtaggccttgggttaaggcaggaaacgtccgttacgggccaactggggtagatctgtcagattttattgtatcagaaaggggaattgatagaccggctgagaggagtgtaccttctataaaaggatggttaatgaggggcttgagagttgatccacagacaagtgacataacaatcaatgttatagtaagtcgggcaactgagggtttttattgggaactaatgccagttcaaaactctcgagtgtggagatggtatttggaaaatgcattgcaacgcgggtggcctctagctttggttccgtttgttcacccgaaggatccaggtgtgcagatgaacatggatgatggcgagggaccaagtgctgaagtaaacgagacttctgtggaggaggtcaacgcacgagaggacgggggcgtagtagctccagtgggcattcaaccaggtggagtggccgacgagggggagactgtcggtgccattgtggatgaaatggagagggaggattctaacaacgagcgtgtagaggaaggtgattcgtcagatgatgagatggatattaatccagcagaatgggctagtgaggatttttctggactgatcgtctctgaagaggatagtgtgagatgggagtacaaagaaaatgaggttattcagggagcgatttatagtagagcagaagatatgaaggaggcggtaaaacattttgcagtgtcacttcatagagagtttagggttgccaagtcgaaccggtcgcaatatgaagttcggtgtgttaaggaaaaagatggttgtccctggagagtgcacgcgtataaggggaaatggaaggattattggacagtgtcagttgttaccaagcagacatgttttctacctggtgttcagaaataccacaggaacattacatgtgcatttgttgcatctgagatgtatgcgcatgtcatcgataatctcacatatgaaccaaggtcaataatccgacacatcgaagagacatacaagtatactattagctatgccaaggcctggagggccaaacagaaaataatagagatgagatttggaacttacgaagcctcgtatgacaatttgccacgcctgcttggtgttatcgaggaaagaaaccctgggagctcttacgaagtgaagaaattcccctcaattgaacatcctggcaagagtgtgctgcaaagggcattcttagctctacatgcatgcaagatggcattcgtgaactgtcgtcctgttctctgcattgataggacattcttgacaggaaagtatcggggccagatactaacagcaataggggtagatgggaacaatcaggtattgcccttggcatttgcttttgttgagagtgagaataccgacagctggtactggttcctgaaattggttaaaacaaaagttgttggtatgaggccaaatgtatgcctgatacatgataggcacgctggcattctgcgagcgataggagagttgcagtttgggagtatggaacgaggataccccggtgtttgggaagatgtacagagtaggtggtgcatgagacatatgggagctaatttcttcaagcaattcaagaacaaggagctcatgaacatgttcaagaggctgtgcaatcagaaccaggagaaaaaattcaatgagctttggaagagattagatgagttgacagccaaatgcagtgatcagcgtgcagcggctccatcgaccgccgttgctgaccctcctcaagctcttggacctctcctaacggatagtccaacattggttagaagaactggattggagattcggaaattttctcagtggattctgcatgaaccaaaagagaaatgggccaaggcgtatgacacaggtggtgctagatatggaataatgacaacaaatttggcagaagtttacaactgggtgatgcgcggtgtctgtggactgccactagttggcatagtggagttcattttacatgggacatgcaggtattttagggatcggatccaggcagttcttccctctatgccgaacaacagcattttgtttggagctttcaggcagaaaaagctagaggagttgcgtaaaaaggccatgaaacatcgagctctagtgcaaggtacccaacagcacaggtttgagatactatgtcaagataaggcaggcaggggtatctaccgcaagagagtgaagcaggagtatgttctcaaagacgacggcacatgtcattgctcttgtgcaaagccgaagctgctccacaggccatgcacccatgtcattgctgccgcagcggagtgtggcataccagatacagtatatgtgtcacagtacttcagtaagcaagcaatatatcatacatggagcggtgagatttatgggttcggcatagctggggagttcacagagactaacgatgaagtactcaatattcctgacccatcgaagctccgaagcaaggctggaaggagaaggactcgtcgcatccgcaacgatatggacgagtcggaggctggcagggtgaagcgttgcagcaaatgcgatgaacatgggcacacctacaagcattgtcctaaagacaaggagaaaccaagtgcggcggaggcaggactatcaggatcagcagcagatggagctcgccctacggagatggcacgtcagggtacacctcagttgttggacccggcgatagatcaccgacaccggtctcaccttactgcggtgcagggggctcagcttgggacgttccgggcacggacgtgcggtgagctactcacggttcacgactcctttgtcgagaggctacgtgaggccggcctcctaccgatgtgtcggctggttgagcagctacaggcggacgccgacgagtactcgtacagccgatgtttggaggcgtacttgctctggctttttggctgggtgatgttctgtggcggtcacgggcacgcggtcgacaagggactcgtgcactacgcctggagcatcgccgacgccgcggtaggcgaggtgcctcagtggagctggggttccgcgttgttggcggctctgtaccgtgcactttgtgagtcttgcacgaagacggatcccagcgcgacctttggtgggtgccctctctttctttctaactgggcagctgagaggattgcgatcggccgccctgaggtcgaccagcacgcgtacgaggagtcactgtacgaggagcgaccagaggtcgactaccctacgatgggtactctgtggtgccgtcgtcagcgccgatgggctcacgtccaggttaggcggtcgtatcctgagtttgttatggagttcgaccgccttctgacgactgacgtcgtgtgggagccctacagtgccgcggctacccaggctcgtgcgccgttgggtctgtccacactctgcaccagggaccaggcgtactggatgactacggttccgatggtcttcgacatctgcgttgagcctcacgcccctttccgcgtgatgtggcagttcggcttccgtcagccctttccagtaccgtttccgaccaccgtcccagctgctgttcaccggtactcgcgcaagggtcagcattcagttggcgactggcccgccaagttggcgacttttgttgaggactggttgctcgcaaccgaggaggtcgtggaccacgagggagagccacacactgaggagtcgtaccaggcctacctacgctggtaccagccacgcacccgtactagggtcaccttcgctcccttggagcagcagccccacgttgcgagcactaaagacctctacgccaggcaccgcgaccaggacttcgctcgtgttgtcgacgacatcaaccgggtcgtcgttgacggttcaacgacgatccaacgtttagacgcggggattccggtacccgtagaggagcacctgacgacgtacacgcggatggtggagtcgatgcgctcgattctccgagtgctcacctgtcgtgcagacgacgttgctcgggcagacgcagctgtacagcggccacccgtaccgactggtccccgtccagctgcgcacgttcctaggccgactccccctccgcacggagggtttcgtgcaccgttcagcaccccgccttcctcggctaggccttctgttgtgccccccacaggtttcgcccagttcgctataacgcaggccgcccacttctcccaggctgcatggtcagcgtcacaggcagccggcatgtcgagtcagggtccaccactggaccatgctgggacctcgtcggaccccttcctgtcttccaccgtgctcttcgacatcaatgacttcgacttcgcttcaggctcgacagaggacgtcatcggcccctcacagctgggaggcacaccgccggtgcagacgcaggaccaggcgcaggccactcctccgcgggacactcgtgctacccgtgttgtgccaccggatcgtttcacctactcccaggaccacgtgcgagcacaggcccggaggaccaagcgtggtcgcggcgcggggcagggccagtag

SEQ ID NO: 81271 - DNA, 4317 bp, Oryza sativa
  Clone ID: PAT_MRT4530_80814C.1
atgtctcagcatcaccggagatcgtggccccggatccggtgggttaaaggatgtcggatttggtggcttagagaactggtcgttggatcgtggcattggagctttacttgtcgcgtcggtgctgggagaaaggcgatagctgttggggaagacgacactcgcgagaacagggattgccacgtcagtgctgggagaaaggcgacaaccattggggaagatggtgcttgcgagaacaaggattgccgcgtcggtgctaggagaaaggcatcagccattgacgaagacaacacttgcaagaacaaggagaagtggaggaagatgatggtagcggagggttttagttgtactaatctagaagtgcgtattgtagatatcggaaacgtccgttacgggccaactggggtagatctgtcagattttattgtatcagaaaggggaattgatagaccggctgagaggagtgtaccttctataaaaggatggttaatgaggggcttcagagttgatccacagacaagtgacataacaatcaatgttatagtaagtcgggcaactgagggtttttattgggaactaatgccagttcaaaactctcgagtgtggagatggtatttggaaaatgcattgcaacgcgggtggcctctagctttggttccgtttgttcacccgaaggatccaggtgtgcagacgaacatggatgatggcaagggaccaagtgctgaagtaaacgagacttctgtggaggaggtcaacgcacgagaggacgggggcgtagtagctccagtgggcattcaaccaggtggagtggccgacgagggggagactgtcggtgccattgtggatgaaatggagagggaggattctgacaacgagcgtgtagagaaaggtgattcgtcagatgatgagacggatattaatccagcagaatgggctagtgaggatttttctgggctgatcgtctctgaagaggatagtgtgagatgggagtacaaagaaaatgaggttattcagggagcgatttatagtagagcagaagatatgaaggaggcggtaaaacattttgcagtgtcacttcatagagagttttgggttgccaagtcgaaccggtcgcaatatgaagttcggtcaataatccaacacattgaagagacatacaagtatactattagctatgccaaggcctggagggccaaacagaaaataatagagatgagatttggaacttacgaagcctcgtatgacaatttgccacgcctgcttggtgttatcgaggaaagaaaccctgggagctcttacgaagtgaagaaattcccctcgattgaacatcctggcaagagtgtgctgcaaagggcgttcttagctctacatgcatgcaagatggcattcgtgaactgtcgtcctgttctctgcattgatgggacattcttgacaggaaagtatcggggccagatactaactgcaataggggtagatgggaacaatcaggtattgcccttggcatttgcttttgttgagagtgagaataccgacagctggtactggttcctaaaattgattaaaacaaaagttgttggtatgagtccaaatgtatgcctgatacatgataggcacgctggcattctgcgagcgataggagagttgcagtttgggagtatggaacgaggataccccggtgtttgggaagatgtacagagtaggtggtgcatgcgtcatatgggagctaatttcttcaagcaattcaagaacaaggagctcatgaacatgttcaagaggctgtgcaatcagaaccaggagaaaaaattcaatgagctttggaagagattagatgagttgacagccaaatgcagtgatcagcgtgcagcggctccatcgaccgccgttgctgaccctcctcaagctcttggacctctcccaacggatagtccaacattggttagaagaactggattggagattcggaaattttctcagtggattctgcatgaaccaaaagagaaatgggccaaggcgtatgacacaggtggtgctagatatggaataatgacaacaattttggcagaagtttacaattgggtgatgcgcggtgtccgtggactgccactagttggcatagtggagttcattttacatgggacatgcaggtttgagatactatgtcaagataaggcaggcaggggtatctaccgcaagagagtgaagcaggagtgtgttctcaaagccgacggcacatgttattgctcttgtgcaaagccgaagctgctccacaggccatgcacccatgtcattgctgccgcagcggagtgtggcataccagatgcagtatatgtgtcacagtacttcagtaagcaagcaatatatcatacatggagcggcgagatttatgggttcggcatagctggggagttcacagagactaacgatgaagtactcaatattcctgacccatcgaagctccgaggcaaggctggaaggaggaggactcgtcgcatccgcaacgatatggacgagtcggaggctggcagggtgaagcgttgcagcaaatgcgatgaacatgggcacacctacaagcattgtcctaaagacaaggagaaaccaagtgcggcggaggcaggactatcaggatcagcagcaaatggagctcgccctacggagatggcacgtcaggatacacctcagttgttggacccggcgatagatcaccgacaccggtctcaccttactgcggtgcagggggctcagcttgggacgttccgggcacggacgtgcggtgagctactcacggttcacgactcctttgtcgagaggctacgtgaggccggcctcctaccgatgtgtcggctggtggaggctgcggccggcgacgcggacccagccagacgatggactgtggacaggtccctcctagcagctttggtcgatcgatggaggccagagacgcacacttttcacttgccgtgcggtgaggttgagcagctacaggaggaggccgacgagtactcctacagccgatgtttggaggcgtacttgctctggctttttggctgggtgatgttctgtggcggccacgggcacgcggtcgacaagggactcgtgcactacgccaggagcatcaccgacgccgcggtaggcgaggtgcctcagtggagctggggttccgcgttgttggcggctctgtaccgtgcactttgtgagtcttgcacgaagacggatcccagcgcgacctttggtgggtgccctctctttctttctatctgggcagctgagaggattgcgatcggccgccctgaggtggaccagcacgcgtacgaggagtcactgtacgaggagcaaccagaggtcgactaccctacgatgggtactctgtggtgccgtcgtcagcgccgatgggctcacgtccaggttaggcggtcgtatcctgagtttgttatggagttcgaccgccttctgccgactgacgtcgtgtgggagccctacagtgccacggctacccaggctcgtgcgccgttgggtctgtccacactctgcaccagggaccaggcgtactggatgactacggttccgatggtcttcgacatctgcgttgagcctcacgcccctttccgcgtgatgcggcagttcggcttccgtcagccctttccagtaccgtttccgaccaccgtcccagctgctgttcacggggtcaccttcgctcccttggagcagcaaccccacgttgcgagcactagagacctctatgccaggcaccgcgaccaggacttcgctcgtgctgtcgacgacatcaaccgggtcgtcgttgacggttcaacgacgatccaacgtttaggcgcggggattccgacgacgttgctcgggcagacacagctgtacggcggccacccgtaccgactggtccccgtccagctgcgcacgttcctaggccaactccccctccgcacggagggtttcgtgcaccgttcagcaccccgccttcctcggctaggccttctgttgtgccccccacaggcagccggcacgtcgagtcagggtccaccactggaccatgctgggacctcgtcggaccacttgttgccttccaccttcctcttcgacatcactgacttcgacttcgcttcaggctcaacagaggacgtcatcgggccttcacagctgggaggcgcaccgccggtgcagacgcaggaccaagcgcaggccactcctccgcgggacactcgtgctacccgtgctgtgccaccggatcgtttcacctactcccaggaccacgtgcgagcacaggcccggaggaccaagcgtggtcgcggcgcggggcagggccagtag

SEQ ID NO: 81272 - DNA, 3888 bp, Oryza sativa
  Clone ID: PAT_MRT4530_80815C.1
atgtcgaacaaacaaatattccaagtttaccatggaccaggaaacgtccgttacggaccaactggggtagatctgtcagattttattgtatcagaaaggggaattgatagaccggctgagaggagtgtaccttctataaaaggatggttaatgaggggcttgagagttgatccacagacaagtgacataaaaatcaatgttatagtaagtcgggcaactgagggtttttattgggaactaatgccagttcaaaactctcgagtgtggagatggtatttggaaaatgcattgcaacgcgggtggcctctagctttggttccgtttgttcacccgaaggatccaggtgtgcagacgaacatggatgatggtgagggaccaagtgctgaagtaaacgagacttctgtggaggaggtcaacgcacgagaggacgggggcgtagtagctctagtgggcattcaaccaggtggagtggccgacgagggggagactgtcggtgccattgtggataaaatggagagggaggattctgacaacgagcgtgtagaggaaggtgattcgtcagatgatgagacggatattaatccagaagaatgggctagtgaggatttttctgggctgatcgtctctgaagaggatagtgtgagatgggagtacaaagaaaatgaggttattcagggagcgatttatagtaaagcagaagatatgaaggaggcgaaataccacaggaacattacatgtgcatttgttgcatctgagatgtatgcgcatgtcattgataatctcacatatgaaccaaggtcaataatccgacacattgaagagacatacaagtatactattagctatgccaaggcctggagggccaaacagaaaataatagagatgatatttggaacttacgaagcctcgtatgacaatttgccacgcctgcttggtgttatcgaggaaagaaaccctgggagctcttacaaagtgaagaaattaccctcaattgaacatcctggcaagagtgtgctgcaaagggcgttcttagctctacatgcatgcaagatggcattcgtgaactgtcgtcctgttctctgcattgatgggacattcttgacaggaaagtatcggggccagatactaacagcaataggggtagatgggaacaatcaggtattgcccttggcatttgcttttgttgagagtgagaataccgacagctggtactggttcctaaaattggttaaaacaaaagttgttggtatgaggccaaattggattctgcatgaatcaaaagagaaatgggccaaggtgtatgacacaggtggtgctagatatggaataatgacaacaaatttggcagaagtttacaactgggtgatgcgcggtgtccgtggactgccactagttggcatagtggagttcattttacatgggacatgcaggtattttagggatcagttccaggcagttcttccctctatgccgaacaacagcattttgtttggagctttcgtgcagaaaaagctagaggagttgcgtaaaaaggccatgaaacatcgagctctagtgcaaggtacccaacagctcatgtttgagatactatgtcaagataaggcaggcaggggtatctaccgcaagagtgaagcaggaccgaagctgctccacaggccatgcacccatgtcattgctgccgcagcggagtgtggcataccagatgcagtatatgtgtcacagtacttcactggggagttcacagagactaacgatgaagtactcaatattcctgacccatcgaagctccgaggtaaggctggaaggaggaggactcgtcgcatccgcaacgatatggacgagtcggaggctggcagggtgaagcgttgcagcaaatgcgatgaacatgggcacacctacaagcattgtcctaaagacaaggagaaaccaagtgcggcggaggcaggactatcaggatcagcagcagatggagctcgccctacggagatggcacgtcaggatacacctcagttgttggacccggcgatagatcaccgacaccggtctcaccttactgcggtgcagggggctcagcttgggacgatccgggcacggacgtgcggtgagctactcacagttcacgactcctttgtcgagaggctacgtgaggccggcctcctaccgatgtgtcggctggtggaggctgcggccggcgacgcggacccggccagacgatggactgtggacaggccagagacgcacacttttcacttgccgtgcggtgaggtagcccctaccctacaggacatatcgtacttgttggggctaccgctagcaggagacgctgttgggccagtgaccacggctgtggactggcaggacgatctgacggcacgtttcgcactagtacagcgcgcaccgcacctcccgctcgagccgttggcacaccaccgcaacaccggacctacgaagaggtggctgcttcagttcactctacaggcggaggccgacgagtactcctacagccgatgtttggaggcgtacttgctctggctttttggctgggtgatgttctgtggcggtcacgggcactcggtcgacaagggactcgtgcactacgccaggagcatcgccgacgccgcggtaggcgtggtgcctcagtggagctggggttccgcgttgttggcggctctgtaccgtgcactttgtgagtcttgcacgaagacggatcccagcgcgacctttggtgggtgccctctctttctttctatctgggcagctgagaggattgcgatcggccgccctgaggtggaccagcacgcgtacgaggagtcactgtacgaggagcgaccagaggtcgactaccctacgatgggtactctgtggtgctgtcgtcagcgccgatgggcccacgtccaggttaggcggtcgtatcctgagtttgttatggagttcgaccgccttctgccgactgacgtcgtgtgggagccctacagtgccacggctacccaggctcgtgtgccgttgggtctgtccacactctgcaccagggaccaggcgtactggatgactacagttccgatggtcttcgacatctgcgttgagcctcacgcccctttccgcgtgatgcggcagttcggcttccgtcagccctttccagtaccgtttccgaccaccgtcccagctgctgttcaccggtactcgcgcaagggtcagcagtcagctggcgactggcccgccaagttggcgacttttgttgaggactggttgctcgcaaccgaggaggtcgtggaccacgagggagagccacacactgaggagtcgtaccaggcctacctacgctggtaccagccacgcacccgtactagggtcaccttcgctcccttggagcagcagccccacgttgcgagcactagagacctctatgccaggcaccgcgaccaggacttcgctcgtgctacgacgttgctcgggcagacgcagctgtacagcggccacccgtaccgactggtccccgtccagctgcgcacgttcctaggccgactccccctccgcacggagggtttcgtgcaccgttcagcaccccaccttcctcggctaggccttctgttgtgccccccacaggccgcccacttctcccaggctgcagggtcagtgtctcaggcagctgtgtcgacctcgcactcagcgcagttctggcagtacactgggacttcgtcacaggcagccggcacgtcgagtcagggtccaccactggaccatgctgggacctcgtcggactgcttgttgccttccaccttcctcttcgacatcactgacttcgacttcgcttcaggctcgacagaggacgtcatcggcccctcacagctgggaggcgcaccgccggtgcagacgcaggaccaggcgtag

SEQ ID NO: 81273 - DNA, 680 bp, Oryza sativa
  Clone ID: PAT_MRT4530_80816C.1
cgataaaataagtcctagaatttatctattgaccatgaattgcccatcatttataaaacataatattccgctgcccatactacagcggaacataaacttacacgtccacaacaaaaatttaagcttaagatttgcatgctatagtaacatcttaagcctccgaactcgtatgcaaaggaaaggtggaatttgcacttcctcttagaaaacatccggattaaagcgccctggaattgagctgccctgctgagcttgcctaaggagcatgctcaatctgtagttattaagctcaaggtttctaacttgttcttggaactcagcaatgcgctgtttctcatcctgtagttcttgattcttcgcatcatagtcctgccgctcatgctgtatcgcaaatgctctcttcagaatggtgttttctcttgtaagcgattccatttgccccttaagcactgcattttccttttgaaaatcatgaggtccttgagcattgacatgagacaccacagccttctcaaaagcctccagcactctggtggcacgagactttgcatcatccatgttagaagcagttgtcatctcattcacaagtagctcgacccattctgagccatttgacggaaagttctcaggacaaggggcactttctgaaggtgcaccaatctcgttaccatctgaaacaa

SEQ ID NO: 81274 - DNA, 1971 bp, Oryza sativa
  Clone ID: PAT_MRT4530_80817C.1
ctactataagtggcagttgtacatttttacaaacaaaggaacatgcgttaagttgtattactagtttcatcatcttcttttttattgcttgtaacccccatctcatccttccatcatacaagatgcgaggaggagctacacacttttgttttcaagtcacagtaactacttatcaacagtaagttctcgacaacattatgtttatttcattttttgactaaagttaaccgttgtaactaattaattaattaattaattaattaggcaacaattaattaattaattaatcaatcagttgaagatgtcctggccaggggagagcagcttcttggggtcgtacttgtccttcctctgcacgaagcgatcccatttggcgccaaaatgcctcacccagtcgccgcggctgtcgtagtgcgccaggtacgccttgtacccgatcccggcgaggtcgcagaacctcagtatcctcctgttctgcgcctccagcgccgccacgtcgttcgccaccgccgagaacagcagcgacaccacgtagaacacctcctcctccccctccggcgtcaccgccgacatcgccgcatcccacttggatttgttgacggggtagatgatgagaggtccggcgatgtcggtggccgtctggaggatgcccttgaagacgccgcggtcgaagtcggcgatgcgggagcccgggacgaacaggttgagccacgggtgcgggacgcgccatagcccggccttctcgagggcctcctcctcgccgtacacccggtcgaggaactcctcgtaggtgacgtcgcgggagaaggagaacccctcctcgaagtggagatcgccgagcgccgccgccaccgccgcgtccacggacgacggcgtcgcgttcgcggcgtagttgagcgtcgcctcgatgctgtacacggcggtggcgttcctcgccgcggcgagcgcgacgacgcgcgcggcgtcggcgtcggagaagaacccgccggagctcttgagcgccacggcgaggccgcggccggcaaggtacaccgcgccctccacgtagctccatggcccgtgcgacccgtcgggccgcgccgcgacgaggcgctcctggtcggcggagaaggcggcgaagtcggcgtacacgaggcgcacccaccgcgcccgcgccggcgccggctcgacggcgacgcgcgcgcgcgtgatcacgccgaactggcccagcccgcccaggacggcgtcgaacaggtccgagttctcccccgtggcgcgcggctccgtcccgccatgcccggtgatgacgtcgagctcgagcacgttggagatctgtggcccgtgccggtaagtctgcccgctgacgccggcgttggagagggtgccgccgacggtgaggtggaggtagtccgtccacgaccgcggcgccacgccgcgcgccagcgcggcgcggagcacgtcgacccacagctgctcgccgccggcgtccacgtacgcgccgtccgccgacacgttgatccgcggcgcgccgccgccgcccatggactgcatgtggacgacgacgccgccggcggcgagggcctggcccatggtggagtggccgcggccgcggaacgagacggtgaacggccgccccggggcggcgtaggcggcgcgcaggagctccgccacgtcgccgggggagcccgggaacagcacggccgccggcagcgccgccgtgatgttgccgaagtccatcgacgccggcacggtggcgttcgggtcggtccggagcttgccggacgcggcgaggtcgccggggaacgggagaggcgccgccgccgccaacggaacgccgccgccggcgccatgcgcggcgagtgcatgggaggaggcgatcagcgcggcgatcagcaggtaaatcgccgccattagcggcgcgtttaagctcgctaataccactttaattaatccgcgagatcgatcgatgagagtgtttggtaattaaacgaa

SEQ ID NO: 81275 - DNA, 4221 bp, Oryza sativa
  Clone ID: PAT_MRT4530_80818C.1
atgtcgaacaaacaaatatttcaagtttaccatggaccaggaaacgtccgttacgggccaactggggtagatctgtcagattttattgtatcagaaaggggaattgatagatcggctgagaggagtgtaccttctataaaaggatggttaatgaagggcttgagagttgatccacagacaagtgacataacaatcaatgttatagtaagttgggcaactgagggtttttattgggaactaatgccagttcaaaactctcgagtgtggagatggtatttggaaaatgcattgcaacgcgggtggcctctagctttggttccgtttgttcacccgaaggatccaggtgtgcaaatgaacatggatgatggcgagggaccaagtgctgaagtaaacgagacttctgtggaggaggtcaacgcacgagaggacgggggcgtagtagctccagttggcattcaaccaggtggagtggccgacgagggggagactgtcggtgccattgtggatgaaatggagagggaggattctgacaatgagcgtgtagaggaaggtgattcgtcagatgatgagacggatattaatccagcagaatgggctaaggatagtgtgagatgggagtacaaagaaaatgaggttattcagggagcgatttatagtagagcagaagatatgaaggaggcgaaataccacagaaacattacttgtgcatttgttgcatctgagatgtatgcgcatgtcatcgataatctcacatatgaaccaaggtcaataatccgacacatcgaagagacatacaagtatactattagctatgccaaggcctggagggccaaacagaaaataatagagatgagatttggaacttacgaagcctcgtatgacaatttgccacgcctgcttggtgttatcgaggaaagaaaccctgggagctcttacgaagtgaagaaatttccctcaattgaacatcctagcaagagtgtgctgcaaagggcgttcttagctctacatgcatgcaagatggcattcgtgaactgtcgtcctgttctctgcattgatgggacattcttgacaggaaagtatcggggccagatactaacagcaataggggtagatgggaacaatcaggtattgcctttggcatttgcttttgttgagagtgagaataccgacagctggtactggttcctgaaattggttaaaacaaaagttgttgccaaatgcagtgatcagcgtgcagcggctccatcgaccgccgttgctgaccctcctcaagctcttggacctctcccaacggatagtccaacattggttagaaaaactggattggagattcggaaattttctcagtggattctgcatgaaccaaaagagaaatgggccaaggcgtatgacacaggtggtgctagatatggaattatgacaacaaatttggcagaagtttacaactgggtgatgcgcggtgtccgtggactgccactagttggcatagtggagttcattttacatgggacatgcaggtattttagggatcggttccaggcagttcttccctctatgccgaacaacagcattttgtttggagctttcatgcagaaaaagctagaggagttgcgtaaaaaggccatgaaacatcgagctgtagtgcaaggtacccaacagcacaggtttgagatactatgtcaagataaggcaggcaggggtatctaccgcaagagagtgaagcaggagtgtgttctcaaagccgacggcacatgtcattgctcttgtgcaaagccgaagctgctccacaggccatgcacccatgtcattgctgccgcagcggagtgtggcataccagatgcagtatatgtgtcacagtacttcagtaagcaagtaatatatcatacatggagcggcgagatttatgggttcggcatagctggggagttcacagagactaacgatgaagtactcaatattcctgacccatcgaagctccgaggcaaggctggaaggaggaggactcgtcgcatccgcaacgatatggacgagtcggaggctggcagggtgaagcgttgcagcaaatgcgatgaacatgggcacacctacaagcattgtcctaaagacaaggagaaaccaagtgcggcggaggcaggactatcagaatcagcagcagatggagctcgccttacggagatggcacgtcaggatacacctcagttgttggacccggcgatagatcaccgacaccggtctcaccttactgcggtgcagggggctcagcttgggacgttccgggcacggacgtgcggtgagctactcacggttcacgactcctttgtcgagaggctacgtgaggccggcctcctaccgatgtgtcggctggtggaggctgcggccggcgacgcggacccggccagacgatggactgtggacaggtccctcctagcagctttggtcgatcgatggaggccagagatgcacacttttcacttgccgtgcggtgaggttgagcagctacaggaggaggccgacgagtactcctacagccgatgtttggaggcgtacttgctctggctttttggctgggtgatgttctgtggcggtcacgggcacgccgtcgacaagggactcgtgcactacgccaggagcatcgccgacgccgcggtaggcgaggtgcctcagtggagctggggttccgcgttgttggcggctctgtaccgtgcactttgtgagtcttgcacgaagacggatcccagcgcgacctttggtgggtgccctctctttctttctatctgggcagctgagaggattgcgatcggccgccctgaggtggaccagcacgcgtacgaggagtcactgtacgaggagcgaccagaggtcgactaccctacgatgggtactctgtggtgccgtcgtcagcgccgatgggctcacgtccaggttaggcggtcgtatcctgagtttgttatggagttcgaccgccttctgccgactgacgtcgtgtgggagccctacagtgcagcggctacccaggctcgtgcgccgttgggtctgtccacactctgcaccagggaccaggcgtactggatgactacggttccgatggtcttcgacatctgcgttaagcctcacgcccctttccgcgtgatgcggcagttcggcttccgtcagccctttccagtaccgtttccgaccaccgtcccagctgctgttcaccggtactcgcgcaagggtcagcactcagctagcgactggcccgccaagttggcgacttttgttgaggactggttgctcgcaaccgaggaggtcgtggaccacgagggagagccacacactgaggagtcgtaccaggcctacctatgctggtaccagccacgcacccgtactagggtcaccttcgctcccttggagcagcagccccatgttgcgagcactagagacctctatgccaggcaccgcgaccaggacttcgctcgtgctgtcgacgacatcaaccgggtcgtcattgacggttcaacgacgatccaacgtttaggcgcggggattccggtacccgtagaggagcacctgacgacgtacacgcggatggtggagtcgatgcgctcgattctccgagtgctcacctgtcgtgcagacgacgttgctcgggcagacgcagctgtacagcggccacccgtaccgactggtccccgtccagctgcgcacgttcctaggccgactccccctccgcacggagggtttcgtgcaccgttcagcaccccgccttcctcggctaggccttctgttgtgccccccacaggtttcgcccagttcgctatgacgcaggccgcccacttttcccaggctgcagggtcagcgtctcaggcagctgtgtcgacctcgcactcagcgcagttctggcagtacaccgggacttcgtcacaggcagccggcacgtcgagtcagggtccaccactggaccatgctgggacctcgtcggaccgcttgctgccttccaccttgctcttcgacatcactgacttcgacttcgcttcaggctcgacagaggacgtcattggcccctcacagctgggaggcgcaccgccggtgcagacgcaggaccaggcgcaggccactcctccgcaggacactcgtgctacccgtgctgtgccaccggatcgtttcacctactcccaggaccacgtgcgagcacaggcccggaggaccaagcgtggtcgcggcgcggggcagggccagtag

SEQ ID NO: 81276 - DNA, 4452 bp, Oryza sativa
  Clone ID: PAT_MRT4530_80819C.1
atgtcgaacaaacaaatattccaagtttaccatggaccaggaaacgtccgttacgggccaactggggtagatctgtcagattttattgtatcagaaaggggaattgatagaccggctgagaggagtgtaccttctataaaaggatggttaatgaggggcttgagagttgatccacagacaagtgacataacaatcaatgttatagtaagtcgggcaactgagggtttttattgggaactaatgccagttcaaaactctcgagtgtggagatggtatttggaaaatgcattgcaacgcgggtggcctctagctttggttccgtttgttcacccgaaggatctaggtgtgcagatgaacatggatgatggcgagggaccaagtgctgaagtaaacgagacttctgtggaggaggtcaacgcacgagaggacgggggcgtagtagctccagtgggcattcaaccaggtggagtggccgacgagggggagactgtcggtgccattgtggatgaaatggagagagaggattctgacaacgagcgtgtagaggaaggtgattcgtcagatgatgagacggatattaatccagcagaatgggctagtgaggatttttctgggctgatcgtctctgaagaggatagtgtgagatgggagtacaaagaaaatgaggttattcagggagcgatttatagtagagcagaagatatgaaggaggcggtaaaacattttgcagtgtcacttcatagagagtttagggttgccaagtcgaaccggtcgcaatatgaagttcagtgtgttaaggaaaaagatggttgtccctggagagtgcacgcgtataaggggaaatggaaggattattggacagtgtcagtcgttaccaagcatatatgttttctacctggtgttcagaaataccacaggaacattacttgtgcatttgttgcatctgagatgtatgcgcatgtcatcgataatctcacatatgaactaaggtcaataatccgacacatcgaagagtcatacaagtatactattagctatgccaaggcctggagggccaaacagaaaataatagagatgagatttagaacttacgaagcctcgtatgacaatttgccacgcctgcttggtgttatcgaggaaagaaaccctgggagctcttacgaattgaagaaattcccctcaattgaacatcctatcaagagtgtgctgcaaaaggcgttcttagctctacatgcatgcaagatggcattcgtgaactgtcgtcctgttctctgcattgatgggacattcttgacaggaaagtatcagggccagatactaacagcaataggggtagatgggaacaatcaggtattgcccttggcatttgcttttgtcgagagtgagaataccgacagctggtactggttcctgaaattggttaaaacaaaagttgttggtataaggccaaatgtgtgcctgatacatgataggcacgctggcattctgcgagcgatagaagagttgcagtttgggagtatggaacgaggataccccggtgtttgggaagatgtacagagtaggtggtgcatgcgtcatatgggagctaatttcttcaagcaattcaagaacaaggagctcatgaacatgttcaagaggctgtgcaatcagaaccaggagaaaaaattcaatgagctttggaagagattagatgagttgacagccaaatgcagtgatcagcgtgcagcggctccatcgaccgccgttgctgaccctcctcaagctcttggacctctcccaacggatagtccaacattggttagaagaactggattggagattcggaaattttctcagtggattctgcatgaaccaaaagagaaatgggccaaggcgtatgacacaggtggtgctagatatggaataatgacaacaaatttggcagaagtttacaactgggtgatgcgcggtgtccgtggactgccactagttggcatagtggagttcattttacatgggacatgcaacattttgtttggagctttcatgcagaaaaagctagaggagttgcgtaaaaaggccatgaaacatcgagctctagtgcaaggtacccaacagcacaggtttgagatactatgtcaagataaggcaggcaggggtatctaccgcaagagagtgaagcaggagtatgttctcaaagacgacggcacatgtcattgctcttgtgcaaagccgaagctgctccacaggccatgcacccatgtcattgctgccgcagcggagtgtggcataccagatacagtatatgtgtcacagtacttcagtaagcaagcaatatatcatacatggagcggcgagatttatgggttcggcatagctggggagttcacagagactaacgatgaagtactcaatattcctgacccatcgaagctccgaggcaaggctggaaggaggaggactcgtcgcatccgcaacgatatggacgagtcggaggctggcaggctacgtgaggccggcctcctaccgatgtgtcggctggtggaggctgcggccggtgacgcggacccggccagacgatggactgtggacaggtccctcgtagcagctttggttgatcgatggaggccagagacgcacacttttcacttgccgtgcggtgaggtagcccctaccctacaggacgtatcgtacttgttggggctaccgctcgcgggagacgctgttggcccagtgaccacggctgtggactggcaggacgatctgacggcacgtttcgcactagtacagcgcgcaccgcacctcccgctcgagccgttggcacaccaccgcaacaccggacctacgaagaggtggctgcttcagttcaccgttgagcagctacaggcggaggccgacgagtactcgtacagccgatgtttggaggcgtatttgctctggctttttggctgggtgatgttctgtggcggtcacgggcacgcggtcgacaagggactcgtgcactacgccaggagcatcgccgacgccgcggtaggcgagacggatcccagcgcgacctttggtgggtgccctctctttctttctatctgggcagctgagaggattgcgatcggccgccctgaggtggaccagcacgcgtacgaggagtcactgtacgaggagcgaccagaggtcgactaccctacgatgggtactctgtggtgccgtcgtcagcgccgatgggctcacgtccaggttaggcggtcgtatcctgagtttgttatggagttcgaccgccttctgacgactgacgtcgtgtgggagccctacagtgccgcggctacccaggctcgtgcgccgttgggtctgtccacactctgcaccagggaccaggcgtactggatgactacggttccgatggtcttcgacatctgcgttgagcctcacgcccctttccgcgtgatgcggcagttcggcttccgtcagccctttccagtaccgtttccgaccaccgtcccagctgctgttcaccggtactcgcgcaagggtcagcagtcagctggcgactggcccgccaagttggcgacttttgttgaggattggttgctcgcaaccgaggaggtcgtggaccacgagggagagccacacactgaggagtcgtaccaggcctacctacgctggtaccagccacgcacccgtactagggttaccttcgctcccttggagcagcagccccacgttgcgagcactagagacctctacgccaggcaccgcgaccaggacttcgctcgtgttgtcgacgacatcaaccgggttgtcgttgacagttcaacgacgatccaacgtttagacgcggggattccggtacccgtagaggagcacctgacgacgtacacgcggatggtggagtcgatgcgctcgattcgccgagtgctcacctgtcgtgcagacgacgttgctcgggcagacgcagctgtacagcggccacccgtaccgactggtccccgtccagctgcgcacgttcctaggccgactccccctccacacggagggtttcgtgcaccgttcagcaccccgccttcctcggctagtccttctgttgtgccccccacaggtttcgcccagttcgctatgacgcaggccgcccacttctcccaggctgcagggtctgcgtcacaggcagccggcacgtcgagtcagggtccaccactggaccatgctgggacctcgtcggaccccttcttgtcttccaccgtgctcttcgacatcactgacttcgacttcgcttcaggctcgacagaggacgtcatcggcccctcacagctaggaggcgcaccgccggtgcagacgcaggaccaggcacaggccactcctccgcaggacactcgtgctacccgtgctgtgccaccggatcgtttcacctactcccaggatcacgtgcgagcacaggcccggaggaccaagcgtggtcgcggcgcggggcagggccagtag

SEQ ID NO: 81277 - DNA, 492 bp, Oryza sativa
  Clone ID: PAT_MRT4530_8081C.1
atgacgctctacaccaccgtagccacgccggcagaagctgccggcgttccttcgtcgcaacaccccgtcttcgccggccacggcccaatcggccaccactccggcggctggctgcgcgtcttgacgcggccgggagcgctccagcccggcgcggcggccgtcgtcgacgagaggttccacggcaagaaagagttcgggatgccactggctgggaagcttcagggagttctcgtcaccggcctggaggatgacgacgatagccgtattgtggcagtgacggccttgttttccggcgacggcgaggaggatagcatcaggttcttcggggtccatcgcgacgaccaggaagagtctcacatcgcggtggtcggagggacaggacggtacgacggcgccaccggtttcgccgttgtcagagcagctgacgcacataaagctggcagaaatgtcagctcgaactcagttcttagtttcagagtgcatttgaagtag

SEQ ID NO: 81278 - DNA, 382 bp, Oryza sativa
  Clone ID: PAT_MRT4530_80820C.1
ggggggaaaatttggtttccatgggacagaaatgggggggcaactgtttcaaggtacataaaagaggaaggcaggcaggtcacttgttgaaaaaaaaaagagcattttaggaggagggggggggggtaaccggatggggctgaccgcttttgaaaacacaccaagtgaaaaaaacccccccggtaaaacaatggggccggggacaaccagatcctgggaaagttgggcctgcccatgaaggcaaaggggccccaatcgtggaagtcaaccccgggggggcatttgccggggtccctggcgaaaaggggttcctcgtggccccagaattggacggagcctgaagccctggggttcaagccgttccttccgaaggaaaggtttt

SEQ ID NO: 81279 - DNA, 474 bp, Oryza sativa
  unsure (1)..(474): unsure at all n locations
  Clone ID: PAT_MRT4530_80821C.1
gataacgcagatcttgacaaatctantccatgttgcaaagcttgaagtgatttgtgtataactatgctctagacattttctnttcttgcgctttctctagttgaaaatatacaatgtgtantttctgctgtacggtaagctantctgctaatatgtcttatgtagtacttccccgtttcataatgtnattcattcntgcatttctcacattcatattgatttaatgaatctagatagatatatatgtctagatttatccacatcnatatgaatgtgggaaatgccanaatgacttacnttgtgaaaaanaaggnntncacccnttccngctcccncaatntatctacnatcaaaagccanccntgttaagcattganatacatccattgtaaatttccancgacanggcanatgttttgtttttctcactttcttgggtnacagtcancaanggattgacttgggaccnccnaa

SEQ ID NO: 81280 - DNA, 802 bp, Oryza sativa
  Clone ID: PAT_MRT4530_80822C.1
tcagttggcggaggtggagaaggctaggagggagtgggtggcgtggaggtgctggtggtgcgggtgaagcctcgccgacgcctccggctgatgcggtgtcaggatcacgtggctggagtagaggagcggcaatggcggcggtgaggcttgcctcgctagtgtccgcatcacctccaggggaagagaggaagaggggcggcaacggatgacgcccgcctcgtcgtatccggagccacctagccacgccccctccacggcgctcccaccgttgtctggagcccagccatcggttccccctccttgccgcgcccgccgaggcgagtggagggcggagcaggcgagtgaggcgggctgtctgagctccagatgcggtggctcggcatgcgccgcagcagggatcctcaagatggtggacaacgacgcaggcgacgggagcctcgaccgggagagaggaggtggcggcggggtggccttggccttgggcgctaggacgggtgccttggtggacttggtggatggcgcgatggccggaggcaaggtggtgggcgccgtgggaagggccggggtggcaggggtgatcggcgcggcagtgggtgcagtggtagtaggcacagcggcaggcgcgggcgtcttcttggaggagaccggcggcgtggtggtcggcgccgccgcggggtcgtacaccaccaccgcggccatcgaactccatctccttctcgagcgtggtggcgatggagggcccacgaggaagagcggatcggggatgcagatcctggccggccatgcgaggtggataggctag

SEQ ID NO: 81281 - DNA, 304 bp, Oryza sativa
  Clone ID: PAT_MRT4530_80823C.1
gcaatatcgctgaggttgacttgctaacatagatggccatgtgggccgccgaggcttgtcgggccggcacggcccgaccgacgcaccgggccgtgccgtgccagcccactccctatactttgtgtgccgggcctagccagccggcccatcgtgccgggccggcccgaccgtgccgggccagcccagcgtgccagtggggaggcccaggcacggctcggtcgccgagccatgcttgggccgggccaaaaagtagtgccgtgggccgggccttcgggcctcgggccttatggccatctatacttgc

SEQ ID NO: 81282 - DNA, 431 bp, Oryza sativa
  Clone ID: PAT_MRT4530_80824C.1
gcacgaggaaacagtaggagaggctcctactgtgatatattaaaggagtttatgtacaagagtttatatacagggggctggaaatgttacaaattgtcaagccatgatttccagagtggacgttcatgcacttttatcctattcaaaagtagaataaaatcttctcggaagcagaatttccagaggttgaaagatggctagatcgtttctgaagataagatcgtttcttcgcttccaaatgtttcaaaaagctatagcaatgacttcaataaagaaagagtgagcaaagtctcttttagctgtggttaccatgttcatgaattctcgagttgtgtgccaacggatatgaaggaatgtccaacattgtacggcgaaggagcaaggtgaagaacaggtgacttacattgaaattctttctgtgcatcaagtct

SEQ ID NO: 81283 - DNA, 357 bp, Oryza sativa
  unsure (1)..(357): unsure at all n locations
  Clone ID: PAT_MRT4530_80825C.1
cggacgtggcngngnacgcttggggcatagtggggcatacttttncatgcaagagttattctaccantatttgtngcctaccatctctgtcaaactcagggtgtgtttagttccacgccaaaattggaagtttgaagaaagttggaacgatgtgacggaaaagttggaagtttgtgtgtgtagaaaaattcgatgtgacgttttgagggttcaaactttgcaactaaacacggcctcatttctttgttattaaggccctgtttagatccgaccccaaaattttacacccagtcacatcgaacgtttgaacacctgcatgaagtattaaatataggctaaaaaaataactaccaacag

SEQ ID NO: 81284 - DNA, 747 bp, Oryza sativa
  Clone ID: PAT_MRT4530_80826C.1
atggcacggggctccgcaccgctcgatggtagcgtgctgccgccttcccgcatcgtgagcgagaggcaggctgggctaccgcgccgcttcatgccggaatctgccaccggccgggagatggtcgcgctgggcgagggacgcccggcgccacgttacccggggcggtccgtcttcttcctctcttttgcaatggcagggctagtcccgccattctcttctttcttcatggatgttctggagcattatgatctccagatggcgcacctcacccccaacgcggtaatgacgttggccatcttcgcacacctgtgcgagatgtttatcggggtgcgcccatctcttcggctgttccggtggttcttcaccgtacagccagtgtcgccgccgtcggtggtcggtggctgctacttccagccgcgggggccggtgctgagccgctacattccctgcgtcctgcgcaagaagtgggacgactggaagagcgactggttctacacccccctcgccgacgaagcgcgcctccgacttccgagccagcccccggcgcaggcctccagctggcgcgtgccggggctcacgggggccatggtgtacgacgactaccttcgtcgccggatcgcgccgctccagcggcgcgcccggggcgcctgggagtacaccgggtcgaaggactacatgaggacccaccaggggggcagatgggactggcccctgaggatttcaagatggtggtccaacgggtgctga

SEQ ID NO: 81285 - DNA, 3047 bp, Oryza sativa
  Clone ID: PAT_MRT4530_80827C.1
tttttttttttttttcatcctacctttccattacgaaatttctttcttttcgaagattaagaaagagccgaaatagcttgaaataaataataattgttccgatggaaccttctacatggtataagcataaccttaatgaattaactaaacttctttttaaattaaaataaaaatagaaaatctaacctcttagcgttctaaggtcaaaaatctagtttaaagtaaaaaatctgctttatgtatccttaaatcatataaatggggtaaatggtgattctgatgtctcatagaaattgtttgttacgtcagaatcagaagaaactaattctgtatggagaaacaaaatatctctcatttccgacgcaaatagttttttttttttgaatttcgaaataaaggttcttgtcttgtgggtaacggtgcacaaatttttggaatccggtaccaacaggtataatcccccccagaactacgttttctttcaggcctttcaaccaatcaatacgacctcgtaaggcagcttttgctaaaactcgagcagtttcttgaaaacttgcttcagatatgaaactttgggtattcagggaaacccttgttattcccaataagattgcccgataatagatcgattcatccaaagcccgccctgctcgctctgctcgcaatagtccaattaattccccaggtgaaaaaacattagacattccatcttcggaaacccgcacttttgatgttacttggcgtataataatctctatatgtctattatggatctgtaccccttgggatcgataaaccttttggatcttattaaccaaagagatacgactttgggctatggttaactcagctccaatcaagaatccccaaggacccccaagaattcttggtatacgctcattccaatcctcaattctcctttcgagattcggcgatagtgaatcaattgaacgcgcttcgaagatttgttctacttttggaagaccttgcgttatgtcactagatctcgctttttcgtatataaacgtaactaacctatcccctttgtaaaggatttctccataatgaccatgaacagttgctcctgtagtggccaaataaggcttagctgctcttataacaaaggaatctatatttacaatgaaaatttgacctgatttttttatgtgcgatttaaatagacatacattttcgcaaataaattgtccaaggtgaatttttgctgatgtctcttcccaagaatcatgagggagaaagtgccaatttaactggaatggatccaacatgatgttactatcgaaatttgaagtcctttgattttcatttattaaagagtgtttaagtccttgaagtactttgaagttttgtttcaaattgtcaaggagcaaatgcttttttaacaggatctgattatacgttagtaaatagtaagatgaagaaaaattcgatatactaggtgcaatagtacctaagagtcccgaaaaatttcgaaagagccccaaaaattttggaataggaattctaggattcgattcttttaccccattgggattttttgaattcttaaaaaaaccaattcgagaacagttggatgccgacaaaaccatcaaagattggtattctttatttcgattcaacaaggtaccaatagcttcttgatgttggctaagtgattgaatcttcgccttggaataaaaggaattggtattggtgcgatctaacctattatggagaatcagtcctgcacttctgctatcatacctttttcgtgtatacgaaatagtggatttgattaacccaattcttaggaaatcgcgaatcagaccatttgctcttatctcaacaagggaagcacgagcctcctctttttcttcttgttcccaattcaatactaagcaagttcgaacgaattgactattcgtatgataaattctttgagttaacttgctattttcatgagaaataaaattgacaagtcgaagttggagattaccctcttcctgcaagagatcctgtgggaaaagtgttgctaaatttctcccttcgttcatttcatacgcgactgaggtcgaaccaaaacaaaatacttttccttgctcttgagaatttttttccactgaacatagacccaattttcccttttttttgattccttcgaatctttttttttctctttctagtggtatcaaactgccacctaatatcttatccgcctcttcaggaaaatgaatatctccagaaaagatttttagttccgtatggcttttttttctcttcactcgaaccaatccacccagccgacttcttgtattttttgtgagttgtgtatccactccaataatactattgtcaagtacctttagggatgaggatctcggcaagatatgcagttcttggagaatgaaaaaaaaccgatctacttctttttgggtattttagactaaattcttttgttcctcgatgctcaatcaaaacccccttttttaagacggaatcttcctccgggttcccatattcgtcctctgagtcttcctctgagtcttcctctaaagtcccatgttcgtcctctgagtcttcctctaaagtgccatatttatcctctcgggtcctatattcattttctgggctcctgtatttgttctccgagtctttctctcgattcctatattcgtcctctagggtcctatatctaaatttaacaattctcaaatcctttttatcatttttgtatcgtgggttgtcaaaataagcaactatagtatttctacgtaaaacacccataaagggtatttcaatcgaaatcccaaaaacaggatattggttctttcgcttgctcttgatgatactgtttcttcgcattttggctaacaaatctgaattattttgaagaatagaaggatagacaaaattcaaatgaccattggacatgattcgatccggcgttgaataatcaagaatttccctatcttttttaacaaaagtatccattcagtcgttccttttatcatgccatttttgttatttatcagtttttttggaacaaaaac

SEQ ID NO: 81286 - DNA, 2288 bp, Oryza sativa
  Clone ID: PAT_MRT4530_80828C.1
gacttgaaaaaggagaaagcctgatatggaaggagtgagtgcaggctgactggcaaatgctatgcaagctatgccaacgttcacccgcaccatgctgttgaatgtaccggctctcgtctcacaaccattgtgaacgtcgaaacactgatagtggacaggatgccggatctttgttggacgctgcagctagttgttcggagagttgggaggcagggcgtcgatcaggcattttcggagctgccagctcgcagggaagagggtcgccaaaatgaaaaaaaagctcggagagctgaaggcttaagtcttaagcttacaactagattaactctacccctatttatgtttgtacgcgtacaggttgaagggcctgaagcgtgtgctaaactgctggtgtttgggagcgagggtgtctccgtcactgcgggacctgaagtgtgtgcaaaagtggatcttctgattcttattgtcgaggtgagaaaagagaattgtctggttttgacggaagacgagtaggtgacccacattgacaaggatggtgtaatatggaagctttttttaactgataactccaaatggataagaaacagaaaattcaggcttgggctgagggttgccccagggtcttttgaaggtattcgtgttagggaggcgaagacagaagcttttactgttaaggatcacagaggggaattgtacaaaaagcactatccacctgccctaaaggatgatgtttggagattagaaaagattggcaaggatggtgcattccacaagaagttaaatgcaagtgggatttatacagttgaagattttctccagcttcttgtcaaggatcagcagaggttacggagtattcttggcagtggaatgtcaaataagatgtgggaaagccttgttgagcatgcaaagacttgtgtcttaagtggaaagcactatgtatattatgctattgactcaagaaatgtcggtgcaatattcaataacatctatgagttcactggtttgattgctgacgaccagttcatttcagcagaaaatctcactgacaaccagaagatctatgcagatggattggttaagaaagcatatgaggattggatgcatgttgtagaatatgatggcaaggcactcctgagcttcaagcagaaaaagaaatctgtcacaacaagaagtgacacggctgcagcagcaacaaacagccctgtttcctatggttcatccaacacacacaaacaattgtctcaaccagcaaaagcagggcaaacttctacaggcactacaagtgaagcagatggatctacaagtgcatacaatggaaatcaggcaggacgatatgcagtcaattctcaaagcatacctgcaaacgtcactacacaatatgagcggagttcactgacacctgaaagccagttcaatggttgcaaacgtcactacacaatatcgagcggagttcactgactcctgaaagccagttcaatggttccgcactgccgaatcaagtttctaggggctccaatatactggcacttgggaccaccacagctgaaaccattcagcgaaagttcgcaaacttcggaggcactaggtggggttgacgactacctgatggaggagatcaggatgcggagccacgagatattggagaacgaagagatgcaacagatgttgcggattttgagcatgggtgggatgcagagccaacgagatattggagacacgaagagatgcaacagatgttcgcggattttgagcatgggtggcgcgtcaaccaacctgacggaagacggcttcgcatttcctaactacatgccatcaactccccccaacttcaactttggggatgaccgtgcccgcccacctgggaaagccgtcgtcgggtggctcaagatcaaggcagctatgcgctggggcatctttgtcaggaagaaagctgccgagagaagagctcagcttgttgagctcgaggactagcaaacatcctaactgctggtctaacaaagctccattggtgttgctgctgctgctgttttaaggatctgaaaaatgggcttagcagctcctgtttggaggacgcttccttgaggccctgggttcttaattatggacacggattctcgtctactctttttttgtatagttgtttcatcattgtttgtttagtgtgatgcttagttgaatcctgtacgaaccttaaccagaactgtgtacatttaattgtttcaaaattcacacaagcattcgacaaaaaaaaaaaaaaaaaaaactctctctctctctctccctcgtgc

SEQ ID NO: 81287 - DNA, 842 bp, Oryza sativa
  Clone ID: PAT_MRT4530_80829C.1
atggagcaatcggcggcgaccgccttcaccaagtgcgtcgtggggaagctcctggaggtgctcgacacgaggtacaagatgctcagggacctaagccacgagagcgcctccatgcagaacgacctcctcctcctcgcggcgttcatggacgaccagctccggcggtcgtcgtcatcgccggcggcggagaggccgaccgccgtgctgagggcgtacaccgagctcatgcgcgagctgacgcacgacatggaggactccatcgagcgcttcctccaccgcgtcgcgccgcgcgacgaccacggcggcgccggcgcgcccagctggccccgccgcgccgcgcggtgggtggccacgctccgcacccgcctccggttcgccgccgagatccggaagctgaagacgcgcctggaagatgagaccaaacgcctgaggaacgccgtcgaggccgctgccgccgccggcggcggtggccattcctctgccacgccggcgctggcggcggcagctccccgcggcggtcacgtggagccgaacccggtgggcatggagaagcctatcgagcatctcgtccagctgctagatgaggccggtgccggcggcgggccgcagcagctgcgggtgatcgccatcgtcgggttccgaggatcggggaagaccaccctcgcacgggcggtgtacagtcggtccggccgccagttccgcgagcgcgcatgggtcgacgcgtccaggtggacggacgtcggcgaccttctcgccgacatagtccggcaggtgtgcctcggagaatatgatgttagcgaatctcacgaggagaatcttcgaaaccgtctcaagaacaagcg

SEQ ID NO: 81288 - DNA, 186 bp, Oryza sativa
  Clone ID: PAT_MRT4530_8082C.1
atggagaccaacctccattctgcattctctgccaccctcaaggtgctcgacctcagccccaacccacatctactgggtgaatccagtgaatggactatcatacaagacaagtacatatggctatattaccacctaaaaatgacggaggttcatacctccacagaattaatgtcaagaatggagtga

SEQ ID NO: 81289 - DNA, 3198 bp, Oryza sativa
  Clone ID: PAT_MRT4530_80830C.1
atggcacggggctccgctttgcttgatggtagcgtgctgccgccttcccgcatcgtgagcgagaggcaggccgggctgccgcgccgcttcatgccggaatctgccaccggccgggagatagttacgctgggcgagggacgcccggtgccatgctacccggggcggtccgtcttcttcctcccttttgcaatggcagggctggttccgccattttcttctttcttcatggatgttctggagttttacgatctccagatggcgcacctcacccccaacgcggtaatgacattggccatcttcgcgcacctgtgcgagatgttcatcggggtgcgcccatcccttcggctgtttcggtggttcttcaccgtacagtcggtgtcgccgccgtcggtggttggtggctgctacttccagccgcgggggccggtgttgaaccgctatattccctgcgtcctccgcaagaagtgggatgactggaagagcgactggttctacacccccctcgccgacgaagcgcgcctccgacttccgagccagcccccggcgcaggcctccagctggcgggcgccggtagatctgggagatggctatgacgccgtcctcgaccgcctggcgggcctgcgatccctggggctcacaggggccatggtgtatggcgactaccttcgtcgccggatcgcgccactccagcggcgcgcccggggtgcctgggagtacaccgggtccgaggactgtatgaggacccaccggggggtcaaatgggactgggtccccgaagacttcaaggtaatgatccaacggatgctgaatctcagctccgcggaggcatccctcatcccccaaggagtcctccccctctgcagcgatccatatcgcgccaacatcctgaccatcatgcaggcggtcggggcgtcggaggagcgggctcctcgaggccacgatggctcgggcgggagccgcaggggggaacaatctaccccgggagggggtcgtgcttctgggccccgtgatgggggctcggggggcagccgccctgccgacgcccgagggaagagaaagcaagagggtacttcctccccatctcctccccgagggggcggggcggcgcgtgtcagcagcaggcgcccggagggggccgcgccgacgccgcagctcgagagggagcggaagaagaaacggctccgcaagatgggggggacagaaccatcccggggaaacctcatttcccctccaaggtggtcgtttaaccgaccccctcgcagcgagatcccgtcgcgtccctcccgccattccaagtccggccagtctgaggccgaggacccggcgaccacagaggcccggaggcggaaatctgaccggcgagaagccgcggatcgccttcgggaagccgaggaggccgctcgggaggccgcccgggctcgccagaccgaggaagccgctcgggaggaggccggactctgccaggccgaggcgacgacatcctccgaggcgacccgtgaaactgaccggcaagaggccgtggatcgccttcgagaagccgaggaagctgcccaggtggccgtccgagctcgccaagctgaagaagccgctcgggaggaggctagacttcgccaggccgaggcgacaacgacttccgaggcaactcgcggcgaggccgcgggtgcatcgcttgggcccactccctcgtgcgacgctcaggacaaaccaggtccggggaacatccccgagtccggcacgtccatcggcgggccaagccgcgcggcatcctcttcgaggcggctcttccccacaccttccgttgctccactgagcgcagaaccccttctgcaggccttggccgtcgcaaacaccacggtgttggacgggttaaatgcccaggtggaggccctgcaagcagagcgggcggagctcgacgccgcatgggcacgtgtcgaagaggggcgacgctcggtggaggccatggtggaggtgggccgcaaggcacaccgccggcacgtctcagagctcgaagcccgtcggaaggtgctgggggagatcgccaaggaggtggaggaggagcggggggctgccctcatcgccaccaccgtgatgaacgaggcgcaggacaccctccgccttcaatacgggagctgggaggtggagctagggaagaagctcgacgccgcccagggggtccttgacgctgccgctgcccgagaacggcgggcggcggagaccgaggtggcatcccggcggcgcgaagaagcccttgaggcccgtgccatggcgctggaagagcgtgcctgtgccgtggagagggacctagcggatcgcgaggctgccgttgccatccgggaggcaacgctgactgcgcacgaggccgcctgcgccgaagaggagtccgcgctccgcctccgcgaggacgcgctcaccgagcgggagcgagctctcaaggaggccgaggccgcggcgcaacggctggcggacagcctatccctccgcgaggcagtgcgggaggagcaggcgcgccgtaatctagaaggtgcccgcgccgagagggccgcgctgaatcagcgggccgctgagctcgaggcgcgggagagggagatggacgcgagggcgcgcagtggcggggcggccgcgggtgaaagcgacttaaccgcccgcctcgcagctactgaacacaccatcgccgatctgcagggcgcgctagactcgtccgccggggaggtcgaggccctccgcttggcaggcgaggtagggcccggcatgcttcgggacgccgtctcccgtctagaccgcgccggccggcaggcgggcctctggggcgggcggactgcgaagtacgccgccaaccaggggggcctcgcccagcgcctctcggagatagccgggactctccaacggcttcccgaggagctcgagaggacgattaagtcatcctcgagggacctcgcccgaggagcggtggagctcgtactggcgagttaccaagccagggatcccgacttctccccatggacggcgctggacgagttccctccctggaccgaggacggcgcgcgcgcgcaggtccgggacgccgccgaccatatcgtccacaacttcgagggttcggcccctcggctcgcgttcgccctcaactccgacgaggaggacgatgacggcggagtgggcgacaatggcgacgaggctggcgacccgggtgcatcggagtga

SEQ ID NO: 81290 - DNA, 1695 bp, Oryza sativa
  Clone ID: PAT_MRT4530_80831C.1
atggctgatgatgaggacgaatataggactcgagaggaggaatccgaggacgaatatgggagtccagagaacaaatataggcaccgagaggataaatatggcactttagaggaagactcaaaggacgaacatgggactttagaggaagactcagagaacgaatatgggaacccggaggaagattccgtcttaaaaaagggggttttgattaagcatcgaggaacaaaagaatttagtctaaaataccaaaaagaagtagatcggttttttttcattctccaagaactgcatatcttgccgagatcctcatccctaaaggtacttgacaatagtattattggagtggatacacaactcacaaaaaacacaagaagtcggctgggtggattggttcgagtgaagagaaaaaaaagccacgcccatccggcctttgattactctgggccagaggacacgaccagggtctctcctcggggtctggacagtgacaccgtgggacgccgcgttggtcagataatgatcagcgtgcccacgaaggcgggcgatatccccatcgcactctgtgataaggatgtgactgagcgcgccgccgtgattaatgccctccctctgacggacgtcatcgggccgctcatggaccaccaggcggcagcgtcgttgaaagagagcgttgccaaggagccatctaacgttgttgctgccaccacgagtggtagcaacatcccaaagagggaaaggaaattctcctccgtactcgggacccgtcggaaagcgccgacctccgcggactcgaacacgtctcctccgcctcagcgaaggcaaaggttggtgacgatcggcgagaaggtggcgtgggaaaaggtggcgcaaggtggggctgatgccgcatccagcgcgtcccctgcagcgacctcgtcgggagtcttagtcactgctaaggaccaggaggcagcaccgagtggccctgccgttagccccgtgcctacccggggcccgtccaccgatgccctcacctggggggaggtccaagcggagatggagcgcattctccaggccggtgctcatggcgtaggtcgcgagatcgaagaggccagggcggcagcgttgtcggcaaaccagtgtgccgaccagctggcgcgcgacctagcggaggcccgcgaggacctcctaaagatgagggagctggtggccggcaacgagatgcaacggcgcggactcaagcaccggatgtcggagctcgagggtcacatgatcaacatctgtggttcgctatatgttgatgtcgaggacgtccagcagcgcgggcagcccgatatgccggtgatcgttccggcgctcacactcgagccgttcgtgctgcgggaggaaactagtcaaagcctgtctgcggaggcgagcgtggcgatgacgtcactagatcgtcgaatgcgatattggaagacgaaactcgaggtggccaaactcgaaaaaaccatggtggaggtgaagaaggaccaggccgtggaagctctccggggtcgcgaggtgtggttcaactcgtacctcaagagctgctgcatggcgatggcgagggtttgcaaggagctccgagttccccgcggagatcccgaggagtcggcggctggttatatctcgtggttgaatggggcctgcgcacagctcgaagggattgccagcgcatcgacgatgtcctga

SEQ ID NO: 81291 - DNA, 506 bp, Oryza sativa
  Clone ID: PAT_MRT4530_80832C.1
agacctgaactacaagtgcatacaatggaaatcaggcaggacgatatgcaggcaattctcaaagcatacctgcaaacgtcactacacaatatgagcggagttcactgacacctgaaagccagttcaatggttccgcactgcagaatcaagtttctaggggctccaatatactggcattgggaccaccacagcaacaacatcagcaaaattttgaattctcagcactaggtggccagtccatgcagcccaccggcttgaatcctttcgatgactggtcgcaaccgcaggagaaccggagtggggttgacgactacctgatggaggagatcaggatgcggagccacgagatattggagaacgaagagatgcaacagatgttgcggattttgagcatgggtggcgcgtcaaccaacctgacggaagacggcttcgcatttcctaactacatgccatcaactgcccccaacttcaactgtggggatgaccgtgcccgcccacctgggaaa

SEQ ID NO: 81292 - DNA, 2706 bp, Oryza sativa
  Clone ID: PAT_MRT4530_80833C.1
atggcacggggctccgcaccgctcgacggtagcgtgctgccgccttcccgcatcgtgagcgagaggcaggccgggctgccgcgccgattcatgccggaatctgccaccggccgggaggtggtcgcgctgggtgagggacgcccggcgccacactacccggggcggtccgtcttcttcctctctttcgcaatggcaggactggtcccaccattctcttctttcttcatggatgttctggaactttacgatctccagatggcgcacctcacccccaacgcggtaatgacgttggccatcttcgcgcacctgtgcgagatgttcatcggggtgcgcccatctctccggctgttccggtggttcttcaccgtacagccggtgtcgccgccgtcggtagtcggtggctgctacttccagccgcgggggccggtgctgaaccgctacattccctgcgtcctccgcaagaagtgggacgactggaagagcgactggttctacacccccctcgccgatgaaacgcgcctccgacttccgagccagcccccggcgcaggcctccagctggcgggcgccggtagatctgggagacggctacgacgccgttcttgaccgcctggcaggtctgcgatcccaggggctcacgagggccatggtgtacggcgactaccttcatcgccagatcgcgccgctccagcggcgcgccagaggcgcctgggagtacaccgggtccgaggactacatgaggacccaccaggggggcagatgggactgggcccctgaggacttcaagatggtggtccaacgggtgctgaatctcagctccgtggaggcatccctcatcccccaaggagtcctccccctctgcagcgatccagatcgcgccaacatcctgaccatcattgagatcccgtcgcgctcctcccgtcattccaagtccggacagtccgaggccgaggagacggcgaccgcggaggcccggaggcgggaggctgaccggcgagaagccgcagaccgcctccgggaagccgaggaagctgcccaggaggccgtccgggttcgccaggctgaggaagccgctcgggaggaggccaaactccgccgggccgaggagtccgttcgggaggcggaggtggcgcgtgcacgccaagcggcctgccaaacccccgacccgactccgcccgaggcgacgatgacttccgaggccacccacgatgaggtcgcgggcgcaccgctcgggcccgacccctcgggcgacgtttgggacgagccagcttcgggggtcgcccctgggtccggcacgtcgatcggcgggccgagccgcgcggcgcccataccgaggcggctctcccctctgccttccgctgccccactgaacgcggagcccctcctgcaggccttagccgccgcgaacaccacggtgctggacgagctaggtgcccagatggaggtcctgctagcagagcggacggagctcgacgcggcgtgggcgcgcgtcgaggaggggcggcgctcggtggaagccatggtggaggcgggccgcaaggcacaccgccggcacgcctcagagctcgaggcccgtcggagggagctggcggagatcgccagggaggtggaggaggagcgggagactgccctcatcgccaccgccgtgctcaacgaggcgcgggacgatctccgcctccaatacgggagccgggcggcggagctagagaagaaactcgacgccgcccggggagtccttgacgccgccgctgcacgggaacggcgggcggcggagaacgaggcggtgtcccggcggcgcgaagaggcccttgaggctcgtgccaaggcgctggaagagcgcgcccgcgcgagggagagggacctggcggaccgcgaggccgccgtcgccatccgggaggcaacgctggcggcgcacgaggccgcgtgcgcagaagaggagtccacactcagcctcagcgaggacgcgctcaccgagcgggagcgagctctcggggaggccgagtccgcggcgcatcggctgtcggacagcctgtccctccgcagaggcagcgcgggaggagcaggcgcgcctgagctcgaggcgcgggtgaaagagctggacgcgagagcgcgcagcggcggggcggccgcgggcgacggcgacctagccgcccgcctcgcagctgccgaacacaccatcgccgagctgcagggcgcgctggactcgtccgccggggaggtcgaggccctccgcttggcaggcgaggtagggcctggcatgcttcgggatgccgtctcccgtatagaccgcgccgggcggcaggcgggcctctggggcgggcggactgcgaagtatgccgccaaccaggggggcctcgcccagcgcctctcagagatggccgggaccctccagcggctccccgaggagctcgaggagacgatcaagtcatcctcgagggacctcgcccggggggcggtggagctcgtactggcaagctaccaggccagggacccggacttctccccgtgggcagcgctggacgagtttcctcccgggaccgaggacgatgcgcgcgcgcaggtccgggacgctgccgaccacatcgtccacagcttcgagggtacggccccccggctcgcgttcgccctcgactccgacgaagagggcggtgacggcggtgcgggcgacagcggcgatgaggccggcgacccgggcgcgtcggaatga

SEQ ID NO: 81293 - DNA, 225 bp, Oryza sativa
  Clone ID: PAT_MRT4530_80834C.1
atggtggagtttgacccgtcggggcggggggtgggggtgggggcccaccgtggcgtggaggagaagcgggtgggtggtggtggcggcctcgggatcgggggcgccgctgcgaggctgaggtggcttggcttgggttggttggctggctggttgcgttgttgcgcggcgctgcgggttggctcgcctgctccggctttgcttccggcgctggaccacaccagctga

SEQ ID NO: 81294 - DNA, 4941 bp, Oryza sativa
  Clone ID: PAT_MRT4530_80835C.1
atgggttccgtctctggcatcgacgacttcgtcttccctcccggacaggcgtttcggttcggcagcctcgacttcatcaccaacaacttcggcaagatctctttcctcgactcggattcgaaccagtcgggaaagaaccaggtctcagccccgttcggaattccaaactcggccaagatctaccccaagtacatctcgatcgagtcggcttcaaaccactcggacgagatcccatcttctccaacaccaccagatcaagacgatggggcctacccaccgatcctgatgaaactccccgacgatttggcggccgttttcaccacaacggcgtcttctccccgtaggcctaggcggaagtcggctttaacaccgatcccgcctagctccagggaagtcggcgtcatactccagccactcggcacagtttcaacggatcaattggaaggctacttcagctcccccggcgtcgactcgcgtccaactgagatcgtggagtacgacgaattcggctaccgccacgacaaccacgacctagacgacttcgacgaaagcttggaagacaactatacccctctctacttcggcgtcttcatggccgacaacgagacggaagaacaacgccaagcccgagaagccgaagcacgacgcgtacagcaagaagccgagcgacgccgactggaagaggagcgtcaagtacaagaacaagaacggctgcggtgtgagcaacaagaacgcgagcgggctgcaaaggaggccgaagaccgacaacagcgagccttggatgcatggcgacgagcacaagatctcattggccagcaaaacgttgaggggacaccggtcttccgcaccccacaacagaacgctatcgccgcgatcacccttctcgacacccttcttaaggaaaacgaactcaatcaatccgatcacgtcgtcaacatcttaaaccagaccaagaccatgatcgcagctacgatcccggttaactccgaaagcgtccgcacgccgactggcagccgggttccccatcttcgatctcaggattaccaccagccaagcctcagcatcgccggcgcaggatccaatcgcaggagcaggggccacaacgagcgatctgttcactcgcctcccgagcgacacagggagcgaagagttgaacggcctcgctcgccgccacgccgacgtcccgtcgatcttcgcaacacgatcattcagcgccgtgcagcacgaggtcaccgccattcaccggatcgctgcgacgacgacgtggatggagtcgccgccttcaccaacgacctgcgtcgagtggattggccggccagctttaagctgactagaatagagaagtatgacggtaccaccaatccggagtcttggctcaccgtctacggtctcgcaatccgcgcagcaggaggagacagcaaggccatggcaaactacttacctgtggctttagcggattctgcccggtcctggctccacggattaccccgtggcacaattggatcatgggcagaacttcgcgatcacttcattgccaacttccagggcaccttcgagcgccccggcacacagtttgatctttacaacgttattcagaagtccggagaatcccttcgagattatatccgacgcttctctgaacaacgaaacaagatctccgacatcaccgacgatgtcatcatcgccgccttcaccaaaggaattcgccatgaagaggtggtcggcaagttcgggcgcaaacctcccaagactgtcaaacttatgtttgaaaaagccaacgagtacgccaaagccaaagaccccattatcgcatcaaagcagtcgggccccagttggaagccaaagaaggatgcaccgaccacaggagggggtggaagtaacaatcacaaggaccacaagcgtaagcccgaggaacttgttgcgaccactacacactcctcccgacaccgttcgtgcgtcaacatgtacgacaagatcatgaactcccaatgcccgcatcatcccaactccaaccacacggccaaagattgcttcgtctacaagcagttcgcagagcaatacgccaagaatacacggaagaactctgacggggagcaaagcacgtcgaaaaagaaggatgatgatgatgcccgacagcccgatacgccccaatatcttcgatggttagagacaacaattaagtttgaccgctcggatcaccctgaccgagtggtccacccggggcggtaccccttggtactagacccagtggttcgcaacgtcaagcttcgcagaaccctcatcgatggtggcagcgtattaaacatcctcttcgccaagatcctagacgacatgcagatccctcgcaccgagttaaagccgagtaatgcgccctttcacggagtcatcccagggctatctgcaactccactcggccagatcactctcccggttaccttcggtacccgggaaaactttcgcatggagaacatctgcttcgaagtcgctgatttcgagacggcataccatgctatactcggacgcccggcgttagccaagtttatggccgtcccgcactacacctacatgatgataaagaagcctggtcctcgaggagtcttatccctacgaagcaacattaagcaagccgtcacatgtgacaaggaaagttgcgagatggcccaaacccgcgagatcgcgaccgccatagaagacatccgactggctgcaaccacggcaagcgaaggagaggaaagcgcgctcatcacctttcttcaaaataataaagatatctttgcatggaaaccatccgatatgcctagtattcctagagaggtgattgagcactctttgcacgttaaggaagacgctaaacccatcaaacaacgactccgccgctttgcacaagacaggaaggatgcgatcaaggaggaattaaccaagctgttagcagcaggcttcatcaaagaagtccttcatcccgactggctggctaacccagttctagttcggaagaagactgggcaatggcgtatgtgtgtcgattataccgacctcaacaagtcttgccctaaatatcctttcgggttgcctcgcattgaccaggtagtcgactcgaccgccagctgcgagctactcagttttctggactgctactcggggtatcaccagatccgactgaaggaatccgactgcttgaagacttcattcattacgcccttcggggcctactgctacatcaccatgtcattcggactaaaaaacgcaggagcaacttatcaacgcatgattcagagatgtttctcgactcaaatcggccgtaatgtcgaagcctatgtggatgatgtagtcgtcaagaccaagcagaagggtgatttgatctcggacctggaagaaacctttgcaagcatccgcgctttcaggatgatactaaaacctgaaaaatgcaccttcggagtaccgtcagggaagctgcttggatttatgatgtctcatagagtcatacaggccaacccggagaaggggatgcccttcttcaagctgttaaagaaagcagacaatttccagtggggacccgaagcacagaaggccttcgaagacttcaagaaactcctcaccactccaccagttttggcctcgccacatccacaagagccgctactactgtacgtatcagccacctcccaggttgtgagcacggtcctggttgtcgagcgtgaggaaaatggccatgtccagaaagtccaacgaccgatctacttcgtcagtgaggtcttagccgactccaagacgagatatccccaggttcagaagctgttgtacggtgttttgatcaccgtcaggaaattatcccattacttccaaagccactcggtcacggtggttacatcgtttccacttggtgacatactccataatcgtgaagcaaatggacggatcgccaaatgggccttagaactgatgtctttggacatatcgttcaagccacgaacttcgatcaagtcccaagctttagccgacttcgttgccgagtggaccgagtgcaaggaggacacccctgaggaaaagatagagcattggaccatgcattttgacggatcgaacaggctttcgggcactggagctggagtggtcttaatttccctaactggagaaagattatgctatgtgctttggatacatttttctgcatcccacaatgtcgcggagtacgaggcgctcctccacggactacggatcgcaatttctttgggaattagacgtttgatagttcgtggagactcacagttagttgtcaaccaagttatgaaagagtggtcttgccttgacgacaacatgatggcttatcgacaagaggtacgcaagctggaagacaagttcgacagactcgaacttacccacgttcttcggcacaataatgaagcagccgacagactggccaattttggatccaagcgcgaagcggccccttcggatgtgttcgttgaacacctttatgagccaaccgtacccaagaaagaaacggttgaagctgcagacactcaagacatagccatggttgaagccaacaagagagagcccctcatacgatttttaacttcccaggaactcccacaagataaagatgaagccgagagaatttccaggcgcagcaggctttatattattcatgaggccgagctatacaagaaaagcccatcaggaattctgcaacgctacgtatccttagaagaagggagacaattactgaaggacatacattctggcatctgtggtaatcacgctgctgcacgcaccattgtcggcaaagcttaccgacaaggctttttctggcccactgctgtgtccgacgccgacaagattgtgcggacatgcgaaggttgtcaatttttcgccagacaaattcatctaccagctcaagagttgcaaactatcctgctgtcctggccgttcgcggtttga

SEQ ID NO: 81295 - DNA, 4896 bp, Oryza sativa
  Clone ID: PAT_MRT4530_80836C.1
atgggtttcgtttctggcatcgacgacttcgccttccctcccgggcaggcgttccggttcggcagcctcaacttcatcaccaacgacttcggcaagatctctctccttgactcggattcaaaccagtcggggatagaccaggtccccgtgccgttcggtattccgaactcggccgaggcctaccctaagatcatctctcccgagtcggcttcaaaccactcggacgagatccaatctactcttccgcgaccagatcaagacgacgagtcctatccctcaatcctgatgaaacttcctgatgatttggccgctgtcttcacagtcaagacatctcccactcgaagatctaggcgagctcaagcttcggccccgatccgatctagatccagggaggttggcgttatactccaacctctcgggacagtctcgacggaagagttggatggttacctcagctcccccggcatcagttctcgaccaaccgagatcctcgactacgacgattttggctaccactacgaccacggcgacctcgacaacttcgacgacaactatgaggataactacacgcccctcttcttcggcgtattcatggctgacaacgaaacggaggaacagcgccaagcccgagaagcggaccaagatcgcgcacggcaagaagctgaacgtcgccgactggaggaagagcgacagcgacaagagcgagaacgactacagccgcccgcagcaagaggccatcattcaccggatcgctacgacgacaacgtggacggagttgccgccttcacaagcgatctgcgtcgagtggattggccagccggctttaagccgactggaatcgagaaatatgacggcaccaccaaccctgagtcttggctcaccgtctatggtctcgcaatccgcgcagcaggaggagacagcaaagccatgacgaactatctacctgtggccctagcggattctgcccggtcatggcttcacgggctaccccgcggcacgatcggatcatgggcagagctacgcgaccacttcatcgccaacttccaaggcacttttgaacggcccggtacacacttcgatctctacaacatcgttcagaagtctggagaatctcttcgagattacattcgacgcttctccgagcaacgcaacaagatctccgacatcaccgacgacgtcatcatcgccgccttcactaaaggcattcgccacgaggacctagttggcaagttcggacacaaacctcccaagacggtcaaacagatgtttgaaaaagccaatgagtatgccaaagccgaagatgctatcacggcgtccaagcagtcgggcactacttggaaaccaaagaaggatacgccgaccgcaagagggagtggaagaaacaaccacaaggatcgcaagcgtaagcccgaagaacttgtggccacaacctctccatcttcccgacaacgttcccgcgtcaacaccttcgacaagataatgaactcccaatgtccgcatcatcccaactccaaccacgtggccaaagattgcttcgtctacaaacagtttgcggagcaatacgtcaagaacgcacgattgtcagctacaccactcggtcagatcactcttccagttaccttcggcactcgggagaattttcgcacagaaaatgtttgtttcaaagttgctgatttcgagacagcatatcgtgctatacacggacgaccggctctagccaaattcatggccgtcccacactacacctacatgatgatgaagatgcctggtcctcgaggggtcatatcactacggagcgacatcaagcaagccgtcacatgtgacaaagaaagttgcgagatggcccaaacccacgagaccactctcgcccgcgaagagatccgactggctgcgaccacggcaagcgagggagaagtgcctgcaaccaagctgacgaagaccgaagaaagtgatgccaagacgaaaaagattcccttagatccctccgatcctgacaagactgctaataataaagatatttttgcgtggaaaccatccgatatgcctggtattcccaaagaggtgattgagcactctttacatgttaaggaagacgccaaacccatcaagcaacgactccgccgttttgcacaggacaggaaggatgcgatcaaggaggaattaaccaagctgttagcagcaggcttcattaaagaagtccttcatcccgattggctagctaacccagtcctggttcggaaaaagacggggcaatggcgcatgtgtgtcgattataccgacctcaacaaatcttgtcccaaagacccttttgggttacctcgcattgaccagatcggtcgcaatgttgaagcttatgttgatgatgtagtcgtcaagaccaagcagaaggatgacctgattgcggatttagaagaaacttttagaagcattcgtgctttcaagatgaaactaaacccggaaaagtgcatcttcggagtaccgtcagggaagttgctcggatttatggtatctcaaagaggcatacaggccaacccagagaaaatcaacgccatcctcaatatgaaaccgccaagctccgaaaaagacgtccaaaagctgactggttccatggctgcgctcagccggttcgtctcacgactcggcgaacgggggatgcccttcttcaagctgctgaagaagactgacaatttccagtggggacccgaagcacagaaagcctttgaagacttcaagaaacttctcaccactccaccagttttggcctcgccacatccgcaagagccgctactattatatgtgtcggcgacctcccaggttgtgagtacggtcctggttgtcgagcgtgaagaggaaggccatattcaaaatgtccaacgtccaatttatttcgttagcgaggtcttagtcgactccaagacaagatatcctcaggttcaaaagttactatatggtgtcttaattaccgtcaggaaattatctcactactttcaaagtcactcggtcacggtggtcacatcgtttccactcggagatatacttcataatcgtgaagcaaatggacggattgcgaagtgggccttagagttgatgtctttggacatatcgttcaagccacgaacttcgatcaagtcacaagcgttagctgatttccttaccgagtggaccgagtgccaagaagacatgccagaggaaaagatggaacattggactatgcattttgatgggtcgaagaggcttacaggaactggagctggggtcgtcttgatttccccgactggagaaagattgagctacgtattgtggatacatttttctgcgtcccataacgtggcggaatacgaggcgctactccatggattaaggatcgcaatctctctaggcattcgccgactaatcgttcgtggagactctcagttggttgttaatcaggtcatgaaagagtggtcttgtctagatgataatatgactgcttatcgacaagaggtacgcaggttggaagataaattcgatggactcgagctcacccatgtcctacgacataacaatgaggcagccgacaggctggccaattttggttcaaaacgggaagcagctccttcagatgtgttcgtcgaacatctttttgaaccaactgtgcccagaaaagaaacacttgaagccatggatactcaaggcgtaagcatgattgaaaccgactggagagaacctctcataaaattttttaccaaacaagaactccctcaagacaaaaatgaagccgagatgatttccaggtgcagcagactttacgttattcataagactgagttgtacaagaaaagtccatcaggaatactgcagcgctgcgtatctttggaagaagggagacaattgttgaaggatatacattctggtatttgtggtaatcatgctgctgcacggactattgtcggcaaagcttaccggcaaggttttttctggcctacagctgtgtctgatgctgacaagattgtgcggacatgcgaagcccaagagttgcaaaccatcccgttgtcctggccgtttgcggtctgggggcttgacatggtcggcccgtttaaaagggcagtcggcggttacacgcatctctttgtggctatcgacaaattctacaagtggattgaggctaaacaggtcatcacgatcacagcagataaagctagagattttttcatcaacattgtgcatcagtttggggtacctaatcggatcatcactgataatggcactcaattcactggtggagcatttagatacttttgtgaagattttggcattaaaatttgttacgcctccgtggcacaccccatgagtaacggacaagtcgagtgcgctaacggcatgatacttcaagggatcaaagcacgcgtttttgaccgactacgtccctatgctggcaagtgggtagatcagctgccgtccgtactttggtctttacgcactactcccagtcgggctaccggccagtcgccgttctttttggtttatggtgcggaagcaatgttgccgagtgaagtggaatttgaatcactacgatttcggaacttcaacgaggagggctatgaagagggccgagtagatgacatcaatcgactagaagaagcccgagaagcagctttaattcagtcgactcgatatttgcaagggttgcgccgttatcataatcggaatgttcgatcgcgagcctttttagtcggcgacctggttctgaggaaaattcaaacaacacaggatcggcataaattatctcctttatgggaaggaccgttcataattgctgaagtcactcagccaggttcttatcgactcaagcgcgaagacggtactctcatcaacaattcttggaatattgaacaccttcgtcgattttatgcttag

SEQ ID NO: 81296 - DNA, 1408 bp, Oryza sativa
  Clone ID: PAT_MRT4530_80837C.1
gacatcagctgtcattcataattcgaacatgtgcccaccagttgttccgggaattttcacaatggaaatgcacacagcaatggtaaagtgttcttgtgaccaacatacttcttggtcaaactatttccctatgatatacaccctctatacagggatcacattacacaggtcttaaaaacaagaagggaagaaagggatcacatttcttgaccagcgaaacttgaacggatggatttgaatttcttgagggtctataccgatgaatgcacaagcttctcgatttccttgatgattaaatctctctcctcttcaagttgctcgtcttcacctttgcttgtgggaagattgcctagtagcttcaacagttctctgtgattgtctaccaaaacttgaataatatcacgaggcttgtttggattggcaacaaataccttgaaaatgtggaaggcacatatcctgatattttttcagctaaacttcagcaggccaatcatgatatttaaataactgacttccacaatgtaccgcttcattatttgagcatttggggcctctaacaaaaactctgaaagaaacttcactgattgtcttcttgtaacataattagttgaagttagaagtcttgtgtagagctcaaagaactgttcataatgggagcacagaaactcagaaactgcggcttcatgtttggtgagcaaatccttgaaggtgttcagagcatcagaagcaatatcaaagttcgataattcaacatactggaaaaacaactcgaagctacttgactccaatatatattttgcaagtgtaggatattttatgcattctcgcaacatattcccacagttcaatgcaacttccaagttcttgtagcaaactacaaggaaatctagaagatcaaaatgattttcaatatactgcacgcagcaataggcttcatcaaccttctgcctcaacaaaatgctccagcagtgggcaaggtcctttctaccctcccaacccaaggaaggcatattctgaacaaagagcgaaaggacatcctccttgcaaatttcaagggctatctgtagaacctgttcctgatttggttcaacttctccatcgccagaaagtgtctgcctcaaagtagatacatttttctcaacatcttcaagagccttggcgccggtcctggtgtcgagggcgaggagggactccttgatggagcggacgagctcctgcggcgacgggcgcgccggccgcgacgccgcccggaagaagaaggacatctccgcccaactctcagtcaggacctcccaactctggtgaaatctggtggtgttggtctcagccagggcctcccaactctctcttcgttcgtcaggactcaggaacttgacccctcgtgccgaattcggcacgagcctcgtgc

SEQ ID NO: 81297 - DNA, 4017 bp, Oryza sativa
  Clone ID: PAT_MRT4530_80838C.1
atgaggataactacacgcccctcttcttcggcgtattcatggctgacaacgaaacggaggaacaacgccaagcccgagaagcggaccaagatcgcgcacggcaagaagctgaacatcgctgactggaggaagagcgacagcgacaagagcgagaacgactacagcgtgagcagcaagatcgcgagcggattgcaaaggaggctgaagatcgacgacaacacgccttggaatctgggcgccgagcgagagagctcattgggcaacaagacgtcgatggaacagcgtggattggccaagccgactggaatcgagaagtatgacggcaccactaatccggagtcctggctcaccgtctacagactcgcaatccgcgcagcaggagtagacagcaaggccatggcaaactatctacctgtggccctagcggactccgcccgatcctggctccacggactaccccgtggcatgatcggattatgggcggaacttcgtgatcacttcatcgccaacttccagggcacctttgaacgccccggcacacagtttgacctctacaacatctccgacatcaccgacgacgttatcatcgccgccttcactaaaggcattcgccacgaggacctagttggcaagttcggacgtaaacctcccagtacggttaagcagatgttcgaaaaagccaacgagtatgccaaagccgaagatgctatcaccgcatccaaacagtcgggcaccacttggaagccaaagaaggacacgccgactgcaggggggagtggaagtaacaaccacaaggatcgcaagcgtaagcccgaagaacttgtggcgaccacctctccatcttcccgacaacgtccccgcgtcaacaccttcgacaagataatgaactcccaatgtccgcatcatcccaactccaaccacgtggccaaagattgcttcgtctacaaacaattcgcggagcaatacgtcaagaacgcacgcaaacctgcagacggagatcagggcacatcaaagaagaaagatgatgaagacgatgccccgactggttttcaagatcatcgcaaagaacttaatcacatcttcggcggacccctggcttatgagtccaagaaaaaacagaagctaacagaacgggagatcaatgcggttcagcctaacacgccccaatatcttcggtggtcagagacagcaattaagttcgaccgctcagatcatcccgaccgagtggtccacccggggcggtaccccctggtactagacccagtggttcgcaatgtcaagctccgacggactctcatcgatggtggcagcgcactcaacatccttttcgctaagaccctggacgatatgcagattcctcgcacggaattaaagccgagtaatgcacccttccatggtgttatcccaggattgtcagctacaccactcggccagatcactcttccagttaccttcggcactcgggagaatttttgcacagaaaatgtttgtttcgaagtcgctgattttgagacagcatatcatgctatactcggacgaccagctctagccaagttcatggctgtcccgcactacacttacatgatgatgaagatgcctggtcctcgaggggtcatatcactacggagcgacatcaagcaagccgtcacatgtgacaaagaaagttgcgagatggctcaaacccacgagaccactctcgcccgcgaagagatccgactggctgcgaccacggcaagcgatggagaagtgcctgcaaccaagctgacgaagaccgaagaaagcgatgccaagacgaaaaagattcccttagatccctccgatcttgacaagattgctataataggcgctgagttagattatgtgattgagcactctttacatgttaaggaagacgccaaacccatcaagcaacgactccgccgttttgcacaggacaggaaggacgcgatcaaggaggaattaaccaagctgttagcagcaggcttcattaaggaagtccttcatcccgactggctggctaacccagtcctggttcggaaaaagacggggcaatggcgcatgtgtgtcaattataccgacctcaacaaatcttgtcccaaagacccttttgggttacctcgcattgaccaggtggttgactcaacggctggctgcgagttactcagcttcttggactgttactcgggatatcatcagattcgactaaaagaatccgactgcttgaagacctcgtttattacgccctttggggcctactgctacatcaccatgccctttggattgaagaacgcaggagcaacctttcaacgcatgattcaaaggtgtttttcaactcagatcggtcgtaatgttgaagcctatgttgatgatgtagtcgtcaagaccaagcggaaggatgacctgattgcggatttagaagaaacttttacaagcattcgtgctttcaagatgaaactaaacccggaaaagtgcatcttcggagtaccgtcagggaagttgctcggatttatggtatctcaaagaggcatacaggccaacccagataaaatcaacgccatcctcaacatgaaaccgccaagctcccaaaaagacgtccaaaagctgactggttgcatggcggcgctcagccggttcgtctcacgactcggcgagcgggggatgcctttcttcaaggtgctgaagaagactgacaatttccaatgggtacccgaagcacagaaagcctttgaagacttcaagaaactcctcaccactccaccagttttggcctcgccacatccgcaagagccgctactgttatatgtgtcagcgacctcccaggttgtgagtacggtcctggttgtcgagcgtgaagaggaaggccatattcaaaaagtccaacgaccaatttattttgtcagtgaggttttagccaactccaagacaagcgctgtgtatctttggaggaagggagaattgttgaaggatatacattctggtatttgtggtaatcatgctgctgcacggactatcgtcggcaaagcttaccgacaaggttttttctggcctacagctgtgtccgatgcggacaagattgtgcggacatgcgaaggttgtcaattttttgccagacaaactcatttgccagcccaagagttgcaaaccatcccgttgtcctggccgtttgcggtctgggggcttgacatggtcggcccatttaaaagggcagtcggcggttacacgcatctctttgtggctatcgacaaattctccaagtggattgaggctaaaccggtcatcacgatcacagcagataaagctagagattttttcatcaacattgtgcatcggtttggggtacctaatcggatcatcactgataatggcactcaattcactggcggagcatttaaagacttttgtgaagacttcggcattaaaatttgttatgcctccgtggcacaccctatgagtaacggacaagttgagcgtgctaacggcatgatactgcaagggatcaaagcacgagttttcgaccgattacgcccctatgctggcaagtgggtagatcagctgccgtccgtactttggtctttacgcactactcctagtcgggctaccagccagtcgccgttctttttggtttatggcgcagaagcaatgttgccgagtgaagtggaatttgaatcactacgatttcggaacttcaacgaggagggctatgaagagggccgagtagacgacatcaaccgactagaagaagcccgagaagcagctttaattcaatcgactcgatatttgcaagggcttcgccgttatcataatcggaatgttcgatcgcgagcctttttagtcggtgacctggttctgaggaaaattcaaacaacacatgatcggcataaattatctcccttatgggaaggaccgttcataattgctaaagtcactcggccgggttcttatcgactcaagcgcgacgacgatactctcatcaacaattcttggaatattgaacaccttcgtcgattttatgcttag

SEQ ID NO: 81298 - DNA, 634 bp, Oryza sativa
  unsure (1)..(634): unsure at all n locations
  Clone ID: PAT_MRT4530_80839C.1
tataaatatatgaaaacaatgatttttataatctttcaaaagatgtgggagatactacaattttccaatttaaagttttagtagctccagattaaaaagagtaaatttcacaaaactacacatacttttcaaacagtttctaagagacgaagttttgttggtctgtcgaacggtgaacacggtagcatacatgctagtgaaggagagtgttcttctgggtcttattttgggcttgttcagattgatgccattttaaaccatgccattatttttggtaaagttgccaaatatgtgcatccatttagtttcttaccaaactctggtaaatgaataagaaatcctgcaaaaacttgtaatattgtcaaaattttggtattgccaaaatttgataaggtttattttggatacaattcaaacatgccctttatctttccttgataatggttgtaagcaagattatgtagttgaacaaatccctggcggtgtttatcaaacaaacaaagcactctnncttcatcacaaaataagtnaatctagnattagatatgacacatncttgaacctatttaaatnnatagnatnaggatgngnnacatnnagnatattaactnattttgggatgtagagagtaata

SEQ ID NO: 81299 - DNA, 1185 bp, Oryza sativa
  Clone ID: PAT_MRT4530_8083C.1
atgctgaacacctcaaccaacatcaacagtttcaatcatattgggtcagtggcctcatgtctgtttgcccaccgccgcaagggtgagagatgcagaaccgatcacaacaccttctcctcactctccttccgcaatgaccacgaggtgttctgtggtgccaacgaggagaatgagctcaaccgcatggttcataaggaactcaagaaggtttcactttcgagaggtgcaactcccctttcaaggggttcaaaggttgtacatgttggtagtacaagtaaaaggtcccatgaaggtcagaccaacgtggctgcagaaaagcgtgctaaatatgcggccataagacacagaatggaagactggtgtgggggctcgtcatggacaaccagcccagtcagcatcagagtaggcaaccaagttagccgtagaagagtgctgaacatgaagaccatagtcaagcgtgccacggacataccggagaatacgtttgagagcagcaaggtgagaatccctgggatcatgcatgtggagacatacttgctaaacaacataggagatatcaggctgtgtgaagtcggacatgccagcacgctcaagaatctcaatgttgtactgacgctgactcaaaagaagcccagtgccgcgttgagtaacagaaatccccagaaagtgattgaacccaagtgtgagcaagtagctggcaaatcgattgttccacacacggggggcctccttggggccgtagagggactcattaagacgacataccagtgggcagtggcgagaaactgtgagactgaggactgtgcgaacagtggacggtttgacaaccgggataaacgtctcatcgaagtcaatgccagggcgctgggacaaggaaccaattcccaggtgcagttggcttgcaacgcagtgaactcctcttccatggtcgatccccagggcggcccggtaggtgcaaggaaccagggagagagtggtgacattggggttgtggtgggactcgtgcactgcgagccgctgggtggaggcgctagcggagctagtgttggaagcgtcgtcggtaaccgtgagcatgtggacgaggatgtcgatgtcggggaggagccaacgagcgtctggttgggcggggaggtcggcccaatgaaggagccagctagcttagcagaggagccgggggaaggctag

SEQ ID NO: 81300 - DNA, 3243 bp, Oryza sativa
  Clone ID: PAT_MRT4530_80840C.1
atggcacggggctccgctctgctcgacggtagcgtactaccgccttcccgcattgtgagcgagaggcaggctgggctgccgcgccgcttcatgccggaatccgccaccggccgtgagatagtaatgctgggtgagggacgcccggcgccagactacccggggcggtccgtcttctttctccccttcgcaatggccgggttggttcctcctttttcttctttctttatggatgttctggagttctacgatcttcagatggcgcacctcacccccaacgcagtgatgactttggccatcttcgcgcacctgtgcgagatgttcattggggtgcgcccatctcttcggctgttccggtggttcttcaccgtgcagtcggtgtcgccgccgtcggtggtcggcggctgctacttcctgccgcgggggccggtgttgaaccgctacatcccctgcgtcctccgcaaaaagtgggatgactggaagagcgactggttctacacccccctcgccgacgaagcgcatctccgacttccgagccagcccccggtgcaggcctccagctggcgggcgccggtagatctgggggatggctatgacgccgtcctcgatcgcctcgcgggcctgcgatcccaggggctcaccggggccatggtgtacggcgactacctccgtcgtcggattgcgccgctccagcggcgcgctcgggccgcctgggagtacatcgggcccgaagactatatgcggacccaccagggggtcagatgggattgggcccccgaggacttcaagatactgatccaacgggtgctaaatctcaactccgtggaggcgtccctcatcccccacggtatcctccccctctgcagcgacccagatcgcgtctccatcttgaccattatgacggcggtcggggcctcagaggagcaggctcctaagggccatggcggcgcaggtgggagccgtcggggggatcaatctacccccggagggggtcgtgcttctgggccccgcgtcgggggctcggggagcaaccgccctaccgacgcccgggggaagaggaaactgggaggaacacctcccccatctcctccccgagggggcggggcggcgcgtgccagcagcaggcgcccggagggggccgcgccaacatcgcagcccgagggggagcgcaagaagaaacggctgcgcaagatgggggagacagaaccatcccagggaaacctaatttcccctccaaggtggtcatttaaccgaccccctcgcagcgatgtcccgtcgcgtccctcccgccatcccaagtccggtcaatccgaggccgaagatccggcggccgcagaggaacggaggcgagaatctgaccggcgagaggccgcagatcgccttcgggaagctgaagaggccgcccgggaggccgctcgggttcggcaggcggaggataccgctcgggaggaggccgcccgggctcgccaagctgaagaagtcacccgggaggaaaccgcccgggctcgccaggcggaggcgatggcgtcttccgaggcggtttacgacaagaccgccggcgcgtcgctcgggcccactccctcgggtgacgctcaggcgacaacctccggggcggcttgcgacaaggccgcgggcgcatcgcctgggcccgctccctcgggcgacgctcaggcgacaacctccggggcggcttgcgacaaggccgcgggcgcatcgcctgggcccgctccctcgggcgacgcccaggaccaaacgggtccgggggacatccccgagctcagtgcgtcttctggcgggccgagccgcgtcgcattttctccaaggcggctcttctcctcgtcttctgccaccccgctgagtgccgagccccttctgcaagccttggccgccgcaaacaccgaggtgctagatggattcagcgcccaggtggaggccttgcgagcggaacgagcggagctcgaggccgcatgggcgcgcgtcgaggaggggcggcgctcggtggacgccatggtggaggtgggccgtaaggctcaccgccgccacatctcggagcttgaagcccgcaaggcggcactggcggagatcgcccgagaggtggaggaagagcgagaggccgccctcgtcgccaccaccgcgatgattgaggcgcaggactccctccgccttcaacacgggagctgggaggcggagctaaagaaaaagctcgacgccgcccagggggtcctcgacgccgccgctgcccgagagcagcgagcaacggaggctgaagcggcgtcccggcggcgcgaagaggcccttgaagcccgtgccatggcgctggaggatcatgccggcgccgtggagaccagcttggcggaccgcgaggccgccgccgctatccgggaggcgacgctggcggcgcacgaggccgcctgcgccgaagaggagtccgcgctccggctccgcgaggacgcgcttgctgagcgggagcgagctcttgaggagtccgaggccgcgacacaacggctggcggacagcctgtccctccgcgaggcagcgcaggaggagcaggcgcgccgcaatctggaatgcatccgcgccgagagagccgcgctggagcagcaggctgctaacctcgaggcgcgagaaaaggagctggatgcgaggaagcgcagcggcggggcggctacgggcgaaagcgacttagtcgcccgcctcgcagctgccgaacacaacgtcgcggacatgcagcgcgccctagactcatccaccggggaagccgaggccctccgcttgtcgggtgagatagggcccggcatgctttgggatgcagtctcccggctggatcgcgccggtcgggaagcgggcctctggaaaggccagacaatttcgcgctccaccaatctggaaggcctcgccccgcaccttaggaggatggcctgggctgtccaacaactccccgaggagctcgagaagaccatcaagtcatcctcgagggacctcgcccaaggagcggtggaactcgtgttagcgagttaccaggtcagggaccccggcttctccccatggatggcgctggaggagttccctcccgggaccgaggacgatgcgcgcgcgtgggtccgggatgccgccaaccacatcgtccaaagcttcgaggggtcggcccctcggctcgcgttcgcccccagctccgacgaggagggcgacgccagcggcgaggacgacggtggcgacgaggccagcgacccgggcgcattggaatga

SEQ ID NO: 81301 - DNA, 647 bp, Oryza sativa
  Clone ID: PAT_MRT4530_80841C.1
tcccagacgcgtcgccattctccacacatcactttggagctgaagaagccgagggagaggttctctgcctctccgtcatcctcaacctcgccgccggtcgtagtgacgacgaccttcgccatctccgtttgagtcaagtgcatcgccgggaacgcaagccacgtcgacaacgccctggagcacgcaccggagcgccgccgcttcaaccatcatcgtcgtccggccattctcattcacctcagagaaagctgctgcgccattgtcattgcctcaacctcctcttcaaaacgcctcaagaaccccagccggaaacatcaagaacacggagaacacatccttttcttcaccggcgccaatctaggatcgcctccgccgtcatcgtcgattaccgctgcctcggtgagccattgttcgattccttgcgcatacaccatctccttgacctcacaaccctcgtgcatgcttgcttgaagcagctcattgtcccgttcgagccgtcgtcgttcacccgaggaggagcgccgtcgccgagccgttccacaagtcaccgctgccgccaagacctcgacaaccctagctcgacccacgaaccaccgccgctcacactcgccatcggcgctactccgatgtcctctaaccaagaaaac

SEQ ID NO: 81302 - DNA, 2748 bp, Oryza sativa
  Clone ID: PAT_MRT4530_80842C.1
atggcacggggctccgcaccgctcgacggtagcgtgctgccgccttctcgcatcgtgagcgagaggcaggccgggctgccgcgccgattcatgccggaatctgccaccggccgggaggtagtcgcgctgggtgagggacgcccggcaccacactacccggggcggtccgtattcttcctttccttcgcaatggcagggctggtcccgccattctcttctttcttcatggatgttctggagctttataatctccagatggcgcacctcacccccaacgcggtaatgacgttggccatcttcgcgcacctatgcgagatgttcatcggggtgcgcccatctctccggctgttccggtggttcttcaccgtacagccggtgtcgccaccgtcggtagtcggtggctgctacttccagccgcgggggccggtgctgaaccgctacattccctgcgtccttcgcaagaagtgggacgactggaagagcaactggttctacacccctctcgctgacgaagcgcgcctccgacttccgaaccagcccccggcgcaggcctccagctggcgggcgccggtagatctgggagacggctacgacgccgttcttgaccgcctggctggtttgcgatcccaggggctcacgggggccatggtgtacggcgattaccttcgtcgccggatcgcgccgctccagcggcgcgcccggggcgcctgggagtacaccgggcggtcggggcgtcaggggagcggactcctcgaggccacgatggcgcgggcgggagccgcaggggggaacaatctaccctgggagggggtcgtgcttctgggccccgtgacgggggcccggggggcagccgccctgccgacgcccgggggaagaggaaacaggaggataccccctccccatctcctccccgagggggcggggcggtgcgtgccagcagcaggcgcccggagggtgctgtgccgacgtcgcagcccgagggggagcgaaaatagaagcggctccgcaagatgggggggaccgaaccatgccggggaaacctcatctcccccccaaggtggtcgttcagccgacctcctcgcaggttcgtccccgcgcccactgcggccgtattcattctcccatctcccaaggcaagttttcactcacccgtttttcgtcttctggtttttcttctgcctcagcgagatcccgtcgcgcccttcccgccattccaagtccggccggtctgaggccgaggagacggcgaccgcggaggcccggaggcggggagctgaccggcgagaagccgcagaccgcctccgggaagccgaagaagctgcccaggaggccgtccgggctcgccaggctgaggaagccgcttgggaggaggccagactccgccgggccgaggagttcgtccgggagacggaggcggcgcgcgtacgccgggcggcctgccaagcccccgacccgactccgcccgaggcgacgacgacttccgaggccgcccacgacgaggccgcgggcacaccgctcgggcccgacccctcgggcgatgcttggggcgagccagcttcggggaacgcccccgagtccggcacgtccatcggcgggccgagccgcgcggcgcccacaccgaggcggctctcccatctgccttccgctgccccactgagcgcagaacccctcctgcaggccttggccgctgcgaacaccacggtgttggacgggttaagcgcccagatggaggtcctgcaggcagagcgggcggaggtcgatgcggcgtgggcgcgcgtcgaagaggggcggcgctcggtggaagccatggtggaggcgggccgcaaggcacaccaccggcacgcctcagagctcgaggcccgtcgtagggacctggcggagatcgccagggaggtggaggaggagcgggagactgccctcatcgccaccgccgtgttcaacgcggcgcgggacgacctctgcctccaatacgggagccgggcggcggagctagagaagaagctcgacgcgtcccggcagcgcgaagaggcccttgaggctcgcgccacggtgctggaggagcgcgcccgcgccctggacacgaaggagagggaactggcgggtcgcgaggccgccgtcgccattcgggaggcaacgctggcggcgcacgaggccgcctgcgccgaagaggagtccgcactccgcctccgcgaggacgagctcactgagcgggagcgagctctcgaggaggccgaggccgcggcgcagcggcgggaggagcaggcgcgcctcaatctggaaggcgcctgcgccgagagggccgcactggatcagcgggccgctgaattcgaggcgcgggcgaaggagctggacgcgagagcgcgcagcggcggggcggccgcgggcaacggcgacctagccgcccgcctcgcagccgccgaacacaccatcaccgagctgcagggcgcgctggactcgtccgccagggaggtcgaagccctccgcttagcgggcgaggtagggcctggcatgcttcgggacgccgtctcccgtctagaccgtgccgggcggcaggcgggcctctggggcgggcggaccgcgaaatacgccgccaaccaggggggcctcgcccagcgcctctcagagatggccgggaccctccagcggctccccgaggagctcgaggaggcgatcaagtcatcctcgagggacctcgcccgggggggcggtggagctcgtactggcaagctaccaggccagggaccctga

SEQ ID NO: 81303 - DNA, 969 bp, Oryza sativa
  Clone ID: PAT_MRT4530_80843C.1
gttttcttggttagaggacatcggagtagcgccgatggcgagtgtgagcggcagtggttcttggggtgaaagtgcatgtgtgcatggaaggcagcagcagtgacttgtggaacggctcggtgacggcgctcctcctcgggtgaacgacgacggctcgaacgggacaatgagctgcttcaagcaagcatgcacgagggttgtgaggtcaaggagatggtgtatgcgcaaggaatcgaacaatggctcaccgaggcagcggtaatcaatgatgacggcggaggcaattctagatcggcgccggtgaagaaaagatgcgttctccaagtccttcacatctccggctggggttcttgaggcgtgttgaagaggaggttgaggcgatgacgatggcgcagtggcttgctccgaggtggtcgagaatggccggacgacgacgatggttgaagcggcggcgctccggtgcatgctccagggcgttgtcggcgtggcttgcgttcccggcgatgcactgcacgagaggggtttaggtcaaaagaggaaatgctcggcattgtgtggagagatgggaacacgaaagagatggaggtgaccttgactcaaacggagatggcgaaggtcgtcgtcactacgaccagtggcgaggttgaggatgacggagaggctgaggacctctccctcggcttcttcagctccagagtgatgactcggtcggctctcaatctctccctctatgtgtttcttggtcggctgaggatgagggacagaggaagggcgagctggagaggctgccagattgagtcggagccaccagcagcaatacaaccaaaacaacatgcttttgcccgagaggatatgcagcagccgcactgtgccgcggtggcggagtcgacagtgaggctcaagatgaccaggcacatgatcaccatcgaagtggtagtcctctttccctccattgcctcctgctgctga

SEQ ID NO: 81304 - DNA, 2466 bp, Oryza sativa
  Clone ID: PAT_MRT4530_80844C.1
atggcacggggctccgcaccgctcgacggtagcgtgctgccgccttctcgcatcgtgagcgagaggcaggccgggctgccgcgccgattcatgccggaatctgccaccggccgggaggtggtcgcgctgggtgagggacgcccggcaccacactacccggggcggtccgtattcttcctttccttcgcaatggcagggctggtcccgccattctcttctttcttcatggatgttctggagctttataatctccagatggcgcacctcacccccaacgcggtaatgacgttggccatcttcgcgcacctatgcgagatgttcatcggggtgcgcccatctctccggctgttccggtggttcttcaccgtacagccggtgtcgccaccgtcggtagtcggtggctgctacttccagccgcgggggccggtgctgaaccgctacattccctgcgtccttcgcaagaagtgggacgactggaagagcgactggttctacacccctctcgccgacgaagcgcgcctccgacttccgagccagcccccggcgcaggcctccagctggcgggcgccggtagatctgggagacggctacgacgccgttcttgaccgcctggctggtttgcgatcccaggggctcacgggggccatggtgtacggcgattaccttcgtcgccggatcgcgccgctccagcgcgagatcccgtcgcgcccttcccgccattccaagtccggccggtctgaggccgaggagacggcgaccgcggaggcccggaggcggggagctgaccggcgagaagccgcagaccgcctccgggaagccgaagaagctgcccaggaggccgtccgggctcgccaggctgaggaagccgcttgggaggaggccagactccgccgggccgaggagtccgtccgggagacggaggcggcgcgcgtacgcagggcggcctgccaagtccccgacccgactccgcccgaggcaacgacgacttccgaggccgcccacgacgaggccgcgggcgcgccactcgggcccgacccctcgggcgatgcttggggcgagccagcctcggggaacgcccccgagtccggcacgtccatcggcggaccgagccgcgcggcgcccacaccgaggcggctctcccctctaccttccgctgccccactgagcgcagaacccctcttgcaggccttggccgctgcgaacaccacggtgttggacgggttaagagcccagatggaggtcctgcaggcagagcgggcggaggtcgatgcggcgtgggcgcgcgtcgaagaggggcggcgctcggtggaagccatggtggaggcgggccgcaaggcacaccgccggcacgcctcagagctcgaggcccgtcgtagggacctggcggagatcgccagggaagtggaggacgagcgggagactgccctcatcgccaccgccgtgttcaacgcggtgcgggacgacctctgcctcctatacgggagccaggcggcggagctagagaagaagctcgacgcgtcccggcagcgcgaagaggcccttgaggctcgcgccacggtgctggaggagcgcgcccgcgccctggacacgaaggagagggaactggcgggtcgcgaggccgccgtcgccatccgggaggcaacgctggcggcgcacgaggccgcctgcgccgaagaggagtccgcactccgcctccgcgaggacgagctcactgagcaggagcgagctctcgaggaggccgaggctgcggcgcagcggcgggaggagctggcgcgcctcaatctggaaggcgcccgcgccgagagggccgcactggatcagcgggccgctgaattcgaggcgcgagcgaaggagctggacgcgagagcgtgcagcggtggggcggccgcgggcgacggcgacctagccgcccgcctcgcagccgccgaacacaccatcaccgagctgcagggcgcgctggactcgtccgccggggaggtcgaagccctccgcttggcgggcgaggtagggcctggcatgcttcgggacgccgtctcccgtctagaccgtgccgggcggcaggtgggcctctggggcgggcggaccatgaaatacgccgccaaccaggggggcctcgcccagcgcctctcagagatggccgggaccctccagcggctccccgaggagctcgaggaggcgatcaagtcatcctcgagggacctcgcccggggggcggtggagctcgcactggcaagctaccaggccaggaaccctgacttctccccgtgggcagcgctggaagagttccctcccggaaccgaggatggcgcacgtgcgagggtccgggacgccgccgaccacatcgtccacagcttcgagggtacagcccctcgactcgcgttcgcgctcgactccgacgaggagggcggtgacgacggcgcggacgacagcgacgacgaggccgacggcccgggggcgtcggagtga

SEQ ID NO: 81305 - DNA, 1818 bp, Oryza sativa
  Clone ID: PAT_MRT4530_80845C.1
atggcggagtcgggctcgtcgggcctggaggagaagctggcgggtctctccgcgggctgcggcgaggagccgcagcagctctcgaagaatgccaagaagagggaggagaaaaggaagaagcaggaggaggagcgccggttgaaggaggaagagaagaagaagaagcaatattatgagaatcgcctcaaggcacttgattcactcaaggccacgggtgtaaacccctatccccataagttcctggctaatattaccgtagccgattatattgagaaatacaagagcatgaatgttggggataagcttgttgacgtcaccgagtgcctagcagggaggatcatgaccaagagagcgcaatcttccaagctcttattttatgatctttatggtggtggtgagaaagttcaagtttttgctgatgccaggacctcagagttggaagataatgaattcattaagtttcactctactctgaaacgaggtgatattgttggtgtatgtggttatccaggaaagagcaagagaggggagctcagtatattcccaaagaaaattgttgtgctctccccatgccttcatatgatgcctcgacagaagagtgagggaagtgctgttcccactccatgggctccaggaatgggtaggaacatcgaaaagtatgttttgagggaccaggaaacccgatatcgtcaacgatatcttgatctcatggtaaaccatgaagtgaggcatattttcaagacaagatcaaaagttgtctcttttattcggaaatttcttgatggtcttgactttttagaggtggagactccaatgatgaacatgattgcaggtggagcagctgcaaggccttttgtcacacatcataatgagttaaacatgaggctttatatgcgtattgctcctgagctctatctgaaggaattggttgttggggggctggatcgtgtttatgaaattgggaagcagttcaggaatgaaggaattgacctgacgcacaatcctgaattcacaacatgtgaattttatatggcatatgcagattacaatgacttgatagagcttactgaaaccatgttatctggtatggttaaggagttgacaggtggctacaagattaaatatcatgctaacggagttgagaaaccaccaatagagattgatttcacacctcccttcagaaagatagacatgattgaagaattagaggctatggctaaactcaatatacctaaagatctctcaagtgatgaagcaaacaagtatttgatagatgcctgtgccaaatatgatgtcaaatgcccacctccccagactacaacacggttgcttgataagctagttggccatttcttggaggagacatgtgtgaatcccacgtttattatcaaccatccagagataatgagtccattggcaaagtggcataggtctcgacctggattgactgagaggtttgagctctttgttaacaagcatgaggtgtgcaatgcatatacagagttaaatgatcctgttgttcagaggcaacggtttgaggaacaactaaaggatcgtcaatctggtgatgatgaagctatggcattggatgaaacattctgcacagcccttgagtatggcctaccaccgactggtggttggggattgggaattgatcgccttacaatgttgctgactgattctcagaatatcaagttgaggtatttaaaatgctcttttgatgcaaattcaggaagttcttctattcccggctatgaagcctcaagattagatatgtccacaaagcaggaacctgtcagaaggattaaagcagactga

SEQ ID NO: 81306 - DNA, 540 bp, Oryza sativa
  Clone ID: PAT_MRT4530_80846C.1
atgccgacaacgccctggagcatgcaccggagcaccgccgcttcaaccatcgtcgtcgtccggccattctcgaccacctcggagcaagccgctgcgccattgtcatcgcctcaacctcctcttcaatatgcctcaagaaccccagccggagatgtgaatgacttggagaacgcatcttttcttcaccggcgccgatctagaatcgcctccgccgtcatcatcgattaccgctgcctcggtgagccattgttcgattccttgcgcatataccatctccttgacctcacaaccctcgtgcatgcttgcttgaagcagctcattgtcccgttcgagccgtcgtcgttcacccgaggaggagcgccgtcgccgagccgttccacaagtcaccgctgccgccaagacctcgacaaccctagctcgacccacggtgagcatcctgaaggctagaagaccacatgcatgcatccttttcgttcggaatcgacttccatgcacacatgcactttcaccccaagaaccaccgccgctcacactcgccat

SEQ ID NO: 81307 - DNA, 324 bp, Oryza sativa
  unsure (1)..(324): unsure at all n locations
  Clone ID: PAT_MRT4530_80847C.1
aactctnagcacacgngngctcgccggctccggngcgccacatgtcgccccccgtganctcnggggcncccgtgcatgacccgccccncggcgtgctcctcnnccacctccacccntgcgcgccgccngacgtgcgggtgggcnacnnccacnganacngccgccncnacctgtcggtncgggagctgaaggaacnggnggaatctccgnatntccctgctccgtctactggaacanggagaacnccggaagccnnccctacgtgttctncgaaancgntatgggcnactaccccccctacaacctctacnangacnatgtgtg

SEQ ID NO: 81308 - DNA, 2607 bp, Oryza sativa
  Clone ID: PAT_MRT4530_80848C.1
atggcacggggctccgcactgcttgatggtagcgtgctgccgccttctcgtattgtgagcgagaagcaggctgggttgccgcgccgcttcatgccggaatctgccaccggccgtgagatagtaatgctgggtgagggacgcccggcgccagactacccggggcggtccgtcttctttctccccttcgcaatggcagggctggttccgccattttcttctttcttcatggatgtcctggagttctacgatctccagatgacgcaccttacccccaacgcagtgatgacattgggcatcttcgcacacctgtgcgagatgttcattggggtgcgcccatctctccggctgttccggtggttctttaccgtgcagtcggtatcgccaccgtcggtggtcggcggctgctatttcctgccgcgggggccggtgttgaaccgctacatcccctgcgtcctccgcaagaagtgggacgattggaagagcgactggttctacacccccctcgccaacgaagcgcgcctccgacttccaagtcagcccccggcgcaggcctccagctggcgggcgccggtagatctgggggatggctatgacgccgtcctcgaccgcctcgcgggcctgcgatcccaggggctcaccggggccatggtgtacggcgactacctccgtcgtcggattgcgccgctccagcggcgcgctcgggccgcctgggagtacaccgggtccgaagactacatgcggacccatcagggagtcagatgggattgggcccccgaggacttcaagatactggtccaacgggtgctaaatctcaactccgtggaggcgtccctcatcccccacggtatcctccccctctgcagcgacccagatcgcgcctccatcttgaccattatgacggcggtcggggcctcagaggagcaggctcctaagggccatgacggcgcaggtgggagccggcggggggatcaatctacccccggagggggtcgcgcttctgggccccgcgtcgggggctcggggagcaaccgccctaccgacgcccgggggaagaggaaactgggaggaacacctcccccatctcctccccgagggggcggggcggtgcgtgccagcagcaggcgcccggagggggccgcgccaacatcgcagcccgagggggagcgcaagaagaagcggctgcgcaagatgggggagacagaaccatcccggggaaacctaatttcccctccaaggtggtcatttaaccgaccccctcgcagtgatatcccatcgcgttcctcccaccatcccaagtccggccagtccgaggccgaagatccggcggccgcagaggcacggaggcgggaatctgatcggcgagaggccgcagaccgcctacgggaagctgaagaggccgcccgggaagccgcccgggctcgccaggctgaggataccgctcgggaggaggccgcccgggcccgccaagtcgaggaagccgctcgggaggaggccgcccgggttcgccaggccgaagaagccgctcgggaggaggccgcccgggcccgccaagccgaggaaaccgctcgggaggaggccgcccgggcccgccaagccgaggaaaccgctcgggaggaggccgcccgggcccgccaagccgaggaagccgctcgggaggaggcctcccgggttcgccgggctgaggcgatggcggcttccgaggcagttcacgacgaggccgcggacgcctcgcttgggcccaccccttcgggcgacgcccaggaccaaacaggtccgggggtggcccgcgatgaggccggcgcgtccattggcgggccgagccgcgcggcgtcttcttcaaggcagctcttccccacgccttccgccgccccgctgagcgcagagccccttctgcaggccttagccgccgcaaataccgcggtgttggatgggttcaatgcccaggtggaggccctgcaggcggagcgtgcggagctcgacgccgcatgggtgcgtgtcgaggaggggcggcgctcggtggaggctatgatagaaacgggccgcaaggcacaccgccggcacgtctcagatcttgaggcccgcaagacggcgctggcggagatcgctcgagaggtggaggaggagcggggggctgccctcattgccaccactgtgatgatcgaggcgcaggactccctccgccttcagcacgggaactgggaggcggagctgaagaaaaagctcgacgccgcccagggggttcttgatgccgccgctgcccgagagcagcgagcgacggagaccgaagcggcgctccggcggcgcgaagaggccctcgaggcgcgcgccatggcgctggaggagcgcgcctgcgtcgcggagaaagtcctggcggaccgcgaggccgccgtcacctcccgggaggcaacgctggcggcgcacgagtctgcctgcgccgaagaggagtccgcactccgccttcgcgaagacgcgctcgccgagcgggagcgagctctcgaagaggccgaggccgaagcgcaacgcgggctgccgatctcgaggcgcgggaaaaagagctggacgcgagggcgtgcatcggcggggcggctgcgggcgaaagcgacttag

SEQ ID NO: 81309 - DNA, 2041 bp, Oryza sativa
  Clone ID: PAT_MRT4530_80849C.1
ggctgtcttgtgtgaatcccacgttgatgatcacccacccggggcctaaccctagctaaaccccccttctcccttgcgcctccgcttcgcgagcctcatctcctcgatctctttcgattcagtggaaaacctaggagaccggcgcggcatggcggagtcgggctcgtcgggtctggaggagaagctggcgggtctctccgcgggctgcggcgaggagccgcagcagctctcgaagaatgccaagaagagggaggagaaaaggaagaagcaggaggaggagcgccggttgaaggaggaagagaagaagaagaaggccgctgcaacagcagctgctagtggagagcccccgaaggaatctgccgccgacgatgaggaaatggatcccactcaatattatgagaatcgcctcaaggcacttgattcactcaaggccacgggtgtaaacccctatccccataagttcctggctaatattaccgtagccgattatattgagaaatacaagagcatgaatgttggggataagcttgttgacgtcaccgagtgcctagcagggaggatcatgaccaagagagcgcaatcttccaagctcttattttatgatctttatggtggtggtgagaaagttcaagtttttgctgatgccaggacctcagagttggaagataatgaattcattaagtttcactctactctgaaacgaggtgatattgttggtgtatgtggttatccaggaaagagcaagagaggggagctcagtatattcccaaagaaaattgttgtgctctccccatgccttcatatgatgcctcgacagaagagtgagggaagtgctgttcccactccatgggctccaggaatgggtaggaacatcgaaaagtatgttttgagggaccaggaaacccgatatcgtcaacgatatcttgatctcatggtaaaccatgaagtgaggcatattttcaagacaagatcaaaagttgtctcttttattcggaaatttcttgatggtcttgactttttagaggtggagactccaatgatgaacatgattgcaggtggagcagctgcaaggccttttgtcacacatcataatgagttaaacatgaggctttatatgcgtattgctcctgagctctatctgaaggaattggttgttggggggctggatcgtgtttatgaaattgggaagcagttcaggaatgaaggaattgacctgacgcacaatcctgaattcacaacatgtgaattttatatggcatatgcagattacaatgacttgatagagcttactgaaaccatgttatctggtatggttaaggagttgacaggtggctacaagattaaatatcatgctaacggagttgagaaaccaccaatagagattgatttcacacctcccttcagaaagatagacatgattgaagaattagaggctatggctaaactcaatatacctaaagatctctcaagtgatgaagcaaacaagtatttgatagatgcctgtgccaaatatgatgtcaaatgcccacctccccagactacaacacggttgcttgataagctagttggccatttcttggaggagacatgtgtgaatcccacgtttattatcaaccatccagagataatgagtccattggcaaagtggcataggtctcgacctggattgactgagaggtttgagctctttgttaacaagcatgaggtgtgcaatgcatatacagagttaaatgatcctgttgttcagaggcaacggtttgaggaacaactaaaggatcgtcaatctggtgatgatgaagctatggcattggatgaaacattctgcacagcccttgagtatggcctaccaccgactggtggttggggattgggaattgatcgccttacaatgttgctgactgattctcagaatatcaagttgaggtatttaaaatgctcttttgatgcaaattcaggaagttcttctattcccggctatgaagcctcaagattagatatgtccacaaagcaggaacctgtcagaaggattaaagcagactga

SEQ ID NO: 81310 - DNA, 941 bp, Oryza sativa
  Clone ID: PAT_MRT4530_8084C.1
atggaccccgagccccaccgcgtcgacgcctccctcgctccaaaccctagccgccgccagccactcctccggccgggcaagtcgacggccttcaagcgcgaggagcgccgcaagcgcaaggagcgaaagcagcaggagcgcctcgccctcgatctcgagcggtgggagcccctcggcgccccgccccgccccgccgccgctgcggcctccccatcccgcgccgcgctaccggacaagccgtgggtgtgcgacccgcccccggaacccgagccctccgcgtcctggggctgtggctggggcccgccggcggcggaaccccctcgggagccgccggtgccggcggccgtgtccccgcaggccgccgccgtggaggcttgccgcgccttcttcggtgagcacgtcgaccacgacgacggcgacgacgaggatgaggaagaggaggaaggcaatgtggcccggttcttccaggagctactggagaaggacgcgggcctgagggggttctacgaggcggagcgggagaagggccggttcctgtgcctcgtgtgcgaggggatcggcgccagggcgggcaagaggttcgccggctgcgcggcgctcgtgcagcacgccggatcggtcgcccgggccgggaggaggatggcgcaccgggcgttcgcggacgccgtcggccggctgctgggctggagcgccggccggaccacggctttgcagatgcagacggattctgacaatgctggcatgtgcgatgaagatattcactgcgaggatgttccgcaaagcgcagaaatggagatgtgtcctcatcagtgatcggtgtacaaggacccagtagcctatttaacagctaatttccctccggaagagagtcgtcttttgttcagaaagctttgctaatctgaaggtcgtttttcttttgtcaaaaaaaaaaaaaaaaaaaa

SEQ ID NO: 81311 - DNA, 5868 bp, Oryza sativa
  Clone ID: PAT_MRT4530_80850C.1
atggagacgttcctttctgcggttctcgctgatcttctcagcagatccatatccttcgtgatcgacagatactgccagcagcagcagggtgtggaggagaatctacagcagttacaacgcatgctgctgcggatccaaaccgtcgatgaggaggccaacgggaggagaatcacaaaccaagcgatgcttctgcagctaaagacgatgagaaatgtgatgtacagaggctactactttcttgataatttcaggtatcggatcgctctagggcacgctccggatgaggtggatgatcactctttggcctcgtttcctttcaatccattgaagcggttccgtttctctacgatggcaaggaaaatagtgtctgaagaccaggagaaaaaagagcttctaaagatgcttggtcgccttgaaagcatcatttcagaggagtttgttatgtcactcagaagctaccctcgtatggttcgacagccttattgcagctacctgttgttggagaactgcatgtttggccgtcaagcagaacaagagaggatcatcagcttcttgctagaaccacatcgtgctggcgcggaaggtgttgcagtgcttccgataattggtcctgcaagagttggcaagagcactcttgttgagaatgtctgccatgatgaaagggtgcgtaaatacttctccacgattgttttctattacaccggtagtactgagggtgcagttgcagataccggtgtcatcaaacatcaaaatcctgcctcaactaaacaatcactagtagtaattgaacttgttgatgacatggatgatgaaacatggagaagaatattgtctagtctgagaggagacaacatagcggcgcctgtgagtaaaatcataataacaagtcaatcaaataagatagcaacttttggaacaaccgaaacacttcagttagatatgctcccaaaagaagctttttggtatttcttgaaaacaattgcatttggcagcactaatcctgaagaggagccgaagctaacatccatatgtatggagatcgcggcccaggccaatggagcattcctacatgcaaacattattggtggcatactcagatctaattttagtgttcaattctggtacaaggttctcaaacgcatgaaaattatcacaaactggcatttccgtctactaggtgaacatccaagggacatgtttgcagctaaaagtgggcggactatagtttggtttagtaaattaaatcggtttgtaccagtgacatacaatgaagcaagttcctctcggctcaatgatcatcccacaagcaatgcttttatagccaaaaagggccagcttgatgagaacattgatgccctggaatggcaatctagcattcctccatactataaataccgaacgcgttacgcaatgattgaacaaccgaatacgttatctacagggaagcgatcccgctctctctcagaaggatgcactctgaaactgagaactgagtttgagctgacatttctgccagcttcatgtgcgtcagccgcactgacaacagcgaaaccgttggcgccgtgttatttcgttgacagatatgtcgaacaaacaaatattccaagtttaccccatggcccaggaaacgttcgttacgggccaactggggtagatctatcagaatttattgtatcagaatggggaattgatagaccggctgagaggagtgtaccttctataaaaggatggttaatgaggggcttgagagttgatccacagataagtgacataacaatcaatgttatagtaagtcgggcaactgagggtttttattgggaactaatgccagttcaaaactctcgagtgtggagattgtatgtggaaaatgcattgcaacgcgggtggcctctagctatggttccgtttgttcaccagaaggatccaggtgtgcagatgaacatggatgatggcgagggaccaattgctgaagtaaatgagacttctgtgaaagatgtcaacgcacaagaggacgggggcgtagtagctccagtgggcattcaactaggtggagtggccgacgagggggagactgtcggtgccattgtggatgaaatggagagggaggattctgacaacgagcgtgtagaggaaggtgattcgtcagatgatgagacggatattaatccagcagaatgggctagtgaggatttttctggtctggtcgtctctgaagaggatagtgtgagatgggagtacaaagaaaatgaggttattcagggagcgatttatagtagagcagaagatatgaaggaggcggtaaaacattttgcagtgtcacttcatagagagttttgggttgccaagtcaaaccggtcgcaatatgaagttcggtgtgttaaggaaaaagatggttgtccctggagagtgcacgtgtataaggggaaatggaaggattattggacagtgtcagtcgttaccaagcatacatgttttctacctagtgttcagaaataccacaggaacattacatgtgcatttgttgcatctgagatgtatgcgcatgtcatcgataatctcacatatgaaccaaggtcaataatccgacacatcgaagagatatacaagtatactattagctatgccaaggcctggagggccaaacagaaaataatagagatgagatttggaacttacgaagcctcgtatgacaatttgccacgcctgcttggtgttatcgaggaaagaaaccctgggagctcttacgaagtgaagaaattcccctcaattgaacatcctggcaagagtgtgctgcaaagggcgttcttagctctacatgcatgcaagatggcattcatgaactgtcgtcctgttctctgcattgatgggacattcttgacaggaaagtatcggggccagatactaacaacaataggggtagatgggaacaatcaggtattgcccttggcatttgcttttgttgagagtgagaataccgatagctggtactggttcctgaaattggttaaaacaaaagttgttggtatgaggccaaatgtgtgcctgatacatgataggcacgctggcattctgcgagcgatagaagagttgcagtttaggagtatggaacgaggataccccggtgtttgggaagatgtacagagtaggtggtgcatgcgtcatatgggagctaatttcttcaagcaattcaagaacaaggagctcatgaacatgttcaagaggctgtgcaatcagaaccaggagaaaaaattcaatgagctttggaagagattagatgagttgacagccaaatgcagtgatcagcgtgcagcggctccatcgaccgccgttgctgaccctcctcaagctcttggacctttcccaacggatagttcaacattggttagaagaactggattggagattcggaaattttctcagtggattctgcatgaaccaaaagagaaatgggccaaggcgtatgacacaggtggtgctagatatggaataatgacaacaaatttggcagaagtttacaactgggtgatgcgcggtgtccgtggactgccactagttggcatagtggaattcattttacatgggacatgcaggtattttagggatcggttccaggcagttcttccttctatgccaaataacaacattttgtttggaactttcatgcagaaaaagctagaggagttgcgtaaaaaggccatgaaacatcgagctctagtgcaaggtacccaacagcacaggtttgagatactatgtcaagataaggcaggcaggggtatctaccgcaacagagtgaagcaggagtgtgttctcaaagccgacggcacatgtcattgctcttgtgcaaagccgaagctgctccacaggccatgcacccatgtcattgctgccgcagcggagtgtggcataccagatgcagtatatgtgtcacagtacttcactggggagttcacagagactaacgatgaagtactcaatattcctgacccatcaaagctccgaggcaaggctggaaggaggaggactcgtcgcatccgcaatgatatggacgagtcggaggctggcagggtgaagcgttgcagcaaatgcgatgaacatgggcacacctacaagcattgtcctaaagacaaggagaaaccaaatgcggcggaggcaggactatcaggatcagcagcagatggagctcgccctacggtgcagggggctcagcttgggacgttccgggctcggacgtgcggtgagctactcacggttcacgactcctttgtcgagaggctgcgtgaggccggcctcctaccgatgtgtcggctggtggaggctgccgccggcgacgcggactcggtcagacgatggactatggacaggtccctcctagcagctttggtcgaccgatggaggccagagacgcacacttttcacttgccgtgcggtgaggtagcccctaccctacaggacgtatcgtacttgttggggctaccgctcgcgggagaggctgttgggccagtgaccacggctgtggactggcaggacgatctgacggcacgtttcgcactagtacagcgcgcaccgcacctcccgctcgagccgttggcacaccaccgcaacaccggacctacgaagaggtggctgcttcagttcaccgtcgagcagctacaggcggaggccgacgagtactcctacacccgctgtttggaggcgtacttgctctggctttttcgccgggtgatgttctgtggcggtcacgggcacgcggtcgacaagggactcgtgcactacgccaggagcatcgccgacgccgcgaggattgcgatcggccgccctgaggtggaccagcacgcgtacgaggagtcactgtacgaggagcgaccagaggtcgactaccctacgatgggtactctgtggtgccgtcgtcagttcggcttccgtcagccctttccagtaccgtttccgaccaccgtcccagctgctattcaccggtactcgcgcaagggtcaacagtcagccggcgactggcccgccaagttggcgacttttgttgaggactggttgctcgcaaccgaggaggtcgtggaccacgagggagagccacacactgaggaggcgtaccaggcctacctacgctggtaccagccacgcacccgtactagggtcaccttcgctcccttggagcagcagccccacgttgcgagcactagagacctctacgccaggcaccacgaccaggacttcgctcgtgctgtcgacgacatcaaccgggtcgtcgttgacggttcaacgacgatccaacgtttaggcgcggggattccggtacccgtagaggagcacctgacgacgtacacgtggatggtggagtcgatgcgctcgattctccgagtgctcacctgtcgtgcagacgatgttgctcgggtagacgcagctgtacagcaaccacccgtaccgaccggtccccgtccagctgcacacgttcctaggccgactcccccttcgcacggaggctcgacagaggacgtcatcagcccctcacagctgggaggcgcaccgccggtgcagacgcaggaccaggcgcaggccactcctccgcgggacactcgtgctacccgtgctgtgccaccggatcgtttcacctactcccaggaccacgttcttcgttccataaatcctacaacattgggtcgaaggttttttgtttgtccaaatattcttgacgacaatttcatggaaccactaaggagatgtcaatacagagaatggatagacaccagaagggttctaactccacctagccgtgttgtgcagcttgaactaccagagcaatacagggttattaaagcgcagtttgagagaggagagggatcctcacgtaggggttag

SEQ ID NO: 81312 - DNA, 4035 bp, Oryza sativa
  Clone ID: PAT_MRT4530_80851C.1
atgtcgaacaaacaaatattccaagtttaccatggaccaggaaacgtccgttacgggccaactggggtagatctgtcagattttattgtatcagaaaggggaattgatagaccggctgagaggagtgtaccttttataaaaggatggttaatgaggggcttgagagttgatccacagacaagtgacataacaatcaatgttatagtaagtcgggcaactgagggtttttattgggaactaatgccagttcaaaactctcgagtgtggagatggtatttggaaaatgcattgcaacgcgggtggcctctagctttggttctgtttgttcacccgaaggatccaggtgtgcagatgaacatggatgatggcgagggaccaagtgctgaagtaaatgagacttctgtggaggaggtcaacgcacgagaggacgggggcgtagtagctccagtgggcattcaaccaggtggagtggccgacgagggggagactgtcggtgccattgtggatgaaatggagagggaggattctgacaacgagcgtgtagaggaaggtgattcgtcagatgatgagacggatattaatccagcagaatgggctagtgaggatttttctgggctgatcgtctctgaagaggatagtgtgagatgggagtacaaagaaaatgaggttattcagggagcgatttatagtagagcagaagatatgaaggaggcggtaaaacattttgcagtgtcacttcatagagagttttgggttgccaagtcgaaccggtcgcaatatgaagttcggtgtgttaaggaaaaagatggttgtccctggagagtgcacgcgtataaggggaaatggaaggattattggacagtgtcagtcattaccaagcatacatgttttctacctggtgttcagaaataccacaggaacattacatgtgcatttgttgcatctgagatgtatgcgcatgtcatcgataatctcacatatgaaccaaggtcaataatccgacacatcgaagagacatacaagtatactattagctatgccaaggcctggagggccaaacagaaaataatagagatgagatttggaacttacgaagcctcgtatgacaatttgccacgcctgcttggtgttatcgaggaaagaaaccctgggagctcttacgaagtgaagaaattcccctcaattgaacatcctggcaagagtgtgctgcaaagggcgttcttagctctacatgcatgcaagatggcattcgtgaactgtcgtcctgttctctgcattgatgggacattcttgacaggaaagtatcggggccagatactaacagcaataggggtagatgggaacaatcaggtattgcccttggcatttgcttttgttgagagtgagaataccgacagctggtactggttcctgaaattggttaaaacaaaagttgttggtatgaggccaaatgtgtgcctgatacatgataggcacgctggcattctgcgagcgatagaagagttgcagtttgggagtatggaacgaggataccctggtgtttgggaagatgtacagagtaggtggtgcatgcgtcatatgggagctaatttcttcaagcaattcaagaacaaggagctcatgaacatgttcaagaggctgtgcaatcagaaccaggagaaaaaattcaatgagctttggaagagattagatgagttgacagccaaatgcagtgatcagcgtgcagcggctccatcgaccgccgttgctgaccctcctcaagctcttggacctctcccaacggatagtccaacattggttagaagaactggattggagattcggaaattttctcagtggattctgcatgaaccaaaagagaaatgggccaaggcgtatgacacaggtggtgctagatatggaataatgacaacaaatttggcagaagtttacaactgggtgatgcgcggtgtccgtggactgccactagttggcatagtggagttcattttacatgggacatgcaggtattttagggatcggttccaggcagttcttccctctatgccgaacaacaacattttgtttggaactttcatgcagaaaaagctagaggagttgcgtaaaaaggccatgaaacatcgagctctagtgcaaggtacccaacagcacaggtttgagatactatgtcaagataaggcaggcaggggtatctaccgcaagagagtgaagcaggagtgtgttctcaaagccgacggcacatgtcattgctcttgtgcaaagccgaagctgctccacaggccatgcacccatgtcattgctgccgcagcagagtgtggcataccagatgcagtatatgtgtcacagtacttcagtaagcaagcaatatatcatacatggagcggcgagatttatgggttcggcatagctggggagttcacagagactaacgatgaagtactcaatattcctgacccatcgaagctccgaggcaaggctggaaggaggaggactcgtcgcatccgcaacgatatggacgagtcggaggctggcagggtgaagcgttgcagcaaatgcgatgaacatgggcacacctacaagcattgtcctaaagacaaggagaaaccaagtgcggcggaggcaggactatcaggatcagcagcagatggagctcgccctacggagatggcacgtcaggatacacctcagttgttggacccggcgatagatcaccgacaccggtctcaccttactgcggtgcagggggctcagcttgggacgttccgggcacggacgtgcggtgagctactcacagttcacgactcctttgtcgagaggctacgtgaggccggcctcctaccgatgtgtcggctggtggaggctgcggccggcgacgcggacccggccagacgatggactgtggacaggtccctcctagcagctttggtcgatcgatggaggccagagacgcacacttttcacttgccgtgcggtgaggttgagcagctacaggcggaggccgacgagtactcctacagccgatgtttggaggcgtacttgctctggctttttggctgggtgatgttctgtggcggtcacgggcacgcggtcgacaagggactcgtgcactacgccaggagcatcgccgacgccacgtgccgatgggctcacgtccaggttaggcggtcgtatcctgagtttgttatggagttcgaccgccttctgccgactgatgtcgtgtgggagccctacagtgccgcggctacccaggctcgtgcaccattgggtctgtccacactctgcaccagggaccaggcgtactcgcgcaagggtcagcagtcagctggcgactggcccgccaagttggcgacttttgttgaggactggttgctcgcaaccgaggaggtcgtggaccacgagggagagccacacactgaggagtcgtaccaggcctacctacgctggtaccagccacgcacccgtactagggtcaccttcgctcccttggagcagcagccccacgttgcgagcactagagacctctatgccaggcaccgcgaccaggacttcgctcgtgctggtttcgtgcaccgttcagcaccccaccttcctcggctaggccttctgttgtgccccccacaggctgcccacttctcccaggctgcagggtcagcgtctcaggcagctgtgtcgacctcgcactcagcgcagttctggcagtacaccgggacttcgtcacaggcagccggcacgtcgagtcagggtccaccactggaccatgctgggacctcgtcggaccgcttgctaccttccaccttgctcttcgacatcactgacttcgacttcgcttcaggcttgacagaggacgtcatcggcccctcacagctgggaggcgcaccgccggtgcagacgcaggaccaggcgcaggccactcctccgcgggacactcgtgctacccgtgctgtgccactggatcgtttcacctactcccaggaccacgtgcgagcacaggcccggaggaccaagcgtggtcgcggcgcggggcagggccagtag

SEQ ID NO: 81313 - DNA, 270 bp, Oryza sativa
  unsure (1)..(270): unsure at all n locations
  Clone ID: PAT_MRT4530_80852C.1
gtggtgcgacaacaatgtgaacattcacccttgattaatagtggggggagccgagagacagtgnngtgagggggggggnacgacaacaatgtttatccgcacccttgatnnattcggtgaggggatggtggtatgannnataacagacatggggggttctttgtgcgggggctatnttggggggggggtccctattttattaagggaagaataggtaccaatatatggtaccaggnccatgtttgtggttgcgaccccntctgagtaacc

SEQ ID NO: 81314 - DNA, 5280 bp, Oryza sativa
  Clone ID: PAT_MRT4530_80853C.1
ggtcggcggcggcgggttggtggcggacgcggcggatctgagggtgggggcggcgttggcggcggctccctcccgcggcagatccgccagtggtggcggcggcggcgcgcggtagccgcgggtggatccggccgtcgtggtggtggctgcgggcggatacggcggtggcggctcccttctcctctctcgcctccctcctatcccagatctgacggcgatggtggtgtcggcggcgtcggcgggtgggtccgtcggcggtggcggcggccgcgggccggcggcggcggtacccgcgggtggatccggtcgtggtggtggcggctgcgggcggatacggcggcggcggctcccttctcccctctcacctccctcctgccctagatccggcggtgatggcggtgtcggtggcgtcggcgggtgggtccgttggcggtggcggcggtcgcaggccgccgccggcggcggctccctcctcccctctcgtctccctcccgacctagatccggcggcgatggatccggcggcgggtggtggcggcgtcggcggtggccgcggatggatccctctccctctccccgtcgacctcgacggcgatggcgccttctcaacggcggcgacgacggcgtcggcttcgtccgagggtggatccgttggcggtggcggccaccgcgggcggatccggcatcggcgctccctccgccgcctctcttctccctccggcggtgtgcagacgaacatggatgatggcgagggaccaagtgctgaagtaaacgagacttctgtggaggaggtcaacgcacgagaggacgggggcgtagtagctccagtgggcattcaaccaggtggagtggccgacgagggggagactgtcggtgccattgtggatgaaatggagagggaggattctgacaacgagcgtgtagaggaaggtgattcgtcagatgatgagacggatattaatccagcagaatgggctagtgaggatttttctgggctgatcgtctctgaagaggatagaaagtatcggggccagatactaacagcaataggggtagatgggaacaatcaggtattgcccttggcatttgcttttgttgagagtgagaataccgacagctggtactggttcctgaaattggttaaaacaaaagttgttggtatgaggccaaatgtatgcctgatacatgataggcacgctggcattctgcgagcgataggagagttgcagtttgggagtatggaacgaggataccccagtgtttgggaagatgtacagagtaggtggtgcatgcgtcatatgggagctaatttcttcaagcaattcaagaacaaggagctcatgaacatgttcaagaggctgtgcaatcagaaccaggagaaaaaattcaatgagctttggaagagattagatgagttgacagccaaatgcagtgatcagcgtgcagcggctccatcgaccgccgttgctgaccctcctcaagctcttggacctctcccaatggatagtccaacattggttagaagaactggattggagattcgaaaactttctcagtggattctgcatgaaccaaaagagaaatgggccaaggcgtatgacacaggtggtgctagatatggaataatgacaacaaatttggcagaaatttacaactgggtgatgcgcggtgtccgtggactgccactagttggcatagtagagttcattttacatgggacatgcaggtattttagggatcggttccaggcagttcttccctctatgccgaacaacagcattttgtttggagctttcatgcagaaaaagctagaggagttgcgtaaaaaggccatgaaacatcgagctctagtgcaaggtacccaacagcacaggtttgagatactatgtcaagataaggcaggcaggggtatctaccgcaagagagtgaagcaggagtgtgttctcaaagccgacggcacatgtcattgctcttgtgcaaagccgaagctgctccacaggccatgcacccatgtcattgctgctgcagcggagtgtggcataccagatgcagtatatgtgtcacagtacttcagtaagcaagcaatatatcatacatggagcggcgagatttatgggttcggcatagctggggagttcacagagactaacgatgaagtactcaatattcctgacccatcgaaactccgaggcaaggctagaaggaggaggactcatcgcatccgcaacgatatggacgagtcggaggctggcatggtgaagcgttgcagcaaatgcgatgaacatgggcacacctacaagcattgtcctaaagacaaggagaaaccaagtgcggcggaggcaagactattaggatcagtagcagatggagctcgccctaaaggagatggcacgtcaggatacacctcagttgttggacccggcgatagatcaccgacaccggtctcaccttactgcggtgcagggggctcagcttgggacgttccgggcacggacgtgcggctacgtgaggccggcctcctaccgatgtgtcggctggtggaggctgcggccggcgacgcggacccggccagacgatggactgtggacaggtccctcctagcagctttggtcgatcgatggaggccagagacgcacacttttcacttgccgtgcggtgaggtagcccctaccctacaggacgtatcgtacttgttggggctaccgctcgcgggagacgctgttgggccagtgaccacggctgtggactggcaggacgatctggcggcacgtttcacactagtacagcgcgcaccgcacctcccgttcgagccgttggcacaccaccgcaacaccggacctacgaagaggtggctgcttcagttcaccgttgagcagctacaggcggaggccgacgagtactcctacagccgatgtttggaggcgtacttactctggctttttggctgggtgatgttctgtggcggtcacgggcacgcggtcgacaagggactcgtgcactacgccaggagcatcgccgacgccgcggtaggtgaggtgcctcagtggagctggggttccgcgttgttggcggctctgtaccgtgcactttgtgagtcttgcacgaagacggatcccagcgcgacctttggtgggtgccctctctttctttctatctgggcagctgagaagattgcgatcggccgccctgaggtggaccagcacgcgtacgaggagtcactgtacgaggagcgaccagaggtcgactaccctacgatgggtactctgtggtgccgtcgtcagcgccgatgggctcacgtccaggttaggcggtcgtatcctgagtttgttatggagttcgaccgccttctgccgactgacgtcgtgtgggagccctacagtgccacagctacccaggctcgtgcgccgttgggtctgtccacactctgcaccagggaccaggcgtactggatgactacggttccgatggtcttcgacatctgcgttgagcctcatgcccctttccgcgtgatgcggcagttcggcttccgtactcgcgcaagggtcagcagtcagctggcgactggcccgccaagttggcgacttttgttgaggactggttgctcgcaaccgaggaggtcgtggaccacgagggagagccacacactgaggaggcgtaccaggcctacctacgctggtaccagccacgcacccgtactagggtcaccttcgctcccttggagcagcagccccacgttgtgagcactagagacctctacgccaggcaccgggaccaggacttcgctcgtgctgagagtgttgaagagaagcccttgtcgttgttggcctacctggccctaatggggctcagcttgggacgttccgggcacggacgtgcggtgagctacttacggttcacgactcctttgtcgagaggctgcgtgaggccagagacgcacacttttcacttgccgtgcggtgagcaccgatgggctcacgtccaggttaggcggtcgtatcctgagtttgttatggagttcgaccgccttctgccgattgacgtcgtgtgggagccctacagtgtcgcggctacccaggctcgtgcgccgttgggtcagtccacactctgcaccagggaccaggcgtactggatgactacggttccgatggtcttcgacatctgcgttgagcctcacgcccctttccacgtgatgcggcagttcggcttccgtcagccctttccagtaccgtttccgacgaccgtcccagctgttgttcaccggtactcgcgcaagggtcagcagtcagctggcgactggcccgccaagttggcgacttttgttgaggactggttgctcgcaaccgaggaggtcgtggaccacgagggagagccacacactgaggaggcgtaccaggcctacctacgctggtaccagccacgcacccgtactagggtcaccttcgctcccttggagcagcagccccacgttgtgagcactagagacctctacgccaggcaccgggaccaggacttcgctcgtgctgtcgacgacatcaaccgggtcgtcgttgacggttcaacgacgatccaacgtttaggcgcggggattccggtacccgtagaggagcacctgacgacgtacacgcagatggtggagtcgatgcgctcgattctccgagtgctcacctgtcgtgcagacgacgttgctcgggcagacgtagctgtacagcggccacccgtaccgactggtccccgtccagctgcgcacgttcctaggccgactccccctccgcacggagggtttcgtgcaccgttcagcaccccgccttcctcggctaggccttctgttgtgccccccacaggtttcgcccagttcgctatgacgcaggccgcccacttctcccaggctgcagggtcagcgtctcaggcagctgcatcgacctcgcactcagcgcagttctggcagtacaccgggactttgtcacaggcagccggcacgtcgagtcagggtccaccactggaccatgctgggacctcgtcggaccgcttggtgccttccaccttgctcttcgacatcactgacttcgacttcgcttcaggctcgacagaggacgtcattggcccctcacagctgggaggcgcaccgccggtgcagacgcaggaccaggcgcaggccactcctccgcgggacactcgtgctacccgtgctgtgccaccggatcgtttcacctactcccaggaccacgtgcgagcacaggcccggaggaccaagcgtggtcgcggcgcggggcagggccagtag

SEQ ID NO: 81315 - DNA, 5048 bp, Oryza sativa
  Clone ID: PAT_MRT4530_80854C.1
atatgtcgaacaaacaaatattccaagtttaccatggaccaggaaacgtccgttacgggccaactggggtagatctgtcagattttattgtattagaaaggggaattgatagaccggctgagagaagtgtaccttctataaaaggatggttaatgaggggcttgagagttgatccacagacaagtgacatatcaatcaatattatagtaagtcgggcaactgagggtttttattgggaactaatgccagttcaaaactctcgagtgtggaaatggtatgtggaaaatgcattgcaacgcgggtggcctttagctatggttccgtttgttcacccgaaggatccaggtgtgcagatgaacatggatgatggcgagggaccaagtgctgaagtaaatgagacttctgtggaggaggtcaacgcacgagaggatgggggcgtagtagctccagtaggcattcaaccaggtggagtggccgacgagggggagactgtcggtgccattgtggatgaaatagacagggaggattctgacaacgagcgtgtagagaaaggtgattcgtcagatgatgagacggatattaatccagcagaatgggctagtgaggatttttctgagatggtcgtctctgaagaggatagtgtgagatgggagtacaaagaaaatgaggttattcagggagcgatttatagtagagcagaagatatgaaggaggcggtaaaacattttgcagtgtcaattcatagagagttttgggttgccaagtccaaccggtcgcaatatgaagttcggtgtgttaaggaaaaagatggttgtccctggagagtgcatgcgtataaggggaaatggaaggattattggacagtgtcagtttgtcgcgaccgagaaaaatacattctctcgaacgctagtgtattaatccctgtcccaggaaaagccggggtacaccacacaaacgtgactgagccacaaactaagccttacccactagacatgtggaagtacggtagtgctttgcaacagaggcccgagcttagtccttatattggccggggtgctacttcccacaactggcatgcacccaaaccccaccgaaaaacaggttttaggggctttgaaagaggaagagagggggtgaacaagaaataccacaggaacattacatgtgcatttgttgcatctgagatgtatgcgcatgtcatcgataatctcacatatgaaccaaggtcaataatccgacacattgaagagacatacaagtatactattagctatgccaaggcccggagggccaaacagaaaataatagagatgagatttggaacttacgaagcctcgtatgacaatttgccacgcctgcttggtgttatcgaggaaagaaaccctgggagctcttacgaagtgaagaaattcccctcaattgaacatcctggcaagagtgtgctgcaaagggcgttcttagctctacatgcatgcaagatggcattcgtgaactgtcgtcctgttctctgcattgatgggacattcttgacaggaaagtatcggggccagatactaacagcaataggggtagatgggaacaatcaggtattgcccttggcatttgcttttgttgagagtgagaataccgacagctggtactggttcctgaaattggttaaaacaaaagttgttggtatgaggccaaatagtaggtggtgcatgcgtcatatgggagctaatttcttcaagcaattcaagaacaaggagctcatgaacatgttcaagaggctgtgcaatcagaaccaggagaaaaaattcaatgagctttggaagagattagatgagttgacagccaaatgcagtgatcagcgtgcagcggctccatcgaccgccgttgcttaccctcctcaagctcttggacctctcccaacggatagtccaacattggttagaagaactggattggagattcggaaattttctcagtggattctgcatgaaccaaaagagaaatgggccaaggcgtatgacacaggtggtgctagatatggaataatgacaacaaatttggcagaagtttacaactgggtgatgcgcggtgtccgtggactgccactagttggcatagtggagttcattttacatgggacatgcaggtattttagggatcggttccaggcagttcttccctctatgccgaacaacagcattttgtttggagctttcatgcagaaaaagctagaggagttgcgtaaaaaggccatgaaacatcgagctctagtgcaaggtacccaacagcacaggtttgagatactatgtcaagataaggcaggcaggggtatctaccgcaagagagtgaagcaggagtgtgttctcaaagccgacggcacatgtcattgctcttgtgcaaagccgaagctgctccacaggccatgcacccatgtcattgctgccgcagcggagtgtggcataccagatgcagtatatgtgtcacagtacttcagtaagcaagcaatatatcatacatggagcggcgagatttatgggttcggcatagctggggagttcacagagactaacgatgaagtactcaatattcctgacccatcgaagctccgaggcaaggctggaaggaggaggactcgtcgcatccgcaacgatatggacgagtcggaggctggcagggtgaagcgttgcagcaaatgcgatgaacatgggcacacctacaagcattgtcctaaagacaaggagaaaccaagtgtggcggaggcaggactatcaggatcagcagcagatggagctcgccctacggagatggcacgtcaggatacacctcagttgttggacccggcgatagatcaccgacaccggtctcaccttactgcggtgcagggggctcagcttgggacgttccgggcacggacgtgcggtgagctactcacggttcacgactcctttgtcgagaggctacgtgaggccggcctcctaccgatgtgtcggctggtggaggctgcggccggcgacgtggacccggccaagcgatggactgtggacaggtccctcctagcagctttggtcgaacgatggaggccagagacgcacacttttcacttgccgtgcggtgaggtagcccctaccctacaggacgtatcgtacttgttggggctaccgctcgcgggagacgctgttgggccagtgaccacggctgtggactggcaggacgatctgacggcacgtttcgcactagtacagcgcgcaccgcacctcccgttcgagccgttggcacaccaccgcaacaccggacctacgaagaggtggctgcttcagttcaccgttgagcagctacaggcggaggccgacgagtactcctacagccgatgtttggaggcgtacttgctctggctttttggctgggtgatgttctgtggcgatcacgggcacgcggtcgacaagggattcgtgcactacgctaggagcatcgccgacgccgcggtaggcgaggtgcctcagtggagctggggttccgcgttgttggcggctctgtaccgtgcactttgtgagtcttgcacgaagacggatcccagcgcgacctttggtgggtgccctctctttctttctatctgggcagctgagaggattgcgatcggcctccctgaggtggaccagcacgcgtacgaggagtcactgtatgaggagcgaccagaggtcgactaccctacgatgggtactctgtggtgccgtcgtcagcgccgatgggctcacgtccaggttaggcggtcgtatcctgagtttgttatggagttcgaccgccttctgccgactgacgtcgtgtgggagccctacagtgccacggctacccaggctcgtgcgccgttgggtctgtccacactctgcaccagggaccaggcgtactggatgactacgtttccgatggtcttcgacatctgcgttgagcctcacgcccctttccgcgtgatgcggcagttcggcttccgtcagccctttccagtaccgtttccgactaccgtcccagctgctgttcaccggtactcgcgcaagggtcagcagtcagctggcgactggcccgccaagttggcgacttttgttgaggactggttgctcgcaaccgaggaggtcgtggaccacgagggagagccacacactgaggagtcgtaccaggcctacctacgctggtaccagccacgcacccgtactagggtcaccttcgctcccttggagcagcagccccacgttgcgagcactagagacctctatgtcaggcaccgcgaccaggacttcgctcgtgctgtcgacgacatcaaccgggtcatcgttgacggttcaacgacgatccaacgtttaggcgcggggattccggtacccgtagaggagcacctgacgacgtacacgcggatggtggagtcgatgcgctcgattctccgagtgctcacctgtcgtgcagacgacgttgctcgggcagacgcagctgtacagcggccacccgtaccgactggtccccgtccagctgcgcacgttcctaggccgactccccctccgcacggagggtttcgtgcaccgttcagcaccccgccttcctcggctaggccttctgttgtgccccccacaggtttcgcccagttcgctatgacgcaggccgcccacttctcccaagctgcagggtcagcgtctcaggcagctgtgtcgacctcgcactcagcgcagttctggcagtacaccgggacttcgtcacaggcagccggcacgtcgagtcagggtccaccactggaccatgctgggacctcgtcggaccacttgttaccttccaccttcctcttcgacatcactgacttcgacttcgcttcaggctcgacagaggacgtcatcggcccctcacagctgggaggcgcaccgccggtgcaaacgcaggaccaggcgcaggccactcctccgcgggacactcgtgctacccgtgctgtgccaccggatcgtttcacctactcccaggaccacgtgcgagcacaggcccggaggaccaagcgtggtcgcggcgcggggcagggccagtag

SEQ ID NO: 81316 - DNA, 5157 bp, Oryza sativa
  Clone ID: PAT_MRT4530_80855C.1
atgtcgaacaaacaaatattccaagtttaccatggaccaggaaacgtccgttacgggccaactggggtagatctgtcaaattttattgtattagaaaggggaattgagagaccggctgagaggagtgtaccttctataaaaggatggttaatgaggggcttgagagttgatccacagacaagtgacataacagtcaatgttatagtaagtcgggcaactgagggtttttattgggaactaatgccagttcaaaactctcgagtgtggagatggtatttggaaaatgcattgcaacgcgggtggcctctagctttggttccgtttgttcacccgaaggatccaggtgtgcagatgaacatggatgatggcgagggaccaagtgctgaagtaaacgagacttctgtggaggaggtcaacgcacgagaggacgggggcgtagtagctccagtgggcattcaaccaggtggagtggctgacgagggggagactgtcggtgccattgtggatgaaatggagagggaggattctgacaacgagcgtgtagaggaaggtgattcgtcagatgataagacggatattaatccagcagaatgggctagtgaggatttttctgggctgatcgtctctgaagaggatagtgtgagatgggagtacaaagaaaatgaggttattcagggagcgatttatagtagagcagaagatatgaaggaggcgagttttgggttgccaagtcgaaccggtcgcaatatgaagttcggtgtgttaaggaaaaagatggttgtccctggagagtgcacgcgtataaggggaaatggaaggattattcagatgaacatggatgatggcgagggaccaagtgctgaagtaaacgagacttctgtggaggaggtcaacgcacgagaggacgggggcgtagtagctccagtgggcattcaaccaggtggagtggctgacgagggggagactgtcggtgccattgtggatgaaatggagagggaggattctgacaacgagcgtgtagaggaaggtgattcgtcagatgataagacggatattaatccagcagaatgggctagtgaggatttttctgggctgatcgtctctgaagaggatagtgtgagatgggagtacaaagaaaatgaggttattcagggagcgatttatagtagagcagaagatatgaaggaggcggtaaaacattttgcagtgtcacttcatagagagttttgggttgccaagtcgaaccggtcgcaatatgaagttcggtgtgttaaggaaaaagatggttgtccctggagagtgcacgcgtataaggggaaatggaaggattattggacagtgtcagttgttacgaagcatacatgttttctacctggtgttcagaaataccacaggaacattacatgtgcatttgttgcatctgagatgtatgtgcatgtcatcgataatctcacatatgaaccaaggcctggagggccaaacaaaataatagagatgagatttggaacttgcgaagcctcgtatgacaatttgccacgcctgcttggtgttatcgaggaaagaaaccctgggagctcttacgaagtgaagaaattcccctcaattgaacatcttggcaagagtgtgctgcaaagggcgttcttagctctacatgcatgcaagatggcattcgtgaactgtcgtcctgttctctgcattgatgggacattcttgacaggaaagtatcggggccagatactaacagcaataggggtagatgggaacaatcaggtattgcccttggcatttgcttttgttgagagtgagaataccgacagctggtactggttcctgaaattggttaaaacaaaagttgttggtatgaggccaaatgtatgcctgatacatgataggcacgctggcattctgcgagcgataggagagttgcagtttgggagtatggaacgaggataccccggtgtttgggaagatgtacagagtaggtggtgcatgcgtcatatgggagctaatttcttcaagcaattcaagaacaaggagctcatgaacatgttcaagaggctgtgcaatcagaaccaggagaaaaaattcaatgagctttggaagagattagatgagttgacagccaaatgcagtgatcagcgtgcagcggctccatcgaccgccgttgctgaccctcctcaagctcttggacctctcccaacggatagtccaacattggctagaagaactggattggagattcggaaattttctcagtggattctgcatgaaccaaaagagaaatgggccaaggcgtatgacacaggtggtgctagatatggaataatgacaacaaatttggcagaagtttacaactgggtgatgcgcggtgtccgtggactgccactagttggcatagtggagttcattttacatgggacatgcaggtattttagggatcggttccaggcagttcttccctctatgccgaacaacagcattttgtttggaactttcatgcagaacaagccagaggagttgcgtaaaaaggccatgaaacatcaagctttagtgcaaggtacccaacagcacaggtttgagatactatgtcaagataaggcaggcaagggtatctaccgcaagagagtgaagcaggagtgtgttctcaaagccgacggcacatgccattgctcttgtgcaaagccgaagctgctccacaggccatgcacccatgtcattgctgccgcagcggagtgtggcataccagatgcagtatatgtgtcacagtacttcagtaagcaagcaatatatcatacatggagcggcgagatttatgggttcggcatagctggggagttcacagagactaacgatgaagtactcaatattcctgacccatcgaagctccgaggcaaggctggaaggaggaggactcgtcgcatccgcaacgatatggacgagtcggaggctggcagggtgaagcgttgcagcaaatgcgatgaacatgggcacacctacaagcattgtcctaaagacaaggagaaaccaagtgcagcggaggcaggactatcaggatcagcagcagatggagctcgccctacggagatggcacgtcaggatacacctcagttgttggacccggcgatagatcaccgacaccggtctcaccttactgcggtgcagggggctcagcttgggacgttccgggcacggacgtgcagtgagctactcacggttcaccactcctttgtcgagaggctacgtgaggccggcctcctaccgatgtgtcggctggtggaggctgcggccggcgacgcggacccggccagacgatggactgtggacaggtccctcctagcagctttggtcgatcgatggaggccaaagacgcacacttttcacttgtcgtgcggtgaggtagcccataccctacaggacgtatcgtacttgttggggctaccgctcgcgggagacgctgttgggccagtgaccacggctgtggactggcaggacgatctgacggcatgtttcgcactagtacagcgcgcaccgtacctcccgctcgagccgttggcacaccaccgcaacaccggacctacgaagaggtggctgcttcagttcaccgttgagcagctacaggccgaggccgacgagtactcctacagccgatgtttggaggcgtacttgctctggctttttggctgggtgatgttctgtggcggtcacgggcacgcggtcgacaagggactcgtgcactacgccaggagcatcgccgacgccgcggtaggcgaggtgcctcagtggagctggggttccacgttgttggcggctctgtaccgtgcactttgtgagtcttgcacgaagacggatcccaacgcgacctttggtgggtgccctctctttctttctatctgggcagctgagaggattgcgatcggccgccctgaggtggaccagcacacgtacgaggagtcactgtacgaggagcgaccagaggtcgactaccctacgatgggtactctgtggtgccgtcgtcagcgccgatgggcccacgtccaggttaggcggtcgtatcctgagtttgttatggagttcgaccgccttctgccgactgacgtcgtgtgggagccctacagtgccatggctacccaggctcgtgcgccgttgggtctgtccacactctgcaccagggaccaggcgtactggatgactacggttccgatggtcttcgacatctgcgttgagcctcacgcccctttccgcgtgatgcggcagttcggcttccgtcagccctttccagtaccgtttccgaccaccgtcccagctgctgttcaccggtactcgcgcaagggtcaacactcagctggcgactggcccgccaagttggcgacttttgttgaggactggttgctcgcaaccgaggaggtcgtggaccacgagggagagccacacactgaggagtcgtaccaggcctacctacgctggtaccagccacgcacctgtactagggtcaccttcgctcccttggagcagcagccccacgttgcgagcactagagacctctatgccaggcaccgcgaccaggacttcgctcatgttacgacgttgctcgggcagacgcagctgtacagcggccacccgtaccgactggtccccgtccagctgcgcacgttcctaggccgactccccctccgcacggagggtttcgtgcaccgttcagcaccccgccttcctcggctaggccttctgttgtgccccccacaggccgcccacttctcccaggctgcagggtcagcgtctcaggcagctgtgtcaacctcgcactcagcgcagttctggcagtacaccgggacttcgtcacaggcagccggcacgtcgagtcagggtccaccactggaccatgctgggacctcgtcggaccacttgttgccttccaccttcctcttcgacatcactgacttcgacttcgcttcaggttcgacaaaggacgtcatcggcccctcacagctgggaggcgcaccgccggtgcagacgcaggaccatgcgcaggccactcctccgcgggacactcgtgctacccgtgctgtgccaccggatcgtttcacctactcccaggaccacgtgcgagcacaggcccggaggaccaggcgtggtcgtggtgcggggcagggccagtag

SEQ ID NO: 81317 - DNA, 1326 bp, Oryza sativa
  Clone ID: PAT_MRT4530_80856C.1
gcagacggctcagggcacggaccactgacgtagcgacgcagctcatcagtgtcaagatggcgtggagcaacagatctatccatccatcccatcctcgatccttcattcctgcccggcggcgagcgagagagaggcggaggagatccgagatggcggggagcgggtggaggaggatcccggcggtgaggaggccgcccatgtcgcgcccggcctcggtctgcctctggatcgtgctcgtcgccgccaccctggcgctcgcccaggcgaagaaatcgaaggcggatttgactgaggtcacccacaaggtctacttcgacgtcgagattgatggcaagcccgcaggacgggttgtcatgggacttttcgggaagactgttcctaaaacggcagagaacttccgagcactttgcacaggagagaaaggaactggaaagagtggcaaagcactccacttcaagggaagtgcattccacagaattatacccagctttatgatccaaggaggtgacttcacacttggtgatggaaggggtggtgaatctatctatgggacgaagttcgccgatgaaaacttcaagatcaagcacaccggaccaggcctcctgtccatggccaatgctgggagagacacaaacgggtcccagtttttcatcaccactgtaaccaccagctggttggacgggaagcacgtcgtgttcggtaaggtgctgtctggaatggatgtggtttacaagattgaagctgagggccagcagagtgggtcaccgaagagcaaagttgtcatcgcggacagcggcgaactgccgatgtaatgagctgaaatgatgtttcactgaagctactgctactgcttctcgttgtagaactgttattagctgctctgttttgctatgcttctaccccgaatctggttggagtaaatttctgttagactataacagcgtgcttatatcgcctcttagttgtgggcgatttggagtgaactagcataaaaaggtcgaaactttacttaagtcgtcttcttgttctaagtcgaattatactttgaagtgacttgcttactgttgagcgcttgatctgcgtctagttcagacgaagatattctagattcattgaactgcaacagactaaaaaaaaaaaacctagatcacgatcgattagatttgagtggattaatttacacaaaccaaccacctcgggtagataaataaaatctgtatgtttcatagattctcactgacacatgaaaccgaggtaattagagagagaattaaggccgatgcaaactggagtaatcctcaaaacagcgtgatttccgtgtgccaa

SEQ ID NO: 81318 - DNA, 5772 bp, Oryza sativa
  Clone ID: PAT_MRT4530_80857C.1
gtgttcctcttttcgtccctagcatctgtagctccgaccgcgccaatgtcatcgccgacgacggcggcgtcccttgccatgaggaccccgtcgccgccgagaccgagcgcatcaaggccgtcctcctcaacgaccaagaaaagtcagaggcgacgttgctcgagctgctccggagtctgcagcagctggagctcacggtggacaccttgatggttactgcgattgggaaagcggtgagcagctaccggaagcacaactccaatcagattcgtcaccttgttcaattgctcatcgatgcattggatggaattgttactttgtggcaagtgcagccaaaaggaccagccatctccttgcttagcacaacagattgcttttctcctaagcataggtggcctgaagatgtagcttggcatccagatggtgaattaatttttgcaatgtacagtgctgataacggtggctctcaagtttcagtgatgaatcatagcatatcaggacaagcggcactagttgacgactactgctatatgcttggagctgttgtcaacagccacaaggcccacaaccgtagcggttgtcataaagcccatggagcaggtgcacggtccgatatatcgaacaaacaaatattccaagtttaccatggaccaggaaacgtccgttacgggccaactggggtagatctatcagattttattgtatcagaaaggggaattgatagaccggctgagaggagtgtaccttctataaaaggatggttaatgaggggcttgagagttgatccacagacaagtgacataacaatcaatgttatagtaagtcgggcaactgagggtttttattgggaactaatgccagttcaaaactctcgagtgtggagatggaatttggaaaatgcattgcaacgcgggtggcctctagctttggttccgtttgttcacccgaaggatccaggtatacagacgaacatggatgatggcgagggaccaagtgctgaagtaaacgaaacttctgtggaggaggtcaacgcacgagaggacgggggcgtagtagctccagtgggcattcaaccaggtggagtggccgacgagggggagactgtcgatgccattgtggatgaaatggagagggaggattctgacaacgagcgtgtagaggaaggtaattcgtcagatgatgagacggatattaatccagcagaatggactagtgaggatttttctgggctgatcgtctctgaagaggatagtgtgagatgggagtacaaagaaaatgaggttattcagggagcgatttatagtagagcagaagatatgaaggaggtggtaaaacattttgcagtgtcacttcatagagagttttgggttgccaagtcgaaccggtcgcaatatgaagttcggtgtgttaaggaaaaagatggttgtccctggagagtgcacgcgtataaggggaaatggaaggattattggacagtgtcagttgttaccaagcatacatgttttctacctggtgttcagaaataccacaggaacattacatgtgcatttgttgcatctgagatgtatgcgcatgtcatcgataatctcacatatgaaccaaggcacgctggcattctgcgagcgataggagagttgcagtttgggagtatggaacgaggataccccggtgtttgggaagatgtacagagtaggtggtgcatgcgtcatatgggagctaatttcttcaagcaattcaagaacaaggagctcatgaacatgttcaagaggctgtgcaatcagaaccaggagaaaaaattcaatgagctttggaagagattagatgagttgacagccaaatgcagtgatcagcgtgcagcggctccatcgaccgccgttgctgaccctcctcaagctcttggacctctcccaacggatagtccaacattggttagaagaactggattggagattcggaaattttctttgtggattctgcatgaaccaaaagagaaatgggccaaggcgtatgacacagttggcatagtggagttcattttacatgggacatgtaggtattttagggatcgattccaggcagttcttccctctatgccgaacaacagcattttgtttggagctttcatgcagaaaaagctagaggagttgcgtaaaaaggccatgaaacatcgagctctagtgcaagataaggcaggcaggggtatctaccgcaagagagtgaagcaggagtgtgttctcaaagccgacggcacatgtcattgctcttgtgcaaagccgaagctgatccacaggccatgcacccatgtcattgctgccgcagcggagtgtggcataccagatgcggtatatgtgtcacagtacttcagtaagcaagcaatatatcatatatggagcggcgagatttatgggttcggcatagctggggagttcacagagactaacgatgaagtactcaatattcctgacccatcgaagcttcgaggcaaggctggaaggaggaggactcgtcgcatccgcaacgatatggacgagtcggaggctagcagggtgaagcgttgcagcaaatgcgatgaacatgggcacacctacaagcattgtcctaaagacaaggagaaaccaagtgcggcggaggcaggactatcaggatcagcagcagatggagctcgccctacggtactatttttcagaaacactatatttttcagagatggcacgtcaggatacacctcagttgttggacccggcgatagatcaccgacaccggtctcaccttactgcggtgcagggggctcagcttgggacgttccgggcacggacgtgcggtgagctactcacggttcacgactcctttgtcgagaggctatgtgaggccggcctcctaccgatgtgtcggctggtggaggctgcggccggcgacgcggacccggccagacgatggactgtggacaggtccctcctagcagctttggtcgatcgatggaggccagagacgcacacttttcacttgccgtgcggtgaggtagcccctaccctacaggacgtatcgtacttgttggggctaccgctcgcgggagacgctgttgggccagtgaccacggctgtggactggcaggatgatctgacggcacgtttcgcactagtacagcgcgcaccgcacctcccgctcaagccgttggcacaccaccgcaacaccggacctacgaagaggtggctgcttcagttcaccgttgagcagctacaggcggaggccgacgagtactcctacagccgatgtttggaggcgtacttgctctggctttttggctgggtgatgttctatggcggtcacgggcacgcggtcgacaagggactcgtgcactacgccaggagcatcgccgacgccgcggtaggcgaggtgcctcagtggagctggggttccgcgttgttggcggctctgtaccgtgcactttgtgagtcttgcacgaagacggatcccagcgcgacctttggtgggtgccctctctttctttctatctgggcagctgagaggattgcgatcggccgccctgaggtggaccagcacgcgtacgaggagtcactgtacgaggagcgaccagaggtcgactaccctacgatgggtactctgtggtgccgtcgtcagcgccgatgggctcacgtccaggttaggcggtcgtatcctgagtttgttatggagttcgaccgccttctgccgactgacgtcgtgtgggagccctacagtgccacggctacccaggctcgtgcgccgttgggtctgtccacactctgcaccagggaccaggcgtactggatgactacggttccgatggtctttgacatctgcgttgagcctcacgcccctttccgcgtgatacggcagttcagcttccgtcagccctttttagtaccgtttccgaccaccgtcccagctgctgttcaccggtactcgcgcaagggtcagcagtcagctggcgactggcccgccaagttggcgacttttgttgaggactgcttgctcgcaaccgaggaggtcgtggaccacgagggagagccacacactgaggagtcgtaccaggcctacctacgctggtaccagccacgcacccgtactagggtcaccttcgctcccttggagcagcagccccacgttgcgagcattagagacctctatgccaggcaccgcgaccaggacttcgctcgtgctgtcgacgacatcaaccgagtcatcgttgacggttcaacgacgatccaacgtttaggcgcggggattccggtacccgtagaggagcacctaacgacgtacacgcggatggtggagtcgatgcgctcgattctccgagtgctcacctgttgtgcagacgacgttgctcgggcaaacgcagctgtacagcggccacccgtaccgactggtccccgtccagctgcgcacgttcctaggccgactcccactccgcacggagggtttcgtgcaccgttcagcaccccgccttcctcggctaggccttctgttgtgccccccacaggtttcgcccagttcgctatgacgcaggccgcacacttctcccaggctgcagggtcagcgtctcaggcagctgtgtcgacctcgcacttagcgcagttctggcagtacactgggacttcgtcacaggcagacggcacgtcgagtcagggtccaccactggaccatgctgggacctcgtcggaccacttgttgccttccaccttcctcttcgacatcactgactttgaattcgcttcaggctcgacagaggaccgccggtgcagacgcaggaccaggcgcaggccactcctctgcgggacactcgtgctacccgtgctgtgccaccggatcgtttcacctactcccaggaccacgtgcgagcacagacgccgaggtgttgaggatccaaactggcgtagcgatccttgtgtatacctactaccaccttggtgccagcgtcctctctgcctatgcggtgatcgatgccaactaatggcttcgaggaatcctgatattcgaggaaggcgcttttttaggtgccctaactatgaccgtgagacccgcactacggcttgcgcatacatcgagtgggtcgatacagaaaatcccgttctcgacctaaccacttgtttacaagaaggtcgctggtatttcgcatccgaaagtactgagcaatacttacagagaaaagcggcttatgaacgacaatgtcgtgaacaacagagcgactggcgggtgctaactacggcactccctccatgggaagcccgtccaagatgcaggtgtggtgatcgttgtcaggttcttcgttccataaatcctacaacattgggtcgaaggttctttgtttgtccaaatattcttgacgacgatttcatggaaccaccaaggagatgtcaatacagagaatggatagacaccagaagggttctaactccacctagccgtgttgtgcagcttgaactaccagagcacggtacctcggaaaggagttgtgacaataccccttgcacaaataatccattacagcgcacctttcctggatcataatcaccccctcaaaaaccagaggcatggactctccagcgacccccgtggacttctcgccacttctcagtctggcgcactataatgaatcacgctatacaaaagataaagccgttgcccacgctggcttgtggttggcacggtaaatgtctcacaacagtagctcgcgaaccggtccttaattgtcatgagcacgactctcaaaaccatgtgctcacaacccaccat

SEQ ID NO: 81319 - DNA, 583 bp, Oryza sativa
  unsure (1)..(583): unsure at all n locations
  Clone ID: PAT_MRT4530_80858C.1
naaaaaaaaaaaaaaaaaaaacacatgaacaaaaaaaagtaaaaaaaaaaaaaaaaaaaaaaaaaaaaaaaaaaaaaaaaaaaagggggaaaaaaaaaaaaaaccgggaaaaaaaaaaattaaaaaaaaaaatttaggggaggaaaaatataaaaggccccaggaatataaaaacaaagggaatgcaactttataaaaaataatatggggcgggccggattttagagggaccaaggcttttctttcctccttccttggcggccttggttaattctttttttgggggcccctattttttaattctcttggccggtgtttttataccgcggttggggggaaaaaccctgggggctcccccaatttagccgttctggaaagatttccccttttggctggttgggttattgcgcattgggccggcccttttggcctttcctaaggggtggccaccctaatggggactgggacccccccctgtgcggtggctttagccccgggggttgtgtggtttccccgcttgggcccctttcctttttctacccccttagccccctttcttgggttttttttcggtttttttttg

SEQ ID NO: 81320 - DNA, 538 bp, Oryza sativa
  Clone ID: PAT_MRT4530_80859C.1
atgacgtcatcaccggcggcggctcagcacctcgcgctcgccggcgaacgacggtgcagcgccgcaaacggagggcatctacacatagacggcgacgcggcgaactcaccgagggctcggacgacgacggacggcaacggatggcaacggcggcgaggtcgaagcggtggaggcgttcgggtcgacgatgacggcaatgccccggcggtcttcggtggaaacagaggacgggacgaggacggcgacgacttggcgatcccgacggcggccttcccgaggtgctacgagcggcgagaagataaggcgagggtggcggcggacggaggaggtctcggaggtccttatataggggctagggggcggcggtggaggcccacggtggccggcggcggcgatggaagcggcttgcgcgcgctagggcgcggctacggcgagaggaggaagacggccctgatagggagttcaaagcagaagccagtggcccagcctgtgaatcggcctagaagggagaagcagcccaactcccgtttccctgcaa

SEQ ID NO: 81321 - DNA, 1371 bp, Oryza sativa
  Clone ID: PAT_MRT4530_8085C.1
atggtcgccgccgccgtcggcgaggcgacccctccgccgggcgggccaccctcccgcgtgtccgtgtcctcttcttcgtccaccccgcggcgccggtgcgccgccctcacgagccgcttccgcgagccggcgagcccgcggcggcacgcgtgggtgtcgctgcagggccgcctcgtcggcgccgaggaggcgacgtccgccgcctcggccgcgccggggctccctccggatgaggcggtggcgtgggagctcttcagcccgctccaccgcgtgctcctggtcgccaccgtcgcggctgcctcctcccgctcccacgaggcccgccgcgtcgagcaactccagcgatcgattcatattagggatgaggtgcttcaaagcatgcagcagaagcttgatgatctgtttgacgagatgaactccctgcaacagcagtatgtcaagtgcaacaccttcatttcctcggagcagggaaaatctgagttggtgggtagcaagaaggtaggagattatgacggagctagatgctgtgcgtgtgcaaagccagagattgctgctactcctcacaagacaaaggatatctgtggaatggacgatgcaaaatctgatgttgttgataggtccagcgtgagtcatatggaccatgaagagcgccgaatgtcagacctctcagacttttgctggagtgttgtgtcatcggtggataatcatgtaaatggggacaatcagctaagttccctggcggcagaacaggaattgtacaaccttcagaaagaatgcgaagagaaggatgcaatcataaaggaactggctgcaactgcacatacatctagcactgctgatgccaagagaatagcagagctgcaagaaattcttaaaagaaaaaacatggtgatatctaaactgaagaaggacatgtcagctttaaagcagatggttgttgaattaacaagggctaaaagaacatcttctgtcaatttaagtactagctgctctgaactgccagtgatgtcaagtaatgttctttatgatatgagcagcactagcccatcatcatcggattctgagtctcctgtagcaccaagagaataccttgatgatcatcttaaggttgatgatggcattgctggagactctgaatacaagggtagttctagattctcaatggaaagcgcatgttttcccacaaaaaactcatcagctggcaagcttcggtcgactagtccattaaaagagaaccgtatagatccgaatgttgaaacaagtttggtcggtagacagaagcaacgtatatccaccaatggagactttaaaaggactagacggcaaagccagcaagactcaaggaacagagctacaaagagatggatgtag

SEQ ID NO: 81322 - DNA, 3028 bp, Oryza sativa
  Clone ID: PAT_MRT4530_80860C.1
acttcccaccacctctcgccgcttcgggcatcgtctctcccagcgccggccggaccgatggcggcggagccagcagcggccgaagccatggatgtcgaggcgccggcgcgaccaaccaccaccaccagcactgtatccacctcgaagggcaagtccccccacgacctcctcgcggagacccgcgcctccgtggaggaggtcgccgcccggatcctcgccatcaagaaggacgacgcccccagaaccgagctccgggagctcgtcgcccagatgtccctcctcctcatcacgcttcgccaggcgaacagggagatactgatggaggaggacagggtgaaggcggagacggaggcggcgaaggcgcccgtggactccacgacgctgcagctgcacaaccttctgtacgagaagaaccactacgtgaaggccattagggcgtgcctcgacttccagaccaagtacccgggcatagagctcgtgccgacggaggagttccaccgcgccgcgccggcggacatccgcgataagacgctcgctgctgacgcgtcccacgacctcatgctcaagcgcctcaatttcgagctagtccagcggaaagagctatgcaagctacatgagaaattggagcagcggaagagcagtttgttggacacaattgcaaatcagaaaaagttcctttcgagcctcccaacccatttgaaatcactgaagaaagcatcattgccagtgcagcagcagctggggatgcaacataccaagaaactaaagcagcatcatgcagctgaactgcttccaactcctctatatatagtttacacgcagtttttaggacagaaagaagcattcggagagaatattgaagtggagatcactggaagcacaaaggatgctcagatgtttgctcaacagcaagctaagcaggaaaatgctggcactttgtcaaatggtgataatagagtggatgacgatgcaattgatgatgaagaagatgctcaaagaagaaggtcaaggtcaagaaaaagtgttgtgaaggaagctagtaattcagtagtggcatatcaacttcatccccttaaagttattctccatgtatacgacactgaagagtctggagcaaagcgtcgtaagctcatggtcctgagattcgactacttggcaaagttgaacgttgtttgtgttggaattgaagattcaaaggggctggaccatgatatcctatgcaacttatttccagatgacactggtttagagttgcctcatcagatggctaaactttatgctggggaggttccgaacttcagtgaaaaggattcaaggccatacaagtgggcacaacatctagctggtatagatttcttgccagaagtgcctctatctgttggtgatgattctaacagagcatcgagaagtgcggacttgtcatctgggcttgctttataccgtcagcagaatcgtgcacagactattttgcagagaatccgctcacggaaggttgcacagatggctcttacgtggcagcttgattatttaactaagctgaagtggcctcaaattgaacacgagaatgcaccatgggcatcacgtaccccattgtgtagtctgcatagctggtcatttactgggatatttcctgagccagcacctcgttctcctttgatggttgttggggctgcaggaagtgttgacagtgatatggagcgaagatctgtgacgcattgggaagaaactgagagtaccagggaggatggggagcttctggccgtggttcctgctgaaaacacgccaagtgtttctaaaatatcacactctgaagtgtcaccggaggttcgaaaccattctagaggcttatccctgatatcaaagagcgccacaccatctaaactaagcatctcacacagttttggtagaaatgaggacgatcttgatctcttgatgtatagtgacagtgagttagaggaacagacatttgttgaccaagaagtggaaaaagtcaaccttgctacagacaaatcctgggaggactatgcttccagggagtttaccctggtcttgagtaaaactctgaagaatggtccaaaagtaatgctggaagccaagattgcgatcagcatggaatatcctgttaggccaccttttttcacattgcaattgctttcgggaaagactgaagctttaaaatggcacaatgatcttagagcaatggaagctgaggtgaatcttcacatccttcaggttgtaccttcgtcatatgaggactacatacttactcaccaaattctgtgcctggctatgttatttgatatgcattttgatgaggatcatggtaaaagaaagttagtggaaccatgcttaccagatcagtcaggggaagagaccgcagacagactatttattggcgcagcgctgattgttcttctagttgtttatagagtatgcataatgctggccctactgaatcaagcatctcgtctcattttgaggaaattggatgctgacagtgacagtctttcattccttcccgccacggagaaagttgcctaacatggattcatggttattcctactggcttgacatagatgatgagctttttccttttcttttgtttgctggagagatgcttcgctgttgtgatactgatgagattatctaactaccctgactgtagccaatggagtgttgtcgggcttgtgtatgaggattttttttttttttgggtgggggtgggtaagagccaatgcaagatatccacttttttcacggtcatcatcagaagatatgtaaccgtacaacattctaaaactcttgttgcatcctgtattcttccagcacgttttgggaagccttcagcattaagcaaaagaacagcttgcaccaagtatagcttgcgtgccaagggtgatcagacttgtatgtgacttgagtcatctgatgtttcatcacttgggtgacatctgtgaggtaatgcattgctcgtcctgagtcctgacccaaaaaaaaaaaaaaaaaaacaaaaaaaaaaaaaaaaaa

SEQ ID NO: 81323 - DNA, 306 bp, Oryza sativa
  Clone ID: PAT_MRT4530_80861C.1
gacaatgccaccagacaggccctccatcccaggcgagtagacatttcttagctgcactgaacatcagtctcacatgaggaatacacaagcgcaagcgaaaaatgcacaccacttcatccatcaaagcttgactcaacaataagatcgtctaacaatcaattgccatggataataataatccatcacacttagataaacccatttagcaattcactatcagcaaacatccagtatggtcaggccaacttcaaaggaacatactttatgggtgaacatcttcgtcttctctcaaagccccatccagat

SEQ ID NO: 81324 - DNA, 1482 bp, Oryza sativa
  Clone ID: PAT_MRT4530_80862C.1
atgtcgactgaatcaactcaatcctccacctcctcaggctccagtggtgtttcctctgccagcaccaccagcgattcctccattgtcgactactgccagaagatgaagactgccactgacgcccttcgcgatgtcggccacgccgtctctgagtcccaactcgtcctcaaccttcttcgaggcctcaatgacgacttctccaacaccgccgacaacatcgcagctacggacgtcctcctgagcttcacatcggcatgcaacaccctcctgttgaaggagctgcgcatcacgaacgcggccaaggtggccgcggcgacagcgctggttgcaagcgccacctctggctcctcttgccctctcggcggcaacgcctcttccggtggcggcggcctctctagaggtgggggcagtggcagcgcacgcgacggtgggagtggtgtcggcggctggactggaggcggcggctcctctggcggccgcggtggcggcaccaacaaccgccgcaactgcaatggcaacggcggccgcagtggcggtggcttgaccgacagcggcggcggcggcggctggaccggaggcgggaatgggggaggcggcagtgggggtggaggcggcgcacgcggctcctctggagggggtggtggcggcggctgggctgggggtggtggcggccagggaaaccctagctggcggccggctgggccttggggactccctctagcggtcactccatcctcggaggtggagcaaccgcgacctctcaaggtggctccctcctcggaggttgagcgaccgcgaccccatacggtggctccctccacagaggttgagcaaccgtacattcccctcttcggccgacgcttgccggacgacacagtcaccgcggccagctgcgccccaacggctggcacaccgttggtcggcgcctcctcgaccggtgttgccccatcggccgctacccatgccaccgcctctcctgttccggccaactatcgcagtgtgttggctgatcccaactggtgcactgccatggccgacgagtacaaggtagtccgtggatactcccagcagcacgacatcgactacgacgagacatttagcccggttgtcaagccagccacaatacgggttgttctcagcatcgctgcctcccgtgcttggccgattcatcagctagatgtgaagaacacatttcttcatggtcacctaaaggagatcgtctactgtcagcaaccctccgggtttgttgatcctgctgcccctgatgctgtctgtctattgccgaagtccctgtacggtctcaagcaggctcctcgtgcatggtaccagcggtttgctaggtatattcaacagatgggttttatgccttcagcatccaatacatctctctttgtttacaaagatggagatcacattgcctatcttctgctgtacgtcgatgacattatcctcaccgcttcgaccacgacattacttcagtaa

SEQ ID NO: 81325 - DNA, 408 bp, Oryza sativa
  unsure (1)..(408): unsure at all n locations
  Clone ID: PAT_MRT4530_80863C.1
tcccgatcgaccacgcgtccagcgtgcgagcactgatcgtgctgcattccatagccactacctccgctaatgacacatcgacgcatcgcccataccatagaatggaaggaatactatgggcaagctacaaaatggccggtgctctaacancattcaaatccagtggggaacgaaaactatcttcacctttatgaacttggtcgcttggtcgtaaccgagcacaacaagaaaggcaattctttgttggagttcgagaagcttgtgagtttgaagcaacaagttgtttcttgcacttttttctattttacaatttacgtgaatgaaggggatgccaagaagctttattaagcttaggttttgggagaaaccattgatggacttcaagtgtcttcaggagttcaagcctgt

SEQ ID NO: 81326 - DNA, 384 bp, Oryza sativa
  Clone ID: PAT_MRT4530_80864C.1
atgccggcatcggaaatgaacgaggagaagcacaaaactcagatcgcaccgtgcgtgaagccttgggagttgggagtcagcggcgcacggcgctcggcgctccacccgcaggaggaggccgtgcgaaggaggtcgttggtggagcggcggagggccacgatcggagctgaggggcagagcagtggcgggctgcaggtggctcttctcctcccactggccggtgccccgcaccgctccgcccggaaccgcgacttctctcccgcttggctctaccgttcctctcccgcctcgacgagggagtccggcgaggccggcaaggaggtggctgatccgcccgcttccgcccctctgctccgggcgtatatagaggagaagagggagtag

SEQ ID NO: 81327 - DNA, 384 bp, Oryza sativa
  Clone ID: PAT_MRT4530_80865C.1
gcccgcgttctcagtgtctcgctggcgcgcgagcggttcctacaacttcgcttcttctcggcggggctacgccccttctccatacgcctcccgtcccccgccggcgccgtaaccagatgccacttgtgggcaccagcaatgactgatgaccgtcccgttctcctgacgcacggcttcggcgcctacactcacgtggcagtgggcgtactacctccggccgctcctcgacgacggcttcgaccccatcgtccccgacctgctattcttcggcgactcctgcacgctcgccgccgaccagatccgaggtgttccaggcgacggccgtcaaggccggcatggacgccatcggggtgaggcggttcgacgtggacggcatcagctacc

SEQ ID NO: 81328 - DNA, 366 bp, Oryza sativa
  Clone ID: PAT_MRT4530_80866C.1
atgccggcatcggaaatgaacgaggagaagcacaaaactcagatcgcaccgtgcgtgaagccttgggagttgggagtcagcggcgcacggcgctcggcgctccacccgcaggaggaggccgtgcgaaggaggtttgcttctcggtgcgcacggccacggagcgtaaaaagtggcgtccgtgccgccgcccgctcacgtggctcttctcctcccactggccggtgccccgcaccgctccgcccggaaccgcgacttctctcccgcttggctctaccgttcctctcccgcctcgacgaggtggacgaccgcgacgatgtccttcttatccgctcgccccactccgcccgcggcccgtcgccactctga

SEQ ID NO: 81329 - DNA, 260 bp, Oryza sativa
  Clone ID: PAT_MRT4530_80867C.1
atggaaccgacgcgccgttgcgtccccggccatctcgccaccgccgccgccgccgccgccgcctcgccgttctccccgccgccgtcgctgccgctgccgtccgcgctcatgccccccaagaagcgccgccttttcacgcccgccccttgccacgccgccaccccgacaccaccaccaccttatcctattcgcgcttgttggcacttctaccatttttgtttgtctgtgaactgcgtagggggctttgtgctgtgtttgcg

SEQ ID NO: 81330 - DNA, 114 bp, Oryza sativa
  Clone ID: PAT_MRT4530_80868C.1
acgaccgcacatgcgatctgccaagtatcgcggagtgatggatgaagagatgatccatggctctcacatgcacggctgtaggattgctgatgtcatctcaacttccatgctatg

SEQ ID NO: 81331 - DNA, 606 bp, Oryza sativa
  unsure (1)..(606): unsure at all n locations
  Clone ID: PAT_MRT4530_80869C.1
ctcgatatcatctaaatctctctcgatctcaatttcgcaaaatggctgacaagaagatcagaatcggaatcaacggtttcggaagaatcggtcgtttggttgctagagttgttcttcagagggatgatgttgagctcgtcgctgttaacgatcctttcatcaccaccgagtacatgacatacatgtttaagtatgacagtgttcacggtcagtggaagcaccatgagcttaaggtgaaggatgacaaaactcttctcttcggtgagaagccagtcactgttttcggcatcaggaaccctgaggacatcccatggggtgaggctggagctgactttgttgttgagtctactggtgtcttcactgacaaagacaaggctgctgctcacttgaagggtggtgctaaaaaggttgtcatctctgccccaagcaaagatgcgcccatgttcgttgttggtgtcaacgagcacgagtacaagtctgaccttgacattgtttccaacgctagttgcaccactaactgccttgctcctcttgccaaggttattaatgacaggtttggcattgttgagggactcatgaccactgtncactctatcactgctactc

SEQ ID NO: 81332 - DNA, 2925 bp, Oryza sativa
  Clone ID: PAT_MRT4530_8086C.1
tttttttttttttttgtttataaattataacccatttagtggattgaagtcacaaatatgagtttgactttgacaaaacaaagttatgaaatctcctatccaaatcaccccttcctcgcatcattcgctctctcttcatttgagggagagagacggcgcttttgccgtcctcaatctctcaaccaagaccgagatcgtccggtgcaatagctccggtgatatctacctattttcgattgatgcttttacttccatggcctccgctcgtgccttcatcaccactgagtccaccaccgacttttggcatcgcttctcgggcaccttggccatgacgccctctcttgcttggtgcaggcttctgttatccctccacctaaaggctccaccccagtgtgtcatgcttgccaactcggtcgacatgttcatcttccttttactacttcttttactagagctttagcaaagttggagttagttcattgtgatttgtgagcatcacctattccaagtgttgctggttttaaatactacctcgtcattcttgatgatttttctcattatgtgtggatgttccccctccgccttaaatcaggaacttttgatactatctcacatttatttgcctttgtcaaaacccaattctcggtcaccatttgcaacatttagtgtgacaacgccagtgagttgacaatctcaccgcccgcaccttctttctcaccaatggtgttcatatgcgaatgttgtgcccacaaaacggtaaggctgagcgtatgcttcgttccatcaacaacatagttcgctccttgctctttcaagctagcctttctgctccgtattgggtcgaggccctccacactgccactcacctcatcaaccaacaccgcaccaagactctccaccaccacacaccgttctttgccctcttcggtgcaaaccctagctacacacatccccgagtcttcgattgcaagtgctatcccagcctttccgccactactctgcacaagctagcccctcgctcctccctgtgtgtttttctaggctatccgctccatcattaagggtatcggtgtcttgatcttgccacctacaaggtcatttttttcacgtcatgtggtgtttgatgagtactcgtttccatttgctgaattaaccaataattcaattgctcctgctttggactttcttgaagacttttcagcatcactaccagccctcatcggtcatccatgctctggcccaaccggcccggcgatgcgcacggcttcctctagcgatcgggatggcgcacaggccgcctccttcagcaatcgggccgcctcaacggtcatctctagcaagcgcgcgcgtggggcatgtgggctggaagtgcgcgccggcagcgcgcgcgcgaattagcattctcgcccctactgggtcgtagtcgcctgaccgcccaaccagacgctcgttggctcctccccgacatcgacatcctcgtccacatgctcacggttaccgacgacgcttccaacactagctccgctagcgcctccacccagcggctcgcagtgcacgagtccctagcgtgcacatcctagagccaactgggcatctccccggttgtcaacactcacggcttgactactcgcggcaagaatggaatctatcctggtttaccaccacaaccccaatgtcaccactctctccctggttccttgcacctaccgggccgccctggggatcgaccatggaagaggagttcactgcgttgcaagccaactgcacctgggaattggttccttgtcctaccagctccaacgtcgtcaccggtaaatggatatttcggcataagttttgatccgatggcggtctggacaggtataaggctcgctgggttttacatggcttcacccagcgccctggcattgacttcgatgagacgtttatcccggttgtcaaaccgtccactgttcgcacagtcctcagtctcacagtttctcgccactgcccactggcatgttgactaacttgatgtgaagaatgcattcttgcatggcaagcttcaagagacagtttagtgtactcaaccatcaggttttgtgtatcccaccaagccacacctggtatgtcgtcttaatgagtccctctacggccccaaggaggccccccgtgtgtggaacaatcgatttgccagctacttgctcacacttgggttcactgaagccaaatccaacatatttttgttcatttatcgttgcggctctgatttggtttacctgctgctctatgtggatgacattgttttgactgcgtcttcagatattctgcttcgttggactatccaagcattgcaatctgcgttctctatgaaggacctttgcattttacatcactttctggggatttctgttactcaacgcggcactgggcttcttttgagtcagcgtcagtacaacattgagattcttgagcgtgctggcatgtccgactgcaagccttgttccacacctgttgatcccaatgccaagttgtcctcctctgatggctcacctgttgctgatcctactgattaccgcaatcttgctggcacactacagtaattgaccttcacacagcctgatatctcctatgttgtttagcaagtatgtctccacatgcatgatcccagggattctcaccttgctgctctcaaacgtattctccggtatgtccgtggcacgcttgactatggtcttcatgttcagcactcttctacggctaacttggttgcctactctgatgctgactgggctggttgtcctgacactcgcaagtccacctcgggctatgccgtgttcctgggggataaccttgtttcttggtcctccaagcgtcaacacactgtttcccgttccagtgccgaagcggaacgtaaaggactcaaaaattatttgttagaaggag

SEQ ID NO: 81333 - DNA, 117 bp, Oryza sativa
  Clone ID: PAT_MRT4530_80870C.1
atgagtgttgtcaacgacggcaagtcccccaggcatgattccaaggacctcaaagtctcgcatccagaaatagctagacattatcctcctgttcatcccatacagacttcaacttag

SEQ ID NO: 81334 - DNA, 254 bp, Oryza sativa
  unsure (1)..(254): unsure at all n locations
  Clone ID: PAT_MRT4530_80871C.1
aatcgccttctgaaagtgaagagccacgcaaaggccagggcaaggacgctaatatactacaccaccagtactactactactaccaccaccactgctgcagctgcagctgaagctgattgcataaaaaaaaatcccagttttttttcncctgctctctgctgatccctcctgctgctgatattggaattggacagagctagctaaggggagcccaaacccaacaaagctttgcagcaaaaggtcgctgttgctct

SEQ ID NO: 81335 - DNA, 141 bp, Oryza sativa
  Clone ID: PAT_MRT4530_80872C.1
atggtggtgcccgatggtggatccggcggcaggggagtgaacttctgtgatgtatgcggcagcgtcgagctcagcgtggcagctacgggtgcaacgaggaagaggtcggtgaggcacgcggtcacctctatcctccactga

SEQ ID NO: 81336 - DNA, 726 bp, Oryza sativa
  Clone ID: PAT_MRT4530_80873C.1
atctgatgaggacgaatgcctgcgtctgcttcttgctttcgtggttccgcgtgctgcgctgctgttgctcgcattggtgctcggtgtggcttattgcccatgccgtctttgctccccttgaaaagaacagatgtactattccttggtaatctataggaagggattgtctttttcgtttttagttcggaatttcgcctaaaccaaagaaatacaaatgatcttgggcaataatatctgatcatatacgtattccaataaggaaggaggattttcaatgcgggatataaaaacatatctctctgtagcacccgtgctaagtactctatggtttggggctttagcaggtttattgatagaaattaatcgtttatttccagatgctttgtcattcccctttttttcattctagttgttgctatgtgaggaatagagttcttcgtgacatgataaaaaattcccacttttcaatccctttttagtataggaaagaaaaaaaaaaaaaaaatagattgggttggaccttagagtcatgaaaaatttggtaaatctcatttttgaaaaaagaaattcaattaaaagcagtatccaagctaagtcaggcctcagaaatcagagcatagaaagaggctgggttggctactaaaatgaaaggattttgcttcaaaatccttgctaatttgacaaggattgtattccttaattatttctctattttttattacttaa

SEQ ID NO: 81337 - DNA, 159 bp, Oryza sativa
  Clone ID: PAT_MRT4530_80874C.1
attattattattattttactccaaacaccccacaagtgcgcacaattacactcgaaacccccgattggacaaactgaaagagagtctaccacgcacgcgtgcaagctcttttacctcgaaaacaatttgccccaacggccacccgaccaggaccctgca

SEQ ID NO: 81338 - DNA, 120 bp, Oryza sativa
  unsure (1)..(120): unsure at all n locations
  Clone ID: PAT_MRT4530_80875C.1
catttcttaccttccaagcaccaccaatcttgtccgatgcgagcaagcttaaccggggcttttcagagctaaaccaaatttcgtgccattttcatnaataccacancatggggggggggg

SEQ ID NO: 81339 - DNA, 273 bp, Oryza sativa
  unsure (1)..(273): unsure at all n locations
  Clone ID: PAT_MRT4530_80876C.1
cgtccggtggtgctgcttctagttctcgccgtgctgccgtcccgggcggccggggtgacgtgacggccgcgctcgcggctttccccagcttcgccgacttcgcgcggctactggagtagagccaggtggacggagagctggcgagagcggcatctgctactacagcaacaagtgctcagccgatggagtgagtacgtaaggcaacagtatagcataatgacaaccccattatggcaaccatctacatttcaattgataaacaaccaanacatg

SEQ ID NO: 81340 - DNA, 400 bp, Oryza sativa
  Clone ID: PAT_MRT4530_80877C.1
ctatcatgcagctccggaatactaaagtacactgctgggggttaaccatacaatgttttgacaaaaatcagtccctgtaattaaattccatgagtgtaaacatgtgggttcatgcaatttccaaaaactaatactgatgcgtcatgcctttcgatttcctggttaccgaagttcaatgtctttttttcaaccatagtggtcgcatctcgcatgtcttcacacgaagttgcactgtttcatttttcttgtcagaagctccagcagatctgcagactttcagatggagtatattgtgaataccaataagaaagtgttcaagggtggcacaacatcaacattgtatttcaaagtttggtctcaatccctgcactataaatttggtggtttcggtagcttagta

SEQ ID NO: 81341 - DNA, 570 bp, Oryza sativa
  Clone ID: PAT_MRT4530_80878C.1
aggcgcccgctgtcgcctccgtccagcccccaccgtcgcgggcctccctctccggcgggcgcgcctcggtcgacgaggaggcgcgccgcaccatctcagatcccaagctttcaaggttactcaaggatccaatgttcggtggaagtggaccgctcaagttgttgtaagacaagtccctgcatatgatcaaaatagattcatcagcatggaacaaggcaaaagcttgcccaaacagattcagcaccattaagcaagatccatgttttcaggtcttgtttatagcactggaaagcttagcacgaatttgacaagatagtagcacatacaggtactgtaattctgacaatgactgtatgtcacctgaaagtgatccggacaatccaaaacttgacagccttctgcaaaccatccgagaaaaaagagagagagaaaatcattagttgaaacatagaggaaacaacatgttgattccacaaagtataagaaagggcaaaggggagaaagatcatgttgatttggctaaaatggttcttacattgaggtgacacgattctgggtgcagtacactcc

SEQ ID NO: 81342 - DNA, 327 bp, Oryza sativa
  Clone ID: PAT_MRT4530_80879C.1
atggcattccggggccccgccccgatggacccgcggggtgaaatttgcactccccccccccccccgcgcccccgtaggggggccgtcgctgctcccctcgagactgcaccgttgctccaccatgagaccgggccggcgtcggggccaccacccagccgccgcgtgctccccctcgaggtgacgaacctgccgctggcggtggacccggccgtcatcaacctccgcgaggatggttacaaatgccgcgcgcgcgaaagacagcaagtggccgactctggagctgtggtggagtggtcacagtgcttgcgcggtaaaagtggcggttga

SEQ ID NO: 81343 - DNA, 240 bp, Oryza sativa
  Clone ID: PAT_MRT4530_8087C.1
atggctggccaatggtggccggcggcggttgaggcgaagacgttgcttcgggcctcgctgccagacgctgggcagtaccttagccagcaaggaggtgttcacctgggccaagagcaacaaccgggggctactccacgtcggcgacataaacataaagccaaatttgcatctggatactatcgttcaccttcacgcatgatagcccaatttgcattgatgggttgcacagccagtttgtga

SEQ ID NO: 81344 - DNA, 331 bp, Oryza sativa
  Clone ID: PAT_MRT4530_80880C.1
acgctatcaggcgggcatggagcggagaggcagcttcctacaggacggcactggcgtcgacctcctgcttgttgcatcagtgcacgggccgagtcggagcgcgcgtctcctctgcgtccccgagaacacggaccaacctgatgttttgcggcgcccagaactaggactactccgacgagtgacgccgggcggggctcgcactgctggccccagcgacggcggctacggggatgaaggtgacgccctccgacagggcctaacgaaaggcgggttacttgtttacaaagcccaggactaacacggggttaatcggctacagcggaaaggggtt

SEQ ID NO: 81345 - DNA, 1424 bp, Oryza sativa
  Clone ID: PAT_MRT4530_80881C.1
gcccctgccgccgggggcgcgcccgggcgcggcggcgggggcccggcgggcgtccccgccggcggtcgggcgggcgcgccgcccggcgggggggccgacgcggcggccggcctcggcgccaggaccatcgggccgacacctgcctgatactaagtttcttttctttcactgccttcgttctctgcacgttcgtagatcgaccaggaattcgcgatggttgcgctctccaagttagtgctgatcactgcagtggcgctgctgggctgggcgtacaaggtcgcgcggccgccgccgccgccgatcttgggcggtccgggagggccaccggtctcctctccgagagtccagctcaaggacggccggcacctggcctacagggaagccggggtcggcagggagatcgccaagtacaagatcattttctcccatggcttcgcctccaccaaggaatccgacttcccggtgtcccaagagctggcagaggagctggggatttacctgctgtacttcgacagggctgggtatggcgacagcgacgccaacccgaagcgggggctgaagagcgacgccacggacgtcgaggagctcgccgacaagctgcagctcggggagaagttctatgtggttgggacttccatgggcggctacgttgcgtggagctgcctcaactacatcccttacaggctggccggcgtggcgctggtcgtgccggcggtgaactactggtggccgatgcccgccagtgtgtcggccagtgcgtaccgcaagctggacgtcggggaccggaggacgttctggatcgcgcaccacatgccttggctgttctacgcctggttcaatcaaaagtggttcaggatctcaccgatcgtggaggggaagcccgaggctttcactgaaaaggactgggagatcctagctgagattcagagaactggccaattggacagggggagggcgacgaagcagggagcctaccactcgctgtgccgcgacgcgacgatcctgttcggggcgtgggagttcgacccgacggcgatcgagaacccgttccccaacggggacggcgtcgtcagcatctggcaagggcgcgaggacaagatcgtgcgggtggaggcgcagcgctacgtggcggagaagctcccgtgggtacggtaccacgagcaccccgagggcggccacctcttcatgtgcgccgacgggttgggcgacaagatcgtccgggagctcctgctcggcgaggagccgcgagatttgtagacagatcgagttcgtgtcctgtttcgctacacagagaggggaacacaaactcacagattggggaggaatataggtccaagcggtgcttgtagttgttgatggaataaacctccgatttgctaaactagaaaatcgaacttaaaaaaaaaaaaaaaaaaaaaaaaaaa

SEQ ID NO: 81346 - DNA, 3054 bp, Oryza sativa
  Clone ID: PAT_MRT4530_80882C.1
atggagaagcttgacaggtacctgcaggagcacttcgatgtgccggccaagaacccgtcggaggaggcgcagcggcgatggcggcaagccgttggcaccatcgtcaagaaccgccgccgccgcttccgctgggtgcccgacctcgaccgccgctccttggacaaggccaaggtccgctccacccaggaaaagattcgggttgccctctatgtgcagcaggctgcactcatttttagtgatgatgaactagcattgatcacaagcaagcatgattcgaaagctttaaagatgcatggtggggtagatgggatatctaaaaaagtccgttcatcgtttgatcatggcatatgtgctagtgacttagatacaagacagaacatatatggcgtcaaccgttatgcagaaaagccttcaagaagtttctggatgtttgtttgggatgcattccaggacatgacccttataattcttatggtatgtgcattgctatctgttgcagttggtttggcaacagaaggatggccaaagggcatgtatgatggcttgggtataatactcagcattttcttagttgttatggttactgctgttagtgattataagcagtcactccaatttaaggagctagacaatgaaaagaaaaagatatttatccatgtaaccagagatgggcgtcgacaaaagatctctatatatgacttggtagttggtgatatagttcatctgtcaattggagatcaagtacctgctgatggactatatatacatgggtactcccttttgattgatgagtccagcttatctggtgagagtgacccagtgtatgtttctcaagacaaaccattcatcttggcaggaactaaagtgcaagatggatctgctaagatgatagtaactgctgtcggtatgcgcactgaatggggaaaattgatgagcacattgagtgagggaggagaggatgagacaccactgcaggttaagctaaatggagttgcgaccgttataggaaagattggactggtatttgccatattaacatttttagttctgctggttagattcctcattgacaaaggcatgacggttggtctgctcaaatggtattctaccgatgcattgactatagtaaactactttgcaacagcggtaaccattatagttgttgctgtacctgaaggattacccttggctgttactttgagtcttgcatttgcaatgaaaaagttaatgaatgataaagcacttgttagacatctttcagcgtgcgaaacaatgggatctgctggtaccatctgcacggacaaaacaggaactttgactactaactatatggttgttgacaaaatatggatatctgaggtttcaaagtcagttaccagtaacaccatttcaggagaacttaattctgtggtttcttctagaacattgagtctgcttttgcagggaatttttgagaatactagcgctgaggtggtcaaggaaaaggatggcaagcaaactgtcttaggaactccaacagaaagagcaatattagaatttggcttgggcttggaaggagttcatgatgctgagtatagtgcctgcaccaaggttaaggttgagcctttcaattcagtcaagaagaagatggcagtgctgatttcattacccagtggcacgtccagatggttttgcaaaggtgcatcagaaattattttgcagatgtgcgacatgatggttgatggcgatggaaatgctattcccttatcggaagctcagagaaagaacatcttagatactatcaactcatttgcttcagatgctttaaggacgttgtgcctggcatataaggaagtggatgatgatattgatgacaatgcagatagtccaacaagtggttttactctaatagccattttcggtatcaaggatcctgtgcgccctggagttaaggatgctgttaagacctgtatgtctgctggtatcacagtaagaatggtaactggtgataatataaatacagctaaagctatagctaaagagtgtggaatattgactgaagatggtgtagcaatagaaggaccagaattccatagcaagagcccagaagagatgagggacctgataccgaatattcaggttatggcccgttctttaccattggataaacatacactcgtgacaaacttgcgaggtatgtttgatgaggtggtttctgtgacaggtgatggtacaaatgatgctcctgcattacacgaagcagatatcgggcttgctatgggcattgcaggaacagaggttgccaaggagagtgcagatgtcatagtacttgacgacaatttcactactataataaatgttgcaagatggggtcgtgcagtttatattaacatccaaaagtttgtgcagtttcaattgactgtcaatattgttgctttagttatcaattttgtctcagcatgcatcacagggagcgctcctctcactgctgtgcagctattgtgggtcaatatgatcatggatacactgggagctttagcactagcaacagagcctccaaatgatgaaatgatgaagaggccacctgtccgaaaaggggaaagtttcattaccaaggtcatgtggagaaatatcatgggccaaagtttgtatcagctatttgtacttggagctctcatgtttggtggagaaagccttctgaacatcaagggtgcagattccaaatccatcataaatacactgatcttcaactccttcgtgttttgtcaggtattcaatgaaataaacagcagagaaatgcagaagatcaatgttttccgtggtatcatcagcaattggatcttcattgcagtcatagctgcaaccgtagcatttcaagtggtgatcatagagtttcttggcactttcgccagtactgttccgctcaactggcaacattggctgctcagcgtcggccttggctccatcagcctgattgttggtgtcatcttgaagtgtataccagttggttcaggtgaaacctctgcaactccaaatggatacaggccacttgccaatggccctgatgacatatag

SEQ ID NO: 81347 - DNA, 337 bp, Oryza sativa
  Clone ID: PAT_MRT4530_80883C.1
atgggtacttttgtaggcggaccacgcctcgcctcctcctcctgccgccgcgccttccccctcgccctctacttcggccgacgccgcctcccctcctcctcctccggacgccgtgccgcccctcctcctacttcggctgtcactcctctttccccatcggcggcggcgctcctacggttgggcatggccgacgagctttccgtcctcttcgctggatgggatccggccagacgtagagcggtggcggtggcagtaggggtgttcgctcgccgaagccacgccgcgcgaggacggtggccggagttgagggtggtggctggagttgaagaagacgaag

SEQ ID NO: 81348 - DNA, 1768 bp, Oryza sativa
  Clone ID: PAT_MRT4530_80884C.1
attcctcattgacaaaggcatgacggttggtctgctcaaatggtattctaccgatgcattgactatagtaaactactttgcaacagcggtaaccattatagttgttgctgtacctgaaggattacccttggctgttactttgagtcttgcatttgcaatgaaaaagttaatgaatgataaagcacttgttagacatctttcagcgtgcgaaacaatgggatctgctggtaccatctgcacggacaaaacaggaactttgactactaactatatggttgttgacaaaatatggatatctgagggaatttttgagaatactagcgctgaggtggtcaaggaaaaggatggcaagcaaactgtcttaggaactccaacagaaagagcaatattagaatttggcttgggcttggaaggagttcatgatgctgagtatagtgcctgcaccaagatgtgcgacatgatggttgatggcgatggaaatgctattcccttatcggaagctcagagaaagaacatcttagatactatcaactcatttgcttcagatgctttaaggacgttgtgcctggcatataaggaagtggatgatgatattgatgacaatgcagatagtccaacaagtggttttactctaatagccattttcggtatcaaggatcctgtgcgccctggagttaaggatgctgttaagacctgtatgtctgctggtatcacagtaagaatggtaactggtgataatataaatacagctaaagctatagctaaagagtgtggaatattgactgaagatggtgtagcaatagaaggaccagaattccatagcaagagcccagaagagatgagggacctgataccgaatattcaggttatggcccgttctttaccattggataaacatacactcgtgacaaacttgcgaggtatgtttgatgaggtggtttctgtgacaggtgatggtacaaatgatgctcctgcattacacgaagcagatatcgggcttgctatgggcattgcaggaacagaggttgccaaggagagtgcagatgtcatagtacttgacgacaatttcactactataataaatgttgcaagatggggtcgtgcagtttatattaacatccaaaagtttgtgcagtttcaattgactgtcaatattgttgctttagttatcaattttgtctcagcatgcatcacagggagcgctcctctcactgctgtgcagctattgtgggtcaatatgatcatggatacactgggagctttagcactagcaacagagcctccaaatgatgaaatgatgaagaggccacctgtccgaaaaggggaaagtttcattaccaaggtcatgtggagaaatatcatgggccaaagtttgtatcagctatttgtacttggagctctcatgtttggtggagaaagccttctgaacatcaagggtgcagattccaaatccatcataaatacactgatcttcaactccttcgtgttttgtcagaagatcaatgttttccgtggtatcatcagcaattggatcttcattgcagtcatagctgcaaccgtagcatttcaagtggtgatcatagagtttcttggcactttcgccagtactgttccgctcaactggcaacattggctgctcagcgtcggccttggctccatcagcctgattgttggtgtcatcttgaagtgtataccagttggttcaggtgaaacctctgcaactccaaatggatacaggccacttgccaatggccctgatgacatatag

SEQ ID NO: 81349 - DNA, 3529 bp, Oryza sativa
  Clone ID: PAT_MRT4530_80885C.1
cttgtaaaagtttttgggaaaaggaaaaagtagttggaacgtaaagttcctaagattgagcgtggagtacaccaagggccccatattttttttttttttttccccttacgccccctcacccagttggcgccgatctccgggtaattgcccagagtgaatccaaaccaccaaccgtcataatgataatatgaattcactgatacaatgaagtctgaagttgaaagcagagtggtaagggtgcacatcagtaacgtgtgatgtagtaacaattacatgacaggagtttggcaaaatttgaacaaaatcagtggatggttagtgtattccaaaacaactgaactgagctgggcagctggatgctgtattgcaccctggattctactttcccttattagtgattactcttcagctatatgtcatcagggccattggcaagtggcctgtatccatttggagttgcagaggtttcacctgaaccaactggtatacacttcaagatgacaccaacaatcagactgatggagccaaggccgacgctgagcagccaatgttgccagttgagcggaacagtactggcgaaagtgccaagaaactctatgatcaccacttgaaatgctacggttgctgctatgactgcaatgaagatccaattgctgatgatgccacggaaaacattgatcttctgcatttctctgctgtttatttcattgaatacctgacaaaacacgaaggagttgaatatcagtgtatttatgatggatttggaatctgcacccttgatgttcagaagcctttccccaccaaacatgagagctccaagtacaaatagctgatataaactttgccccatgatatttctccacatgaacttggtaatgaaactttccccttttcggacaggtggcctcttcatcatttcatcatttggaggctctgttgctagtgctaaagctcccaatgtatccatgatcatattaacccacaatagctgcacagcagtgagaggagcgctccctatgatgcatgctgagacaaaattgatgactaaagcaacaatattgacagtcaactgaaactgcacaaacttttggatgttaatataaactgcacgaccccatcttgcaacatttattatagttgtgaaattatcgtcaagtactatgacatctgcactctccttggcaacctctgttcctgcaatgcccatagcaagcccaatatctgcttcgtgtaatgcaggagcatcatttgtaccatcacctgtcacagaaaccacctcatcaaacatacctcgcaagtttgtcacgagtgtatgcttatccaatggtaaagaacgggccatgacctgaatatttagtatcaggtccctcatctcttctgtgctcttgctatggaattctggtccttctattgctacaccatcttcagtcaatattccacactctttagctatagctttagctgtatttatattatcaccagttaccattcttactgtgataccagcagacatacaggtcttaacagcatccttaactccagggcgcacaggatccttgataccgaaaatggctattagagtaaaaccacttgttggactatctgcattgtcatcaatatcatcatccacttccttatatgccaggcacagcgtccttaaagcgtctgaagcaaatgagttgatagtatctaagatgttctttctctgagcttccgataagggaatagcatttccatcgccatcaaccatcatgtcgcacatctgcaaaataatttctgatgcacctttgcaaaaccatctggacgtgccattgggtaatgaaatcagcactgccatcttcttcttgactgaattgaaaggctcaaccttaaccttggtgcaggccctatactcagcatcatgatctcctttcaagcccaagccaaattctaatattgctctttctgttggagttcctaagacagtttgcttgccatccttttccttgaccacctcagcgctagtattctcaaaaattccctgcaaaagcagactcaatgtgctagaagaaaccacagaattaagttctcctgaaatggtgttactggtaactgactttgaaacctcagatatccatattttgtcaacaaccatatggttagtagtcaaagttcctgttttgtccgtgcagatggtaccagcagatcccattgtttcacacgctgaaagatgtctaacaagtgctttatcattcattaactttttcattgcaaatgcaagactcaaagtaacagccaagggcaatccttcaggtacagcaacaactataatggttactgctgttgcaaagtagtttactatagtcaatgcatcagtagaataccatttgagcaaaccaaccgtcatgcctttgtcaatgagaaatctaaccagcagaactaaaaatgttaatatggcaaataccagtccaatctttcctataatggtcgcaactccatttagcttaacctgcagtggtgtctcatcctctcctccctcactcaatgtgctcatcaattttccccattcagtgcgcataccgacagcagttactatcatcttagcagatccatcttgcactttagttcctgccaagatgaatggtttgtcttgagaaacatacactgggtcactctcaccagataagctggactcatcaatcaaaagggagtacccatgtatatacagtccatcagcaggtacttgatctccaattgacagatgaactatatcaccaactaccaagtcatatatagagatcttttgtcgacgcccatctctggttacatggataaatatctttttcttttcattgtctagctccttaaactgaagtgactgcttataatcactaacagcagtaaccataacaactaagaaaatgctgagtattatacccaagccatcatacatgccctttggccaaccttctgttgccaaaccaactgcaacagatagcaatgcacataccataagaattataagggtcatgtcctgcaatgcatcccaaacaaacatccagaaacttcttgaaggcttttctgcataacggttgacgccatatatgttttgtcttgtatctaactcactagcatatatgccatgatcaaatgatgaacgaacttttatagatatcccatctaccccaccatgcatctttaaagcttttgaatcatgcttgcttgtgatcaatgctagctcatctggattgatggcatatccagctttaataatatcccctgttagtttgtattctttctttttggcaccatcactaaaaatgagtgcagcctgttgcacatagagggcaacccgaatcttttcctgggtggagcggaccttggccttgtccaaggagcggcgctcgaggtcgggcacccagcggaagcggcggcggcgattcttgacgatggtgccgacggcttgccgccatcgccgctgcgcctcctcggacgggttcttggccggcacatcgaagttctcctgcaggtacctgtccagcttctccat

SEQ ID NO: 81350 - DNA, 2640 bp, Oryza sativa
  Clone ID: PAT_MRT4530_80886C.1
cttcctactaggctactactactcctcctcggctcaaccctcccgtcccctcacccccacgcgcgccgccttctccccagaacgcgccgcggcgaagcgccgccgaagcagcccccactcctccgcgcgcggcggcggcggcgcagtctccagacgcttcctcctccggggatctcgcctttgaatggaccgaagtgattccatggctgattcgccaaggaggcgtaatggccttctgcgggaccaggtccagttggtgaaaaggaaggacacaaatcgctacgaaatcgtccgctttcctgatccattgtcatttgagaaaggcttctttgttatgatccgtgcctgccagcttctggtgcagcacaatgaagggatgatttttgttggcgttgctggaccctctggggccgggaagactgtgtttactgagaaggtgctcaatttcatgcccggtgttgctgtgatatcaatggataactacaatgatgcaagtcgcatagttgatggcaattttgatgatccacgcctaacagactacgacacactgttggaaaatattcatggtctgaaggagggaagatcagttcaggttccaatatatgatttcaagatgagctgccggactggatacagaacagttgatgtccctagctctaggattgttatcattgaaggcatctatgcattgagtgaaaagttacgatctgtattggacctacgtgtttctgtcactggtggtgttcattttgacctggtgaagagggtcctgagggacatacagagagctggccaggagcctgaccaaataattcatcagatatctgaaacggtttatccgatgtataaggctttcattgagccagacttgcagacagcacatataaaaataatcaacaagttcaacccattctcagggttccaaaatcctatgtacattctaaagtctccacgaactataacacctactgacatcaaagttgctcttggtgaagatcatacagaaagcattgaagaaacttatgatatatatttgcttcctccaggcgaagatccagaatcatgccaatcttatttgagaatgaggaatagggaagggaaatataatctgatgtttgaggagtgggtgaccgataatccttttatcatatcaccaaggattacgtttgaagtcagtgttcgtcttcttggaggtttgatggcattgggatatactatagcagctatactgaagagaaagagtcgtgtgttttctgatggcaaggcaactgttaaaattgattggttggagcaacttaaccgaaattatatacaggtgcaaggaagagatagaaatcatgtcaaatttgtagcggagaagttaggtctggatggctcttatattccacgcacatatattgaacaaattcagctggagaaactgataaacgatgttatggcattaccagaagatctcaagacaaagctcagcattgatgatgagctggtttcaagtccaaaagaggccctttctcgggtttctgctgataagagaaacaaacacctgaaaagtggtctatctcattcatattcaactcatggagataaaaatattgtgaaattgagtaaattgacagaaaccaacagaaggtttggaagtgggcgagcccctgaacctcctgcaattaatcagggtgctatcactcagctatccgaacagatttcaacgttgaatgagaggatggacgagttcacctctcgagttgaagaactcaactgtaaatttgcaataaagaaatcatcgaccagtcagcaaaatttagctcttccaaatgaaacttgcaatggttctgcacctacaaatctctttgtttctcatttgggcaatggtaccctgatacctcattcgtcatcatcgaaccaacttttgaaggagtcccccattgtggatgagattaatgccatatcaagaggtcagcgccaagtgatacatcagcttgacaatctgaccagcttgcttcatgagcatttggccttgacccgccaaggaaatgcagtccgcagaaacgggatcctggaaatggacatgtccatctgcccactcattgccctgacaattggcggtttcggctatttggtgttcaagagcctcaaccggagctaaccgaagcgaatcaggcagcgacatgctgctttaaaaagctcaccaccaagttcaaccaagaaccagagaaagccaagaagtctcaaaacggatcttcattcttcagtactcagtccagacaccaaaccgatgttctcctgcgagctatagacggtcctcactcagatcattggtctcatggggaccatatctgatagattttacaatttcaagatagataaactcatataccagcacaagcaacagagcagtcttgatactcgggccaagttacttggaagcttaaaaactgtgtactaaagagcgtagagttatacaatatcgtctgtaatggatactggaaagcccccagtatcaataaattttggagacgctagtaatcccgatataatgtcgaacaagtcgtgggaaaagagcatagtcattttactggaaaaaaaaaaaaaaaaaactcgagactagttctctctctccctcgtgccgaattcctgcagccc

SEQ ID NO: 81351 - DNA, 150 bp, Oryza sativa
  unsure (1)..(150): unsure at all n locations
  Clone ID: PAT_MRT4530_80887C.1
atgaattgtgttggtgctgtaagagttgctcaagatttaggtccaggacatacaattgtgacaattctctgtgacagtgggatgaggcatctaaatcnttctatccagtccaaagaagacactgcnntntgccattctctggnnattgag

SEQ ID NO: 81352 - DNA, 3011 bp, Oryza sativa
  Clone ID: PAT_MRT4530_80888C.1
ggacggcgacgacaccgagttgcaccggcggatgatgtcctccgccgccgcgaacacctcctcctcctccgcctgatccccggcgcctcgccgccggcggtgccgccgtgtagttcctccagtcgcggaggacggcggcgaggtcgtgcaccttgttggcgaggccggtgcagcagttggcgtggagcgtgcagaccctggccatgtcgcggctgagctggcagaagccgccgcagtgcgccgtgtcgaggaactgcatccggacgtcggcgcggcggctgagctccgcctgcgcccgctccaggacgtgctgctcgttggtccccggcgggaagcgccgccgcgcgtcgcgccaccgccggtagaagtccaccgtccgcctcgccgcgcgcacgtacaggaagccgccgttgggcctgttccggaggctctccgggtcgccgttgtagtagtcgttggccaccgcgatgtccgacgtgatcgcgatgtgccgcagcgggttccggaaccacatgatgtcaatgtccgtgaagaggaagttgaagccgagctggaggatggtctgctggaagaggttgcgcccccacatcatgtcgaggtagtccttgctcatgaagcgcttctcgtcgctgtagtccacggcgccctccggccgccggaggaggtagcagtgcgggtgcacctggcggcaccgggcgagcgccgcggggtccatggccacgatgaggacgtgcttcagcagcggctccgtgccctcgccgagccggaagctctccaggaagaggtccagcagcgaccccggcgccgcgtacgcccggttgatcgacgtcatgatcaccgtcctgtcgtccatcgacgcgttcctcagcacctcggtcaattctgacaatgctttcatctcgtcggtgacggccggtggagaatcattgttgttccaggaggccagggcggagagcctccagttgatatccatagtagcaatgacgaacgccgccgtcagcgccgcgcccggggaggagggggtcccccgggtgggcctgcccctgtcccctctcaccttgcaagccatgttcttggcttcttgctgctgctcaatgcgcttgcaggcagatctcatttcttgcattcccagcaaggaatgcagacatgcagtttatatctaatttttttattttttcacacgccgctgtaactagcgacaggggccttcaaaattcaacacccgaagtttttatcacagcagcaaacactaacacacgaaatcgcacgatttcggtacctccaatggtataccacaaacaaccaaacaccagtatatatctctctcacggtaatgttagctctaatgtgatcttttcacatcgccaaagaagccagtatcaatccctgattagtctgtaccgaagtagcgatcaccatactctcctaaccctgggatcacccggtactcctcgttcaacccagtttcgatctctgaggttacaatcttcagacgagggaatcgcttgcagacacaatggaccccttcaggagccgagatgagattgagaaacatgatccgctcctcaggaacacccccactaatcataagttctcaagctgaattagctcagttgcggagataagattggggattcagattcgtacctgtaccaagcccatgctccacgggtacaccatatcttacagcaatatccaagggaaacctgtggtctatgagctgttgtccattgtccccatcccgatgtattagaattttgcctattttaatccccttacaacaagcacgtaatgcattctccatgctttctccacttcgaataattgacacaccacagagcttcttacaaaagtcaactcccatgtaagtagacccaatggccactccacagtgcttcttgctcaagtcgactcccacagaaagcgtccctgttagaggaataatcggattttctgtatatgccatatgccccagtccgtgctaagctaccgaaccgagcaaccgacctgataaatgcccaatcaaatgtagggctacccctttctcgcatccgagtgtgcattcctcggatccggattgttgtttgaaccacataaacatgtggatagattttgcacaagtcatgctgaccaagcctagtacggatatgttgaacaatcaggtcaattgccactcacgccttatacgccgggcaagtctaatatcggcatctgtgttcacacagagaccatacgctcaagcacaggctaacatctctacctctttcaactgtatcacgccttattcgtcgagctagcctaatatcagcatctgtgtccacaaaaattttcatgtccatcagattttttaagctgtcctctatggaagactaaaatgccctctaatataatgacatctgatgcattgacctttctaaagctttcagaggaccgtcggtgattcttaaaatcatatataggaacatttacaggttgtgcccgttttagctgccccatgcattccagaagctgctctgtgtcaaatgcatcagggtgatcaaagttgtaatcttgggcatgtgcagattcttcagcagttaacccacggtagaaggaatcctggttgacgagcacgacacggtggtcgtgcagctgctggatgatcatgtcgcacaccgtcgtcttccccgacgccgtcccacccgaaaccccgatgacgaagggctgcctgagcgcggatggcgacacaagctccgcggcgtcggcggcgacgccgttggcgtagacggcgccgttggagtgggcggccgccgccgcgccgccttggcggaggaaggggaggacggggcggagggggaggagaggcggagcgcctcgaggcggagtccgctgaagtgcggccccaccgccgactccatgacgtcgtccaccgccttctccggcatgatctccccgccgccgccgccgccgatcgatctcgctgccttcgcgggttttggttgggatcttctcgctcgcctctcactctctcc

SEQ ID NO: 81353 - DNA, 177 bp, Oryza sativa
  Clone ID: PAT_MRT4530_80889C.1
atggcgatcgatggtttcccggtgatccgcttgccagaaaacaaggcgggggcaatggtgcgggaataccactccacaggcaccctcgacggcacggacgaagcctactcctcggagaacccgccatcggacacatactcgcactctggggttggggaaaaaatagagcaagactga

SEQ ID NO: 81354 - DNA, 1173 bp, Oryza sativa
  Clone ID: PAT_MRT4530_8088C.1
cggacgcgtgggtcagtgttcgccatggcaagcagcagcaagctctcctcggcgttcgcgctcgccgtcgtcgtcctgctgctcgccggcggggtgatgccggcggcggaggcggcgtcggcgcacctgcacttcttcatgcacgacacgctgacgggggcggcgccgacggcggtgcaggtggtgaacggtccgcggagccacttcggcgacacgatcgcgatcgcgacgacgtgctgacggcggcggacagctgtcggctacgatgaggcgagcaccgtgcattacagagtggtcgtcttgagcggccttgaggcacaccaacggacgatattatcgaggtgcgcagcaaaaccacccctgaggtcgtgacagattttgagtcttgagggatgcacgatacctgatgtggatggacaacaaggccagacagtatgtggagaaaaagatcaagagtgacgagttctttaatatggatgacgacaagtggaataagatgcaagagctgttatggccaaccttttgaaatgtgagaatattttggagggaaatggctccaatgaacaactaatttgagaaaatcatgctgtccggggtaaaaagccggtggtggaggacggtggggatggccaaaggggctataaacctggggaattggtaggaaccctgtctgggaggtaaccatgaaggtggtgctaaggtaggggccgttaaccggaagatcggtaaccgttgtcgggagggacaacatcccggcaccggtaagagaactgtcggtggtcgacggcacgggggagttcagaatggggtccggtaacgtcctttggaaaacggtcagccttgaccaccccaacgccatcctcgagcttgaggtttacgtcaacccctgagattgccgccgccgccgccggccaccgtgtgcttgcttccggggtaagtggtggtggcataacgtggggtgtgccagcacacgacacatgttgcagctgccacggatggtacactcccttaccctatactactatactatactaggactgccacccagccagtgacgaataatatggacaagtccattccatgtgttgttagttgttaccgtggcgtgtaataattcatgagatttgtcaattatcaacttccattccagatcaataggacaatttttcctcc

SEQ ID NO: 81355 - DNA, 1870 bp, Oryza sativa
  Clone ID: PAT_MRT4530_80890C.1
gacaggaccatatgcatggactttgcagtacatacatatgtaagtttcattagcatgcagttcaatcacaactgaaagtgaaaccacacggcatctgccgcattcaggcccgagaagtgggctctacatgtcacaaatttttcccttttttcacacgccgctgtaactagcgacaggggccttcaaaattcaacacccgaaggtttttatcacagcagcaaacactaacacacgaaatcgcacgatttcggtacctccaatggtataccacaaacaaccaaacaccagtatatatctctctcacggtaatgttagctctaatgtgatcttttcacatcgccaaagaagccagtatcaatccctgattagtctgtaccgaagtagcgatcaccatactctcctaaccctgggatcacccggtactcctcgttcaacccagtttcgatctctgaggttacaatcttcagacgagggaatcgcttgcagacacaatggaccccttcaggagcctgtacagttgaatagttatgataagaaactttagctgtgacttcagtagttctcattccgacaagcaagcaaacatcactatgaaaggagcattggataaattcaacactacctgtaccaagcacaggatccatgagtagaacatgtcgttcagcaatatccaagggaaacttgtggtatatgagctgttgtccattgtccccatcccgatgtattagaattttgcctattttaatccccttacaacaagcacgtaatgcattctccatgctttctccacttcgaataattgacacaccacagagcttcttacaaaagtcaactcccatgtaagtagaccctgttggtgtaacaatctgcttctctgtgaaaggcaaatgccccagtccatgctcaactacctggaaagttgtattaaccacataaacatttgggtagattttgcataagtcatgctgaccaagttttgtacgaatatgttgcacaattaaatctatggcaacatggttatctccccctcgcggtatgatcacatcagcatattttttggaaggaagaacaaaatcatcgaacgcaggcttcacaaacctcccatactgctccagcactgagatgacatctctacctctttcaactgtatcacgccttatacgccgggcaagtctaatatcggcatctgtgtcaacaaaaattttcatatccatcaaatcacgaaccctttgatcatgaaaaactaaaatgccctccaaaatgatgacatctgatgcattaacctttctaaaactttcagagcatcgacggtggttcttaaaatcatatataggaatatttacagatagcccacttttaagctgtcccatgcactctaaaagttgctctgtatcaaatgcatctgggtgatcaaagttgtaatcttgcacacggtcagattcttcctcagttaaaccacggtagaatgaatcctggttgacgagcacgacgcggtggtcgtgcagctgctggatgatcatgtcgcagaccgtcgtcttccccgacgccgtccctcccgacacaccgatcacgaagggctgcttgctcccctcctccgcggctgcggcggcggaggggggcggcggcggcgcgaacccgttaaccgcggcgggggcgtcgttgccgccgcagccgttgctggaggcggcggagggggaggtggggagggaggaggaggagaggcggcgcgagtcgaggcggagcccgctgaagtgcggccccaccgccgactccatcgcggcgtccatctctcccctcgccgtcgccgccgccgccgccgccgccgacgtgctgagctggcgcgcacggtgcggaggccggaggtttacga

SEQ ID NO: 81356 - DNA, 1746 bp, Oryza sativa
  unsure (1)..(1746): unsure at all n locations
  Clone ID: PAT_MRT4530_80891C.1
atggagatgaccctgccattgctcggcgccgccgtcgtcctcgccgcgttcctcctcttcttcctcgtcaagaacaaccgttgctgctggtcgccggcggcagagaggcggctgcggttgccgccggggccgtggcggctgccgctcgtcgggagcctgcaccacgtcctgctgtcgcgccacggcgacctgccccaccgggcgctgcgcgagctcgccgggaggtacggcgcgctcatgctgctccggttcggcgccgtgccgacgctcgtcgtgtcgtcggcggaggcggccagggaggtgctcaagacgcacgacgcgtgcttcgccagccgccacatgacgcccacgctcgccgtcttcacccgcggcggccgggacatcctcttctccccctacggcgacctgtggcgccagctccggaggatctgcgtgctcgagctcttcagcgcgcgccgcgtgcagtcgctgcgccacgtccgcgaggacgaggcggcgcgcctcgtccgcgccgtcgccgaagagtgcgccataggcggcggcggcggcgctgtggtccccatcggcgacatgatgtcccgcatggtgaacgactccgtcgtgcgctccgccatcgggggccggtgcgcgcggcgcgacgagttcctccgcgagctcgaggtctccgtcaggctcaccggcgggttcaacctggccgacctgtacccgtcgtcgtcgctggcgcgctggctcagcggcgcgctccgggagaccgagcagtgcaaccggagagtgcgcgccatcatggacgacatcatccgcgagcgcgctgcaggcaaggacgacggcgacggcgaggacgacctcctcggcgtcctgctcaggctgcagaagaacggcggcgtgcagtgtcccctcaccaccgacatgatcgccaccgtcatcatggaaatattttcggccgggagcgagacagcatcaacaacgcttgagtgggcaatatcggagctagtgagaaacccaaaagtcatggataaggcccaatcagaggtcaggaaattgttcgagggacaagacaatctaaccgaggacgacatgagcaggctaagctaccttcacctggttatacgggaaacacttcgcctacatgcgccagcaccattccttctacctcgagaatgccgtgagcagtgcaacgtcatgggctacgacataaccgaaggaactcgagtgcttgtaaatgcttgggccattgcaagggatactaggtattgggaggatcccgagatttttaaaccagagagattcaacgcgaatctcgttgatttcaagggtaattatttcgagtatatcccttttggctccggtaggagggtgtgtcctgggataacacttgggctaactagtatggagcttgtgcttgcaagtttgctttaccacttcgattgggagctcccaggtggcaagaggtgtgaagagattgatatgtcggaggcattcgggatcacggtgcgcaggaaatcgaagcttgtgttgcacgctacgccacgtgttccgtgtttgcattaacagtggttcgatgctttcgcacgtgtatagacgatgcatgttatatttgcaggattgtatattgaaatacttaagattcttatgataatgctatttaattatagatggagaaactactcccatctggccataaaaaaaaaaaaaaaaatgtattatcaaatgnnacctagttttaagtttcgaagataagaaaaaaaa

SEQ ID NO: 81357 - DNA, 241 bp, Oryza sativa
  Clone ID: PAT_MRT4530_80892C.1
atggagcaacctctcttcgagctgtctgttcctaggggcgaattctatgagccacttccttcattggagccaatttatacatctggctatgaaattcgccccgaactaatcagtatggttagggaaaactctttctggccttgatctagaaaatccctaccatcacatataggactttgagcaagtctgctcatgccttcagattcgtagcatgaaggaagaaactgtatggtggaaattt

SEQ ID NO: 81358 - DNA, 173 bp, Oryza sativa
  Clone ID: PAT_MRT4530_80893C.1
tgaatcgttgttctagatcactgccacgttaggtttgctattataacataaatccggggcttcaccaacagcccaatctatgtatttatgtaaaccaatgttgaagcaattattttccaatactcaagaccaatgtcttttgacaattgcggaccggattttcttaaaataaa

SEQ ID NO: 81359 - DNA, 554 bp, Oryza sativa
  Clone ID: PAT_MRT4530_80894C.1
aggaatacggcacgagggtacccccgccggcgacggcgaggtacgtcgtaccgtgccgcggccaagggcggcgcccccaactagcagatagggatagtagactaacaaagctatgtccaacatagataggacctaactagctaagatacggcaaagcgcaagaggaagaatacagtacagggggataccgccagcgtccctggggcaaatagggcagctagaaataccgagaccccagcaagggtagtaccgtagtatggctatggaacataataaacactagctagaggaggcagctaagggcataatagacgctagaagcccgcaagataccgtggcaagaaagccaaggtacaactattcctagatagaaccagctagtagctacagaagctactaccctagaagcaaaacgctagccaagcaagagaaactaagctaccacctactaaagtacctagtggcgataatactttctttcagctaaacagttacagacaatgatattgtattgcaatgctagcaaaggtagcctgcaaagccggcagagcctg

SEQ ID NO: 81360 - DNA, 412 bp, Oryza sativa
  Clone ID: PAT_MRT4530_80895C.1
agcacacctaccaggacaggtgggaggggattgcatacgatatgttcgatgaccagtatgacatgaccagggtgaagggtggcgtccactaccttttgcaggctggtacgagtgatgggatcgacgaggtcgttctaagctactacgagagcgtaatcctgggtctgactacgtacgacaccgactacaacgtgtgaggcttgtacataggccatggtagagtggacaagctggctgtctacatctacatgaactaaatgacgcttgccagcatataagtgctactcatcctgggtatttgcggaggcacgggacaagccaaattctttcagtgagagctagtctttgacaagatcgggatcaaccgcatcatgatgagcgcctgatagctgcagaggggctaccccagata

SEQ ID NO: 81361 - DNA, 213 bp, Oryza sativa
  Clone ID: PAT_MRT4530_80896C.1
atggcctggcgtggcgcgggcggaggcagcggcagcggcccacgcgagggtgacgacggccagcgcaggggcatcggcgccctagcgcggggcgaaggcggcggcccgcacgggggcagcggcagcgagtggcctagcacaaaagtactaatgcctacgaattgtgctcctcgccttcttcttgggctcaacttggcctctaccggtctctga

SEQ ID NO: 81362 - DNA, 240 bp, Oryza sativa
  Clone ID: PAT_MRT4530_80897C.1
attccaatgttttttttttttggcccccgtaaaattgaagaaaattccctgcctgttttcggtcccaaagaaatatctgaaggaggtatttttatagatcaaagggttttaaaaaggtcagaaccaagacgggggtcttttttcggacaacgaccttggcctatttgtttggggggctttaaaccactatcccgtgtatatttgggcattcgagggtactcccggcccttgttttttggg

SEQ ID NO: 81363 - DNA, 1334 bp, Oryza sativa
  Clone ID: PAT_MRT4530_80898C.1
aacatcgaattgcattaaaatatcttgagcactgaagagtcccttatcaacttactagtgaaagataaagcgcctatttcccccttagttatcaactacaatttctacataatgagaaaaatatatgagctaccatactgaaaaggcctagataaacctctttgctttatcatctgctgagtgctactttgcatttcccaaatatgtacaacagcttaattattcgcactgaaggaagatgtacatatgaaaacccagagagttgaagactttcagatgttcagagtacaatattgaggaacgaatcaactctcaactattttaattttcttgggcaagatcaaaatatcatacaagggtagaatacaaatagctagcctagtagagctgttctctcctatcacgccaccatcgccaccagtagtagtcccatcgggggtggatcttgtgcatgcggtttaccccgtaagggtactcggagacggagcggcgggcgttcctgaaggcgcagcagccgcaggcgcagatgcagatgagcaccaccagcaccatgacgttgagcaccgagatcttgtgccaatcctccctcaccttctccatcaccccggccctgcacgactcgcacccgtagcacagtatccccgccgcgttgttccaccggaagcagtcctcgtcctgcgctccgacggccaccccgccgctgtacgcgcacgccgtcggcggcttgcagcaccccgactggattggggtgagatcatgctggaggtaatccatgggtgaccaattggcgatcttggggcaagccttggatccaacgacgcatgcgagcgcggggcgccagtatttggcgtcctggatgtgcttctgcagccaggacgagtagtcggaggtgtggtactcgcggtaggggcggccggggacctgggtgccgccgccgccggcggtgacggcgaagccgaaggcggtgaggccgaggaggaaggcgatgaggagcatcatggcgaggaggtagagccacagcgcccacgccacgtggaagcaggcgcccacgaagccggcgagggagacgaggaggacgacgaagccgatcaccagcagcggcgtctgcagcatcgacccgcacgtcgccgttgaccccttcgccatccacagccccgccccgatcaccgggatcgacgccagcagcgtcgccaggttcaggtatccgatcatcacgttgctgaatctgtaaggatacatatctttgatttcttgattgaaatcacccccttcttgctctttctgaatcttcagaacaagagcttcttgtgttcactgcactggaccctcgtgcg

SEQ ID NO: 81364 - DNA, 1811 bp, Oryza sativa
  Clone ID: PAT_MRT4530_80899C.1
atgtcctcctccatgagagttgctctcctagccatgctacccatcctcctcgtggatgcccaatccatggctgcgccaattcagtgccttccaggccaggccgcggcgctgctccagctgaagcgctccttcgatgccaccgtcagcgactacttcgccgccttccggtcatgggtcgccggcacagactgctgccactgggacggcgtccgctgtggcggcgacgatggccgtgcgatcaccttcctcgacttgcgtggccatcaactgcaagctgacgttcttgacaccgcactgttcagcctgacctcgctggagtaccttgacatctcctccaacgatttcagtgcatccaagctcccagccaccggcttcgagctgctcgccgagctcacccaccttgacatctccgacgacaatttcgccggccaggtacccgccggtatcggccacctcacgaatctggtttaccttgatctttctaccagcttccttgatgaagagctagatgaagagaacagtgtattgtactacacctcatactcactttcgcagctctcagagccaagcttggacaccttgctggcaaacctcaccaacctgcaggaccttcgtctgggcatggtggacatgtccagcaatggagcacggtggtgcgacgccattgcccggttttccccaaagcttcagatcattagcatgccttattgctcactttctggtccgatttgtcggtccttctctgccttgaaatcacttgttgtgatagagctgcactacaattatttgtccggtccgattcccgaattcttggcccatctgtccaaccttagtggtcttcagctttcaaacaacaactttgaaggatggttccctccaatcgtcttccagcacaagaaattaagaggcattgatctcagtaagaattttgggatctctggaaatctgcctaatttttctgcagatagtaacttacagagtatatctatcagaggtgcaatacctcaatgggtatggaagacctcaggctatttttccttgttgaacctatcacataataagtttacgagtactggatctgaccctttacttccacttaacattgaattcttcgacctcagtttcaacaaaattgaaggggtaatacctataccccaaaaaggaagtatcacgcttgattactccaataaccagttctcatctatgcctctcaatttctctacttacctgaaaaaaactattattttcaaagcctccaaaaataacctttctggaaacattccaccattgatctgtgacgggattaagagtttacaactcattgatctctctaacaactatttgactggcataataccatcatgtctgatggaggatgcaagtgcactacaggtactaagtctaaaagaaaataatcttaccggcgaattacctgataatatcaaggaaggctgtgcattaagtgcattagatttcagcggcaatttgattcaaggaaagttgccgagatctttggttgcttgcaggaatctggagatccttgacattggaaacaatcaaataagtgactctttcccatgttggatgagtaaacttcctcaacttcaagtcctggtcctcaaatctaacaggttcattgggcagatggatatttcttatactggagatgctaacaactgtcaatttacaaagttgcggattgcagacatagcctcaaacaacttcagtggcatgttgccagaagagtggtttaagatgctgaagtccatgatgaccagttctgataacggaacttcggtcatggaaagtcg

SEQ ID NO: 81365 - DNA, 300 bp, Oryza sativa
  Clone ID: PAT_MRT4530_8089C.1
atgggggcatggccgtccgtccagtcagacgtgaccggcgacaggcaggtcacagatcggtcattcctgaccgacgcgagccagtcgggcacgccgcacgtctgtccctactgcattgaatgcgatggcggctgggcgagggcctcggggcaaagcggcgcgagggcccgaggggattcatcgaagccattagttggcatcggtcactgcaaaggcagagaggccgctggcaccaaggtggtagtaggtatacacaaggatcgctacaccagttcggatcctcaacaccctagcgtctag

SEQ ID NO: 81366 - DNA, 460 bp, Oryza sativa
  Clone ID: PAT_MRT4530_808C.1
cccgggcaacccacgcgtccgcggacgcgtggggtgtgacaatactaggtaacgtaaaaagttagtacataaatagacgtgtttcctgtccaaattactcaacttcggtctgtgttttgcagccactactttgacaagctggcatctcctcgttacattttgctctcttcacgtggcattatgtatgaagctctttgagcacaaaccttttgatgcaaggactgtcatgggatttggtgtgctcaatggcatttcaattggtcttctcaacttgagtctaggtttcaattctgttggtttctaccaggtaggcattgtttttgctctgtcctgatcaaaacttaacaggctatcatctggtagtgttgtacttaatgtccttctaattgttggtacccctgctgctattttttcactcacaaacaacggcttaacaaagagggtttcagttaaacttatt

SEQ ID NO: 81367 - DNA, 709 bp, Oryza sativa
  unsure (1)..(709): unsure at all n locations
  Clone ID: PAT_MRT4530_80900C.1
ccggatcccttcgaattctgaaatccccaaattcttctccgcctctcctcccctccccctacagtatttcaaaatatttcaaatcacactacactctccgtcgtctcctctcctctcctctcctccccctctcctccgcctctctcgcatctgaggctccgatcgccggcgaccccagccagaatccggcgccccgtctcgccctccccgctcgacgagaccgcgccgagcggcgaagaggcctagtgttcttcgcacctcgcgatgagtagcgcggtgaaggaccagcttcaccagatgtcgacgacatgcgattcgcttctactggagctcaatgtgatttgggatgaggtcggtgagcccgacacgacgagggacaggatgctgctggagctcgagcaggagtgcctggaggtctacaggcggaaggtcgaccaggcgaaccggagccgcgcccagctgcggaaggccatcgccgagggcgaggcagagctcgccggcatctgctcagccatgggcgagccgcccgtgcacgttagacagtcaaatcagaagcttcatggcttaagagaggagttgaatgcaattgttccgtatttggaagaatggaaagaaaaaggtcgaacgatggaaccagttngttcatgtcatagagcagattaagaaaatttcgtctgaaataaggccagccggattttgttccttttaa

SEQ ID NO: 81368 - DNA, 3000 bp, Oryza sativa
  Clone ID: PAT_MRT4530_80901C.1
atgtcctcctccatgagagttgctctcctagccatgctacccatcctcctcgtggatacccaatccatggctgcgccaattcagtgccttccagaccaggccgcggcgctgctccagctgaagcgctccttcgatgccaccgtcggcggctacttcgccgccttccggtcatgggtcgccggcgcagactgctgccactgggacggcgtccgctgtggcggcgacgatggccgtgcgatcaccttcctcgacttgcgtggccatcaactgcaagctgaggttcttgacaccgcattgttcagcctgacctcgctggagtaccttgacatctcctccaacgatttcagtgcatccatgctcccagccaccggcttcgagctgctcgccgagctcacccaccttgacctctccgacgacaatttcgccggccgggtacccgccggtatcggccacctcacgaatctgatctaccttgatctttctactagcttccttgatgaagagctggatgaagagaacagtgtattgtactacacctcatactcactctcgcagctctcagagccaagcttggacaccttgctggcaaacctcaccaacctgcaggagcttcgtctgggcatggtggacatgtccagcaatggagcacggtggtgcgacgccattgcccggttttccccaaagcttcagatcattagcatgccttattgctcactttctggtccgatttgtcggtccttctctgccttgaaatcacttgttgtgatagagctgcactacaattatttgtccggtccgattcccgaattcttggccgatctgtccaaccttagtgttcttcagctttcaaacaacaacttcgaaggatggttccctccaatcatcttccagcacaagaaattaagaggtattgacctcagtaagaattttgggatctctggaaatctgcctaatttctctgcagatagtaacatacagagtatatctgtgagcaacaccaacttctccggcacaattccaagttctatcagcaatctcaaatctctgaaggagttggcacttggagctagtggtttctctggagaactgccttcttccattggtaagctgaaatctttagatttactagaagtgtctgggttggagctagtaggatccatgccgtcctggatctcaaacctgacttctcttactgttctcaacttcttccattgtggcttgtccggacgcttaccagcttccatagtgtacttaacaaaattgacaaaactggcattgtacaattgccacttttcaggagaggtagctaatctggtcttaaatttgactcaattagaaaccctcctgctccattcaaacaattttgtcggcaccgcggagctagcttcactcgcaaaactgcaaaatctgtctgtccttaatctctcaaacaataaattagttgtgatcgatggagaaaatagttcttcggaagcgacctaccccagtattagtttcttacgtctatcatcttgcagcatatctagcttccctaacatcttgaggcatctccctgagattactagtcttgacctttcatataaccagatcagaggtgcaatacctcaatgggtatggaagacctcaggctatttttccttgttgaacctatcacataataagtttacgagtactggatctgaccctttacttccacttaacattgaattcttcgacctcagtttcaacaaaattgaaggggtaatacctataccccaaaaaggaagtatcacgcttgattactccaataaccagttctcatctatgcctctcaatttctctacttacctgaaaaaaactattattttcaaagcctccaaaaataacctctctggaaacattccaccatcgatctgtgacgggattaagagtttacaactcattgatctctctaacaactatttgactggcataataccatcatgtctgatggaggatgcaagtgcactacaggtactaagtctaaaagaaaataatcttactggcaagttacctgataatatcaaggaaggctgtgaattaagtgcattagatttcagcggcaatttgattcaaggaaagttgccgagatctttggttgcttgcaggaatctggagatccttgacattggaaacaatcaaataagtgactctttcccatgttggatgagtaaacttcctcaacttcaagtcctggtcctcaaatctaacaggttcattgggcagatggatatttcttatactggagatgctaacaactgtcaatttacaaagttgcggattgcagacatagcctcaaacaacttcagtggcatgttgccagaagagtggtttaagatgctgaagtccatgatgactagttctgataacggaacttcggtaatggaaagtcggtattaccatggacagacctaccagtttactgctgcactaacatacaaaggcaatgacataacaatttccaagatcttaacatcactcgtgctgattgatgtctcaaataatgatttccacggtagcatcccttcaagcattggggaacttgcgttgcttcacgggctcaacatgtctcgcaacatgcttacagggccaattccaactcagtttggcaacttgaacaaccttgagtctttggacctctcctcaaataagctttccaatgagatcccagagaagctagcatcactgaactttcttgcaacattgaatctgtcctataatatgttggctggaagaataccacaatcgtcacacttctcgacattttccaatgcctcttttgagggaaatattgggctgtgcggagccccattgtctaaacaatgtagctatcgatctgaaccaaacatcatgccacatgcttccaagaaggaccccatagatgttctactttttctcttcactgggttgggatttggtgtctgctttggaattacaattctagtgatatggggaagcaacaaaaggaagcagcaagcttga

SEQ ID NO: 81369 - DNA, 296 bp, Oryza sativa
  Clone ID: PAT_MRT4530_80902C.1
cttttaaaagatttggggcggcatgcgcgcgcacgcaagcgcgggtcctctttagagggcgccctctgttctccggggtctactactactacagggcgtcgtcgtagtcgtcggaatttcaagttgccttaggggaccacacgggtggcacggggtccgcaccaaacaaggttaaattgggaagggtttggtgtggaactggggctagaaaggaactcttgaaactaaagtgcaaatcacaaatatgccaaaaattggactaagagaaacaagtttctaaatactggacaggaaga

SEQ ID NO: 81370 - DNA, 3494 bp, Oryza sativa
  Clone ID: PAT_MRT4530_80903C.1
cgggcggggcccttttaggcagcagcatccgcagccgccctcgagcggcttgaaagggcgggcgcaccgcgggagggtgaagaagctcagcaagctcgcgctgcggcgggcgcgggactggcgcgcgcgcgtcgcgggcctcgcggaccgcgtcctggcgctggcccccggcgcgcccgtcggggacgtgctcgacggcgcgcgccccgcgccggacgagctcgcgttcgtcgtgcgcgcggtgggggtggcgtcctggcggcgcgcgctcgacgccttcgagtggctcgtcgcgagcggcggcgggcgtgccccgggcccccgcgtcgtcgccgtcgtcctcggcgtcctcgggcgcgcccgccaggacgcgctcgcggaggatgtcttcctccggttcgcccgcgagggtgccaccgtgcaggtgttcaatgccatgatgggcgtctacgctcgttctggccgcttcgacgacgcgcgccagctgcttgacgcaatgcgtgaccaggacatcgagcctgacctcgttagcttcaatacccttatcaatgccagggccaagtctgggtgtttggccgctggtgtcgctcttgagctcctacatgaagtccggcaagctgggctgagaccggatgctatcacttacaacaccctcatcagtgcttgctcacaaggttctaatttggatgatgcagtggcggtgtttgaggagatgatagcttcagagtgtcggccagatttgtggacgtacaatgccatggtctccgtgcatggccggtgcgggaaggcacaggaggctgagctgatgtttaaggagctggttgagaagggttttcagccggatgcagtcacatacaactcgctcctttatgctttcgcgaaggaaggcgatgtggagagggtggagcgtgtgtgtgaggaattggttaaggctggtttcaggaaggatgggattacttataataccatgattcatatgtatggaaagatgggcaggcttgacttggcgcttgggttgtatgatgagatgagggctataggctgcactccagatgctgtgacctatactgttttggttgattctttagggaagatggataggatttctgaggcagggaaggtgctggaggagatggctgatgcaggattaaagccaactttggtaactttcagtgctttgatatgtgcatacgccaaaagtgggaggcaggatgatgcggagcgtacatttgatcgtatggttgagtcaggtgtcaaacctgatcgtttagcctatttggttatgttagatgtttttgcaaggtctgatgagactagaaagctgatggttctgtaccgggctatgatcaaggatggatataagccagatgatggtttatatcaggtcttgcttgctgcactcgcaaagggaaatgaacacgatgagattgaaggagttatccaagacatggaggccgtttttgaaatgaatccactagtaatatccagtatactcatcaaggctgaatgcatttctcagggtgctagtctgttaaagagggcatgcctccaaggatatgagcctgacggtaagagcctactgtccattttagacgcatatgaaaaaatgggtaagcatgaaaaaggtctctctttgcttgaatggatccggcagcatgttcccaactcccacaacttaatatctgaatgctcgatcatgcttttgtgcaaaaatgggaagattgttgatgccattcaggagtacagtagaaaacaaatgttaaaacgtggatcctttggtcaagactgcgacttgtatgagtacttgattacttaccttgaggaggctgagttatttcccgaagcttgtcaagtgttctgcgatatgcagtttcttggcatagttccttcccaaaagatataccagagtataatttacacatgctgcagattgggtttcccagaaacggcttatcaattgatggatgatgctgcgcgatctgatatttccttgaacattctttcatgcagagtagcaatgattgaagcgtatggtaagttaaaactctggcagcaggcagaaaattttgtgaaaggattgaagcaggagtctggtgttgatagaaggatttggaatgctttaatacatgcatatgctgagagtggcctttatgagcatgcaagggcaatctttgacattatgattaaaaagggtcctctaccaactgttgaatcagttaatggaatgatgagagcattgattgttgatggcaggctggatgagttgtatgtggttgttcaggagcttcaagatttagacatcaagatcagcaaaagcacagtactccttatgcttgaagcttttgcaaaagctggggatgtattcgaggtaatgaaaatatataatgggatgaaggcagcaggatacttgccaaatatgcacctctacagaattatgatctccttgctctgccataataaacgattcagagatgtcgaattgatggttgcagagatggagggagcaggattcaaaccagatctcgtggtacttaatacccttcttttaatgtatactgggacaggaaactttgacaggacaatagaagtatatcatagtattctggaagctggattagagcctgatgaggatacatataatactcttatagtcatgtacagtagaaactttaggcctgaagaaggttttactctcttgtatgaaatgggtaaacggggtttgacacccaagttagaatcctacaaaatcttgcttgctgcatctggaaaagctaaactctgggagcaagctgacctgctttttgaagaaatgagaacaaagggatatcggttaaatagatctatctaccacatgatgatgaaaatatataggaatgcccgcaaccattccaaagccgagcacttactatcagcaatgaaagaggatgggattgaaccaaccatcgctactatgcatatcctcatgacttcttatgggacttctgggcacccagacgaagctgagaaagtcctgaacagcttgaaatcttctaatttggaaattagcactttaccatacagtactgttctcgatgcttacttgagaaatcgtgactacagtcttggaatcacaaagcttttagaaatgaaaagagatgtgattaaatcttacaccttctgcaggctccttactgagaggacttcgtctctgtttactgaggttgacagctttctagaaaaacttgggacactagaagattctgcttcattgaactttgtaaatgcactggaagacctgttatgggcatttgaacgtcgagcaaccgcttcatggattttccaattggctgtaaaaagaagcatataccatcataatatctttcggtatttgcaacaatctctaactccgaagattttcatttgatctgctggggctggtcttgttgctctaacattgtggcttgatcagatgcaagatgcttcactgcagggtgcaccagaatcccccaaatcta

SEQ ID NO: 81371 - DNA, 746 bp, Oryza sativa
  Clone ID: PAT_MRT4530_80904C.1
tttttttttttttttttctcctatttccacattgaagccttctcctttttccgggttctcttcaagcgagcgcatcatgtcagtaagattactcttcttttctcctgatcctttcgatggctccacatcagtttcaaccgctcctttggatggctcgtgtgtcctaagagttttcttgcgcgagaatgtgcgggacagcgatgactgcagcccaacggcgtgcttcttggcaacatctttagctgatttccacctttcacgagccatggcagtctcttttgcgtgtcttgctgcagcctccctagattttgcttgctttttctctcggttggtcagaagttgccctgagaagttgtaaatgatcaacagtactaaactcaaggcacccacaagcaatgcaccaaatattgtaatgtcctgatttacagagtttggtttacagctgcccttgtggaagcatttggtttgggaagttgatcccttcctgcaatagaaatactacaagagagtttctttatagtgcttggacagtataagccggttgggcagaaaacatcatcggtgctaacaacatgtggccatctatcagcaccaccacaagtatgatttggcttcccaggaggtggctgatagccgtatgggttactgatcccacctttctctctaactgcatgcaggccacctatggagacgtaccgcaacgtgtgtgcaccgtcgcttggatgaagttcctactctgaaagctt

SEQ ID NO: 81372 - DNA, 371 bp, Oryza sativa
  Clone ID: PAT_MRT4530_80905C.1
ccccccacacatttaacctgtatgcacgcacagacgccccagtctcccaaagagccaaaggagaggcgggccaacaaaggggcgggaaacacagcaaggggggaccaaaaaacagaccccagctggaacgtggcaccacatagaccccgcggagggcctgcggctctggcatgacataccgaccaacaccccagataagaaagcgcccagggcaaacaaactcgaagcactcaggacgcggaccggagacacccaggacgaaagaaacactgacaagaccacgcggcggaccaggcgatgagggggaagagaaacgggagacaaatcttccccagacaaaaaaacctggctctggagccagaccacgaacg

SEQ ID NO: 81373 - DNA, 148 bp, Oryza sativa
  Clone ID: PAT_MRT4530_80906C.1
ggcgagcctctgccgcatggggtccacttggcaggaggctcacggcaccatcactgggccggcacaagttgggccatatcggaaatcggggctaaacatgaggcccattatttatgggctggacggggatttgcggcgaggcccataa

SEQ ID NO: 81374 - DNA, 465 bp, Oryza sativa
  Clone ID: PAT_MRT4530_80907C.1
gcctaactcgatgatgtcaaatcatacaactctgaaggagtgtgctctggaagaaccttctaatctcacatttaaacaaccacctactgtgcgctctttttctacgatattgccatgctgcatcaggttcatcataacttatgttccatttcttttttcttcaaggctttttatagtttctgtctgattttctacgattgctctggtcgaacctattcgtttggtaatgatgtgattacgtctgtctaaatagctgggatatttatatccatggaatacaaaatattgacaatgatttctagtgttgccaattcttattgatttttggtgggccaattgggtcctatgatctcttttgtgcagttaatcattttttaccttcaaaatttgacattttttcagcttgttcctggatttctgatttcattaactggacttatattgaaacggaattaattacgaacc

SEQ ID NO: 81375 - DNA, 453 bp, Oryza sativa
  Clone ID: PAT_MRT4530_80908C.1
ggatgataaatcttttttttgttttcattaatgtaggaatgcttgttaataaagctaatttcacctttgtacgggaagggggaggcaaggaaggacagacatacaggcaaaggtgggaggtgaggagagaatcaagagctgtcacaactcacaaagctatctacaagctcagaagctgaacgaaaagaaagcatgcttgcctcctacatgaaggaagaagacttcttggtggtggctgacaaacctagctgagtaatgaaagaacaagcaggagcagctggaggttattctgtgagtggggatccatgctggatagagcagatgaaggtggtatccccatacacattgatcacgcaacatgcaggtggccagaactaggtgccccgaagccacgctgcatggaacgcagggtactccctggatgacgggttagtccatgaatgagtcatcaaa

SEQ ID NO: 81376 - DNA, 1071 bp, Oryza sativa
  Clone ID: PAT_MRT4530_80909C.1
ggtgtgttcttgtctcgtttgcaaaaactgttttattttattgatatacagagaagtaaaagtacgttaacccaataaagggatacactcaaaataacgcgacctgacacgagtacaatcaccttaggagtccaagcttattagtataaccgaaatacacaattgatcacgaatgatccggtgatgacacagtggcacaattgatcacgaatgatcgcttcagtttgcaggccatggcctgaaacgtttgaagaggaaacctgtctccgtcttgactatccccgagccttgagcagcgctgctgtttgtggctgcactcgtgccaacatcggcggcagtcgttggcggtgtagcaagaccactagtagtagttgaagcagcttggcctgcatctgcctcctcttcttctaccacatgggggacgaagagaacgtgtccaggatacgtaggtctatcattctgtactacaggcaaggagaatcccggcttgacaggacgacgcttgggaagagctctggctgtcgtcttggcttcattcgggccatctatgaatggtcctttttcctctgcttcattttgtttagctgtcttccgttcagctaactggacgtacagataaagagttgcatcagggggcacagcatcttggtctccagtatgactcctgtcctgcgaactgaaagtatatcttgggtttacaatgaatatcgcttcctctccttccctcatagtcttcacagcatatttcaaagcggtacgactggcaaggttcaattcaagacgttcagatttggaaactgaatttccgtcttctagacatgcgttgtaattcacaattacagtatctgcatgattggagggagatttgtccggtaatgggcgcttgatgatctttttcaatatgcttccattttcgaggatatcagttatagcaaacagcgaaatgagttcaatctcaaaccgtagtgtttgctcgggaggtatgcttgacggaatactggcaggggagccagacttggttatggctaactttggagggatggtgaatatagctctctcccctggtcgcat

SEQ ID NO: 81377 - DNA, 336 bp, Oryza sativa
  Clone ID: PAT_MRT4530_8090C.1
gcacgaatagaattataacactatattttggagggaataaatggcacaaaagggtctcgtaacatggatgagactctaactgatggatgaaatcaaatgggatactatgtactgcaacagttagtgaaactagagacttaaaagctttctgtgaaaaccaaatgattactgacatacattgggaagggtaatccattgccatgcactgaacatgcactgggctggaccctcgaatgtaaggcactgtaagaatatacagttaatgatgatgaaatgatccatagccactcatcccaagcaagaatgcacctaagttagccaatcatatgacataca

SEQ ID NO: 81378 - DNA, 639 bp, Oryza sativa
  Clone ID: PAT_MRT4530_80910C.1
atgtggaatggttggcctggattggcttgggacgagctgggacccaggtcgggttgccagttcggtctgaatcatcgtagaccttgggttaaggcaggcctgaagcgcctgtgtaataatatggctaacaatgaaaaaggcaataaggtcagaagtcaggacaagggtacctcaagctcccgattgaatgaagcaccagacaccagttgtgtggcagtggtccaacacctgattaaccagaatcgattgcttaaagagctactacagcagcatcagacaccaattctgaacccgagtcagatgcaacctcaagtgcagttggaggcagtccaagcactcacacctcaaccccagcaaccagttgacaagacagaggccagtatctgcgttgtacctttagatgttccagcacagcagccaagaaatcaggtacaagatgaagaacctgagtgtaagaaagttattgtttgttacaactgcagtgaagaaggacattactccagaaattgtccacaaccaaagcgtaacccacgccatcattccggacattatgcacgaagaagacatgaccacaatattagggtcactggagcaaatgcagaacctgtcaagcctagtgctagtcagaagcaatcataa

SEQ ID NO: 81379 - DNA, 5313 bp, Oryza sativa
  Clone ID: PAT_MRT4530_80911C.1
atggtgcgctgcggtggattgtgttatgcaaggggtattgtcacagctcctttccgagctcctggtttggaatggtatattcctggtttggagatagatctgtacagccggatgccacactacaagcctgagtacttgtttggtgttgagggatttgtccaggagttgcgtacgatgtcctttgccataggatttgggactgcccctttttatgcccagattcctcatgatcgtcacgaagagaagtgccgagtcaaagtcaccttgaacagtaatagtgaagatatcccctcagtgatgttcgaagctggaggaagaaactacatccatgcatgtcaggaggtggcaaggatcgccataggagagcttcgcgatcgctacagtgatcagttggccgacactgagtatcgctaccatcctcgtcaaccacagggaagtgatcgtggtagttaccttgagactgaaggaattgagaatgatgctaccacaaggcatttggttgagatgctgtgggctatggatgaaacccgtgcggagactgtgttagcagctcaagatcgtgaagaccggaatcgtggtaagatttgcaagctagaagacaaggtggatcgtttggagaaggaattagccgcgttgaagggagaagcaccaccgcagaaggccagggttcgtcttaccgcaaggaagagagctctatttgtccctcgttaccaattggcgccaaaggtccgtgtggtggagaaagaagttaccccagccctagcggatcctccggtcgtcaattggtgggatgtaagtgcatgcgtttgtttgcttttgagtgttaggaagttgatggtgctcactcgcagcaacgggaatggccccaacaacaacaacaataacaataacaacaacaatggagagaatcccacacttgcccaagtcctggctcaacaggcacagcttatgaacatgatgatgcagcaactccagaaccagcagaaccagggaaataaccatgcacctccccagaacaagttagcagaatttcttcgtgtgaggccgcccattttctccagtaccactaatcctgttgaagctggtgattggctgcatgccatagagaagaagttggatttgctccagtgcactgatcaggagaaggtctcatttgcatcacaccagttgcatggccctgcctctgaatggtgggatcacttccgcctgaatcgaactactgctgaacctatcacttggcttgaattcaccgctgctttccggaagacgcatataccatcgggagtggtgtccctcaagaagaaggaattcaggtcgctcaaccagggatctcgctctgttaccgagtatctgcacgagttcaatcgtctggctcgttatgctctggaagatgtgcgcactgatgaagagcgtcaggagaggttcttggaaggacttaatgatgagctttcttatccactcatgactggggattatcctgatttccagaagttagtggataaggctattcgccaggaggacaagtacaaccgcatggagcaaaagaaacgccggattgctcaattcaagacacaacaggggaataatcagaggctgcgtcttactttaggaccccagtccatgccacagggaggttcttcgtctgttgttcgtccgcagcgtcagttcttcaacaaccatgccggcaacaacatccgtaatcaagctccacgccctgttgcagcttcgacacagcaacaacctgccaagagggagcaaggcagcaagcccgtggtgtgtttcaactgtggagacccaggacattacgctgacaagtgtccgaagccccgacgcgtgaagattgtccctgtccagagcaactctaccgcaccagcatcaaaggcccgtgtcaatcgcgttgctgttgcagaagctcaaggtgctccagatgtgattttgggtacgttccttgttaacttagttcctgcaacagtgcttttcgattctggtgctacacattcattcttatctatgagttttgcgggaaatcatgggatggaagtagaagatcttagacgtcctttgatggttagtaccccatgtaatcaagcactctctttgcaacgtagcccctccgtcagaatagaaattcaaggagtaccatttctggccaatcttatcttgttagaatccaaagaccttgatgtcatcctagggatggactggttagccagatataaaggtgtgatagactgtgctaacagaaaagtaactctcaccagcaatgagggtcaagttgtaactgtttatgcattgtcttctgagtctttaaggtcaagactaaaccaaataactttggaagagattcctatagtccgagagtatcctgatgtgttcccagatgatttacctggaatgcctcctaaaaggggtatagagttcagaatagatttggtaccaggaacaactccgatccataagagaccttatagaatggcagccaatgagttggcagaagttaagaggcaagtagatgatttgcttcagaaaggatacatcagaccgagttcatctccatggggagctccggttatttttgtggaaaagaaagatcatacccagaggatgtgtgtggactatcgtgcactaaatgatgtgactatcaagaataagtacccgctacccagaattgatgatttgtttgatcagcttaaaggtgccaccgttttctccaagatagatcttcgatcagggtatcaccagttgagaatcaaagaggaagatatacctaagacagcttttaccactaggtatgggttgttcgaatgtactgttatgtcttttggacttaccaatgcccccgctttcttcatgaacttgatgaataaggtgtttatggaatacctagacaagttcgtggtggtctttattgatgacattcttatctactcccgaaccaaagaagagcatgaagaacatcttcgccttgcactagagaagctacgagaacatcaactgtatgctaagttcagtaagtgtgaattttggttgtcggaagtgaagttccttggtcacgtcatctcagcaggaggagttgccgtcgatcctagtaatgtggaatccgtaaccaactggaaacaaccaaagacagtttcagagattcgcagtttcctaggcctcgcaggatattatcggaggtttatagagaatttttccaagattgctaagcccatgacacgattacttcagaaagatgtaaagtacaagtggtcagaagaatgtgagcagagttttcaagagttgaaggatcgcttaatatcagctcctattttgattttacctgatccaaagaagggattccaagtgtattgcgatgcatccaaatttgggttaggttgtgttctgatgcaagatgggaaggtggttgcctatgcatctcgtcagttacgtccgcatgagaagaactaccctactcatgatcttgagttagatgcagtggttcatgcgttgaagatttggcgtcattatcttttcggtactcgtacagaggtgtataccgatcacaagagtttaaaatatatctttactcagccggatctgaacatgagacaacggagatggttggaattaattaaggattatgacatgggaattcattatcacccgggaaaggctaatgttgtagcagacactcttagcaggaaaggctattgcaatgctacggaaggacgacagttgccgttggagttatgtaaggaatttgaacgattgaatttgggaattgtcagtagaggtttcgttgccgccttagaagcgaagcccactctaattgatcaagttagagaagcccaaattaatgatcctgatattcaagaaatcaagaagaatatgagaagaggaaaagctatcggtttcttggaggatgagcaaggaactgtatggttgggcgagagaatctgcgtccccgacaacaaagatttaaaagatgcaattctgaaggaagcccatgataccttatactccattcaccctggtagtactaagatgtaccaggatctcacggaaggattttcgtgggcaagtatgaagcgtgaaatcgcagaatacgtagcagtatgtgatgtttgtcagcgagtcaaggcagaacatcagaaacccgccggtttgttgcagcctttgaagattcctgaatggaaatgggaggaaatcggaatggattttatcactggtttacccagaacatcatcgggccatgactctatttgggtgatagtcgacagacttaccaaagtggctcatttcatcccagtaaagacaacttattccggaagtcggttggcggaattgtatatggcaaggattgtgtgtttgcatggcgtccctaagaaaatagtgtctgatcgaggcagtcagtttacttcaaatttttggaagaagcttcaggaagagatgggttctaagctgaactttagtactgcttatcatccgcagacagatggacaaaccgaaagggtaaatcaggttttggaagacatgttgagagcttgtgctttagacttcggtggaagttgggataagaatctaccttatgcagaattttcgtacaacaacagttatcaagctagtcttcagatggctccgtacgaagcactgtatggtcggaagtgccgcactccgcttttgtgggatcaaacgggagaacgtcaggttttcgggacggatatcctgagggaagcagaagaaaaggtgaaaatcattcaagaaaggttgcgtgtggctcagtctcgtcataagagttatgccgacaatcgtcgtagagatctaagttttggcaaaggagattatgtgtatcttcgtgtcacgccttttcgaggagttcatcgttttcacaccaaaggaaaattggcaccgcgttttgtgggaccttataagattgtcagtagaagaggagaggttgcttatcagttggagttacctcaatctttggcaggagtccataatgtgttccatgtttcgcaattgaaagtgtttaaggccgtcgccgtcgctcggggaggtcgccatcgtggtcgccaagtcgtcgccgtccttgtccgccccttcgtcgtcgccgaagaccgccggagcaccgtcgccgccgtcgacccgatcttctccgccgcttcgacctcgtcgccgtcgccgtccgttgatcttccgccgccgttttggtcaccgattccgatgtttccggagagtccgttttcgcaggagaagaatttgaagagttccaaggccagcaaggcaagtcacacagatcccaaacaaccctttgagcatgttgatcccgattaa

SEQ ID NO: 81380 - DNA, 5478 bp, Oryza sativa
  Clone ID: PAT_MRT4530_80912C.1
atggctgaccgcgatgaggaacagatattgtacgatacaatcgcggagggaagcagccagtactggaatgaagaagaggggaacgaggatccaaaccagtacttgaacgaggaagggaacatggagtgggatgcggaggggaaccagcaggggcacgtggaaagggatgtggaggggaaccaggaggaggaggctagtggtagtcaaccctccgttggacagaagagggcacgcgggcaacgaggtgcagcgaagaagcttgagggtcggcacatcataacggaagtggaagaagatggacgtcctagtgccccggccgaagccgccaagaactatgtacgtcacagcggttgggttgtgcgggataacatgcctgtcagtacggtgtactggcgaagaacaagggcacgcggagatcatgagagctttgtcccagattcggagaaagagatgctgtggaccacaatgctcgagacattcacccttcctgcgggtacagaggacaaagtgaaaaggtggattctgaagaaaatggcagaacagtttcagagcttcaagggagatctgtaccagaagtatatactgaaggggcagacaccgaacttcgacacattcccaaagctaagggatcactgggacgagttcgttgcatataagacaagtgaacaagggcaggcgatgatggaaagaaacaaagaaaatgccgccaagaagaagtaccatcaccacttggggtcaggaggctatagcgtcgcgatgccgaagtgggagcagatggaggctaccttgattgagaggggtatcgaaccggcaacagccaattggccggaacgatcgaagttctggtactatgctcacggtggaacgctcaacccagctgatggctcactggtcttcggcgatcagatacgagaggttgcgcgacgactaacagatgcagtggaagcctcctctcagagcacgttccgaccagacagagatagggacgagctgacactcgccctgcagactccagagcatccaggacgaacacgagggaaaggggtgattccttggaagattggtttcaaggaggacatccacacgtacaggagtcggatgaggagcaagagagataccgaggcgaagattgcagacctagagttccgggtatcgagctacgaactcaacatgcaagacgaggtggcaaggaaggttgatgaacgcatggccgcacatcggtcccatgatccccagccgaccattcctcctgcaatgccgtgcgccgccgccgtctcggtcgtcgtcatcgctcgggaaggccaccgtcgtgatcgccaagtcaccgccgttctcgtccgctccttcgccgccgccgaagaccgccggaacaccgtcgccgccgtcgacccgaagtttgccgccgcttcctcctcgtcgccgtcgccgtccgttgatcttccgccgctcttttggtcaccgatgccgcgctacaagcctgagtacttgtttggtgttgagggatttgtccaggagttgcgtacgatgtcctttgtcattggatttgggactgcccctttttatgcccagattcctcatgatcgtcacgaagagaagtgccgagtcaaagtcaccttgaacagtaatagtgaagatatcccctcagtgatgttcgaagctggaggaagaaactacatccatgcatgtcaggaggtggcaagaatcgccataggagagctccgtgatcgctacagtgatcagttggccgacactgagtatcgctatcatcctcgccaaccacagggaagtgaccgtggcagttaccttgagactgaaggaatcgagaatgatgctaccacaaggcatttggttgaaatgctgtgggctgtggatgaaactcgtgcagagactgtgttagcagctcaagatcgtgaagatcagaatcgtggtaagatttgcaagttaaaggacaaggtggatcgtttggagaaggaactagccgcattaaagggagaagcatcgccgcagaaggccaggattcgtcttaccgcaaggaagagagctctatttgtccctcgctatcaattggcgccaaatgttcgtgtggtggagaaagaagttgccccagcagatcctccggtcatcatcataagtgatgatgaagaagaagaatccaagcgcaatcattccaagattgagtgggtagcaactcaagatgatgaaaatgagccgaacgagccttcaatcgacctccgatgctcggaagaactagacaacgggaatggccccaataacaataacaatgaagggaacccaactcttgctcaagttctgtctcaacagactcagcttatgaacatgatgatgcagcaactccagaaccagcagaaccaaggaaataaccatgcacctccccataacaagttagcagaatttcttcgtgtgaggccgcctattttctctagtaccactaatactgttgaagctggtgattggttgcatgccatagagaagaagttggatttgcttcattgcactgatcaggagaaggtctcatttgcatcacaccagttgcatggccctgcctctgaatggtgggatcacttccgcctgaataggactactgctgaacctatcacttggcttgaattcaccgctgcttttcggaagacgcatataccatcgggagtggtgtctctcaagaagaaggaattcaggtcgctcacccagggatctcactctgttacggagtatctgcacgagttcaatcgtctggctcgttatgctccggaagatgtgcgcaatgatgaagagcgtcaggagaagttcttggaaggacttaatgatgagctttcttacccactcatgactggagattattctgatctccagaagttagtggataaggctattcgtcaggaggacaaatacaaccgcatggagcagaagaaacgccggattgctcaattcaagacacaacaggggaataatcagaagccgcgtcttactttagaaccccagtccatgccacagggaggttcttcgtcggttgttcgtccgcagcgtcagttcttcaacaacaatgctggcaacaacatccgcaatcaagctccacgtcctgttgcagctccagcacagcaacaacctgccaagagggagcaaggcagcaagcccgtggtgtgtttcaactgtggagacccaggacattatgctgacaagtgtccgaagccccgacgtgtgaaggttgtccctgcccagagcaactctaccgtaccagcatcaaaggcccgtgtcaatcatgttgctgctgcagaagctcaagatgctccagatgtgattttggtccggaagtatcccgatgtgttccctgatgatttgcctgccaatgagttggcagaagtcaagaggcaagtagatgatttgcttcagaaaggatacatcagaccgagttcatctccatggggagctccggttatttttgtggaaaagaaagatcatacccagaggatagctctagcgccgtgcaacctagcgccgctgtcgccgccgtcgctccagccgtgcgccgccgccgtctcggtcgtcgtcatcgctcgggaaggccaccgtcgtgatcgccaagtcgccgccattctcgtctgctccttcgccgcgaccgaagaccgccggaacgccgtcgccgctgtcgacccgaagtttgccgccgcttcctcctcgtcgccgtcgccgtccgttgatcttccgccgctcttttggtcaccggtggcgtcgggcatggccatcccaacggacccttcaggtacttaccactgcaggccgattccagcaggatactcgaaggtcgaagttgagttggtcgaaggcgcgtacgaggacctcgagctggattaccctggaggagacggcggtacatcatcctccctgggcgacaagcggcgtcttgtgcaccatctcctccggctccgccatctcctcctcaggatcctgcaccgtctcctcctcatgctccaccagcaccgtctccacctcaggctccagcatcgactcctcctcaggatcctgcaccgactcctcctcgtgctcctacacctactcccccgcaagctcctcttccggcaccttcaaaaagtcaagagacaattcaagcctcgaagtccagaaaagaagattcctatagaccccagtgtcaggaacttcttcaggggtatgtctgcatctgccaaggaggccatcaagctatcggactatgagcgaacgctaaagaaagcatcttctggaaagtccaaaccagtccctcaacttggagagcaaccaaaccaggagatcgagccattggtgaccggtaaagaaatgacgatagaacaatttattactgacaccggtctaactacgtatcaattgctaggagtcgcaccaatcgaaaaggcggaagtgaaatacatgtacgaactcggtaaaccgcttgtcaagcctgagctactgcagtccctacccacacaaatgtacaagttccgtcagctgtacatggagatgagcgccaccggtagagagatgatcggagcgaggatcagggacacggacttcttgcaaggagatgacattctctggatcaatttcaggggaatctacgaactataccagctggacgccctcgacgtctctattatgagttgctggattttaatggagattcaaagggcccgacggcggagggttttcgatactggattcatcgaccctcggaaagtaaacgtcgcaatgctcgaccaatatccacaagaaacagaggacaatctcgtccatctcttgaaggcgcagcattacaagacgttcatactgttgccatacaacacagaattccactgggtgcttttactcttcgacctggaggcctgcaccgtcaacgacgatatcacgatggactttgtcaagggattaccgtctgtccgcggcaaatcagtcatcctcaccatcgtcaatctactgtcgaaatacgtccacttcattccgttgggctacccatacacaatgatatcggtggcgcaggcgttctttatcgaggtggtcaggctacattacatccccaattcaatcgtcgttgcccacgatccggtgaccaggagcatgttctggccagagctctttcacttggcaagggtaaagctgaatctcagctcagcctttcacccccagagcggcggccaattggaggcagctaaccacgtcatcggggaacgtctcctccaagctcgggactactcaaagctatactgtaacgacagtcatcgcgacatggtcttcagcgtgggcgattctccagccggcgcacgcattcacagcgtgttcatcgttgttgtgtcaaagtcgttccatggtgcaccactggcgtccactatggccttgctagcaatcaccgatggtcttgtgttactggtgccggccaaagcatatccgtggtcgtgtggccctaggtgctcgggaactgctgatttagtgtga

SEQ ID NO: 81381 - DNA, 1458 bp, Oryza sativa
  Clone ID: PAT_MRT4530_80913C.1
atgaagcaacagatgattgacaatagtgccaaaatcgtatccccagatactgtgaccacatcaacacgctattgtcacaagtttgcagagttcatgaaaacaaggccacccacttttgcaggatcagccacatcttggtatactgaccaatggcttggcaccattgaaaacaaattagatatggtgcaatgcgatgagaagaacaaagtattctatgctgctcatcagttacaaggagctgcattggaatgttggaaaggttattgtgcaaccgataaagacccacaagccatcagttgggctgagttttcttctattttgcactatatggatgtttctccagggtttattaaaacaaaggaccacacaaaggatggtgtttgcacactctgcagccaaggctatcgctatgagctgatgtggtgcccacggaacaagccaagaaactgtgcatgtgctcgttgtggggagattggacacagcgccagcgagcacgaaatcagctgctctagctgtgaacaaagccatctactcggagagtgccccatgagcaagctcacttgttacctttgtgaaggtgatgatcatgtcccaattaaatgccccttgagttcaatactcactactgtgactcaacatcaacgagaagcttaccaagaagttatacaacaggtaataggagaaacaaataagataatagtaactccagttaagaagttcagagaagtagatgatagtagccttcaataccaatgtaaaaggggcagtgaatcagcatccaaagttgcatgctctgcttgtggtgagcaaggtgaagcagcctcctataaagccaagtgtatgtcaaagacacgaaaggcttcatcgaaaacgaaaaatgtcgtatgtttcagctgcaatgagatgggccattttgctaatcgatgtccacttagacatcagacacctgctcaagacaaaaccattccaaaagctattctgaccaagagaacaacaccaacaacaggtggtgaagtgctctggtggcgtggtcgcggtggattcttgccggcgtcggcggtgaacggcggccgatctcgcaatgcaagcaaaagagaaaacgtagctgagtcttttgcgcatctaatggtggtggtttcatggactgaggtggccgggatcgatggtgacggtggcacaagcggcggcgaacctcgcttgggcgacgacgacgatgcgtggagcgacccggcggcggtggaaaacggtggtgcgacggcgacagcctcctccagcctccggtctgccaagaaaggatgcttcatgaatgaggacttgcgccgaaactcacccgggagcgaggaatcgacaaagaagtggtttggcctgagatccaccggatggacgggaacagagaaggaagccggcgacggcgctctggagcagaagacggcgacgcgcacggcacaaggtggttga

SEQ ID NO: 81382 - DNA, 413 bp, Oryza sativa
  Clone ID: PAT_MRT4530_80914C.1
ttttgttttttttttttttttggtttttttttttttttttttttttttttttttttttttttttttttttttttttttttttttgggaaaaacgggggaaaactttccctgggggggattttaaggccccgggttcccggggggtttggcctttaccaaaaaggaaaaggcccatccctttgttttacagggggggcccggggaccaggaaaaccttttggctttgggaaaaaaaaatttgggggtccggggtccggggacccccaaactaccgacccgttttagggggggaaacacccccttagggggggggggcatcaacattgggaaacattcccggttcccccggtgggcccccccgggggggggcccttggaaaggaaccccccatttctaaaaacttttcttggggg

SEQ ID NO: 81383 - DNA, 3285 bp, Oryza sativa
  Clone ID: PAT_MRT4530_80915C.1
ccaacctcattcttcttgagtccaaggaccttgatgtcattcttggaatggattggttgacacggtacagaggagtgattgattgtgctagccgcaccatcaagttaaccaatgcgaaaggagaagtggtaaccttccagtctccagtgccgcagaagccagggatcagtttaaaccaggctgctggtgaagaacaagaggtagcagtggagaaaaccactaagaagttggaggatattcctatagtcagagagtatccagaggtttttccggatgatctgacaacaatgccaccaaaaagggatatcgagttccggattgacttggtacctagaactgcaccgatccacaagaggccttacagaatgagagccaacgagttggcggaagtcaagaaccaagttgatgaacagttacagaagggatacattcgcccgagcacgtcgccttggggtgctctagttatctttgtggaaaagaaagataaaaccaaaaggatgtgcgtcgactaccgcgcactcaatgaggtcactattaagaacaagtatccgttgccaagaattgatgatctgtttgatcagttgaaaggagctactgtgttctctaagatagacctacgatcaggctatcaccagttgaggatccgcgaagaggatattccaaagacagcattcatcgctcgcaagtgtgacttttggcttaaggaagttcagtttctcggtcacatcgtgaatgctcaaggagtagctgtggatccagcaaatgtggagtcagttaccaaatggaccccaccaaggacagtcactcaggatggcaaagtggtttcttatgcttcatggcagttgcgtcctcatgaaggcaactacccgacgcatgatctggaattggccgcagttgttcatgctttaaagatttggtggcactatctcatcggtaaccgttgtgaggtatatacagatcacaaaagtctaaagtacatcttcactcaacctgatttgaatctcagacagcgaagatggttagagctaatcaacgattatgatatgggaatacattatcatcccggcaaggctaatgtggttgcagatgccttgagcaggaagagctactgcaatgttgcatgggtagagcaactatgttgtgaggttcaatgtgatttggaacatctgaaccttggtatagttgagcacggattcgtggctgccctagaggcacaacccacactggtggagcaggttcgcatagctcaagcaagtgaccctaaaatagcagagctcaaaaagaacatgagagttggaaaagcccgaggttttgttgaggatgaacaaggaacaatctggatgggggaaagattgtgtgtacctgaaaacaaggagttaaaggacttgataatgacagaagctcatcaaactcagtattccattcatcctggcagtaccaagatgtaccaagacctcaaagaaaaattctggtgggtcaacatgagaagggaaatagctgaattcgtcgcactctgtgacgtttgccagcgagtaaaggcagaacaccaaaggccagcaggtttgctacagccacttcagattccagaatggaagtgggaagaaatcggaatggatttcattacgggtttgcccaggacgtcatcggggcatgattctatttgggtagttgttgatcgactcactaaagtggctcactgcattccggtgcatactacctactcagggaagagcggtgacgtcaccgacagcggcagcggctcggcggagcggacggctcgggcggcgcacactcaccggcaaacggcggcgctaggacgcaaacggagggcaccaagatgtagaggacaacacggcgaactcaccggtgacctaaacggcggcggaagaccaacggacggcgacggcgacaaggaggaagcggcgggaaccttcgggtcgacgacggcgaagctgctccggtgatctccggcgacggcgaaggggcgaacgaggacggcgacgacttggcgagcacgacggtggtcttcccgagcgacggcgacggcggagctccccatggagatgaactaggtctgatgtatcccttctgaagcaaatcatctacttgcctcttaacttctgccaactcattggcaggtaaatcatctgggaacacatcggaatactcccgaactataggaatctcttccaaagttatatctggagcatcttgagcttctgcagcagcgacatgatttacacgagccttggatgctggtacagcagagttattctgggcagggacaaccttcacgcgtcggggcttcggacacttgtcagcataatgtcctgggtctccacagttgaaacacaccacgggcttgctgccttgctctctcttggcaggttgttgctgtgctggagctgcaacaggacgtggagcttgattacggatgttgttgccagcattgttgttgaagaactgacgctgcggacgaacaacagacgaagaacctccctgtggcatggactggggtcctaaagtaagacgcggcttctgattatttccctgttgtgccttgaagtgagcaatccgacgtttcttctgctccatgtgattgtacttgtcctcctgacgtatagccttatccactaatttctggaaatcaggataatctccaaccatgagtgggtaagaaagctcatcattaagtcctcccaaaaacttctcctggcgctcttcatcattgcgcacatcttccggagcataacgagcaagacgattgaactcgtgcagatactccgtaacagagcgagatccctgggtaagcgacctgaactccttcttcttgagagacactactcctgatggtatatgcgtcttccggaaagcagcggtgaattcaagccaagtgataggttcagcagtagtcctgttaaggcggaaatgatcccaccattcagaggcagggccatgcaactgatgtgatgcaaatgagaccttctcctgatcagtacactgaagcaaatccaacttcttctctatggcatgcagccaatcactagcttcaacaggattagtggtactagagaaaacaggcggcctcacacgaagaaattctgctaacttgttctggggaggtgcatgattatttccttggttttgctgattctgaaattgctgcatcatcatgttcataagctgtgtctgttgagcaagaacttgagcaagagtgggattctctccattgttgttgttattggggttgttgggaccattcccattgctgtgagtgttcaccat

SEQ ID NO: 81384 - DNA, 3529 bp, Oryza sativa
  Clone ID: PAT_MRT4530_80916C.1
cgctgtcgccctcatatccgccgccgccgctccggtagccgctagccgccgcaccgtcgccgccgtcgggtttgcaagcccgagggccatgccgtcctcctctccgccgccgctttacgccgcgggaaccccgttcgcaccgcgcgccggtggttccagagctcgtcccgctgccgtcatcgccctccgtcacttgccgtcgccaatcgccgtcggtgagacacctcttccccttccacccctcccacgccgcttagccgccgcgccgccgcctagccgcgacgccgccgatgtcgctgtccgcgtcgccgcgacgccgccgccctccgccgccggccggtcgccgccggttgccgccttgcgtcgccgtgcgccttggccgccgggccggcttgagccgcccgtgcgtgccggccacgtgctcccgccgccgtccgatctacccggtagatcggggccgtccaaccccgccgcccgcgtggctgccacgtggctgccacgtgtgcgccgcgtcggcgccacgtgtgcaccacgtggtgtgccgctccttccccggattgccagacctatgactcagttgcttaagaaagacgagaaattcaagtggacagctgagtgtgacaagagttttgaggagctcaagaagaaattaatatctgctccagttctgattctgcccgatcagacgaaagacttccaagagcttgaacatctcaacttgggaatcgtagaacacgggttcgtggctgctctagaggcacggcctacgctcgtggatcaagtcagagcagctcaaataaatgatcctgagatagctgaactgaaaaagaatatgagggtcgaaaaagcccaggatttccttgaggatgaacatggcacaatctggatgggagaaagattctgcgtacctgctgacaaagagctgaaagatctgatactcaccaaggctcatcagactcagtactccattcatccaggcagtaccaagataacaccagaggcccgcaggattgttaaacctctccagatgccggaatggaagtgggaagagattggaatggatttcataacaggtctgcccaggacatcatctggccacgattcaatctgggaagaattggggacccgtttgaatttcagcacagcctaccacccgcagactgatggccagaccgagagggccagtctacaaatggcaccgttcgaagcgttgtatggccagaagtgccgcacacctctcttctgggatcaaacaggggattatgtgtacctccgtgtcactccgctccggggagtacaccatttacagacgaaaggcaagttggcactacgcttcgtgggaccatacaaaatcttggaacgacgaggaaaagttgcctatcagctagaacttccatccaacatgatcggcatccatgacgtgttccatgtgtcccagttaaagaaatgcttgagggtacccgaagaacaagccgattcggagcacattgacatccaagaagatctgacttatgtggagaagccagttcgcatcattgagaccagtgaaaggccgcccatccgcacctcttcgccagctcttccgaatctcggggtcgagatttcgtttatgggcgctccctcctcctccctctccctcccgagctgcctctccctcctcacctcctgggccgcctccaggcccaagccgagcggcgccctctcgcccgtgctgcgcacccccctcccgcgttctcccgtggcctcaccacctctccccgcctcctccctctctctcccgtgccgccggccgacctccagccgcccctgccgccgcctcagcacgccggccggccgtgccgtcgccttccccagcgtcgcagctgcctcctcttccccggcgccgcctccgattcatggggaaattgccggagacgcggccccgccggcttcaagtggctttgcctccactgtaccatctccagccatccctgccgcctcgcctgagcgccggccgacgtcgttgccacctctgtcggtgctgctgcgccatcctcttctccggcccggctgtggcgtcgcccgaagttcgccggaacgccgccgccgcgccaactgcctattcctcctcgtcggctcgtcgccccgctgcaccaccaccttcaccaacatcgcagcgttgtgttccacctccgcgcagccgctgctggctgccatcgtcatttcctcgtcaccgttcgtcctcgccgatcgacgtcccatcggtcgcccggctcgtcgtctcgctgcaccgccaccgtcgtcggcatcgcagcggcgtgttccacgtcatccttgcctctgtgcagctgctgccggctgccatcgtcatctcctcgccagccccggtcgtcatcgtcgtctcgttgttcccggtcgtcgtggcgttcgtccctccgtcaagccgttctcatccgtcgtccgcgtccgtcaagtgtgccgctgcaaccccatcgtcgtctttgtcctcgcctccgcgtcatcaagctctgcgccagccacgtcttgccttcgtccaaggatcgccgccgaagtcgccccctcgccgttcgtctccgccattcccgtccatctccgccgcgcccgttcgccgtcgtcgttcccacgcctcgtcgcttggtgcgccgccgccacgtgctccaccccgccgtcgtcgccggccgagctccatccgcgtcgtgccgccgcctccgtcgtcgccgcgggtcgccgtcaccgccgtaaggtgcgcgggagggtggagaagcccggccgcctgacccccgaagccgctgatcaccggagccccgtcgccgccgtcgaccgaagccgcgccgccgctagacctagtcgccggccgtcttcgttcgtcgtttggttcgagggtgagtaccgttgggttcgtctcgtcgtcctctacgtgtacatgtcctccaaagtcgcagccgaccatccaatctccggcgaggtcgccatcttgagcacaagactgagaagtggcggagataagcccacgggggtcgctggggagtccatgcctctggttattgagggggtgattatgatccaggaaaggcacggcggagcggcggccgagagaggggagggaaagggggaaacgaagcggcggtccacggctcaccccgggtcgacggcgacgacggaaacggcgaccggagcggaggaaggtggcggcgtggctcgggtggacggggtcgacggtgctccggcggtcggcgaccgaaacggagaggtggacgaggtcggcgaggatgcggcgaagccgaaggaggcggcgccgaggtgggaggtggtccggggcgacgacagcggcggaccggagctcggcggcgacggcggagagagagcgacggcgcgagctcgattccggcggggagagagggcggtgagtggcggaaacagtggtggggagctcggggagggtttatatagggttgggagtaagagagggcggccggaggaggggggaatgggcgcgggagacccggccgccattaatggcgccggcgag

SEQ ID NO: 81385 - DNA, 1407 bp, Oryza sativa
  Clone ID: PAT_MRT4530_80917C.1
atgacgcagttgctgaaaaaggtagaaaaatttgtgtggagcccgcaatgcgagaaggcgttccaaactctcaaagaaaagctagtctcctcgccagtgttgatcttaccggatactcacaaggacttcctggtgtactgtgacgcttcgcgccaaggattggggtgcatgctcatgcaggaaggtcatgtggtagcctatgcctcacgccagctacggccccatgaaggcaactaccctacccatgatttggagttagccattgtggttcatgctctaaagatctggcggcactatctcattgggaatcgctgtgaaatatatactgatcataagagtttgaaatacatcttcactcagtcggatctgaatcttcggcagagaagatggttagagctcatcaaggattatgatgtgggaatccactatcatcctggtaaggccaacgtggtcgccgacgctctaagtcgaaaaagccattgcaacgctcttggcgtccgcggcattccaccggagcttaatcaactgttggaagccctgaacctaagcatcgttagtcatggattcttggctactctggaagccacgcctaccttgctcgaccaaatccgtgatgctcagaagaatgatccagatatgtatgggatcctcaagaatatgaaacagggtaaagccgctggtttcacagaagacacagatgggcagaccgagcgtctgaaccagatcctcgaagatatgcttcgcgcatgtgttctagatttcgcgaagacctgggataagagtctcccctatgccgagttctcctacaataacagctaccaagccagcatacaaatggcaccctatgaagcgttgtatggccgcaaatgccggacaccgctattgtgggaccaagttggggaaagccaagtattcgggactgatatcctgagagaagctgaaacgaaggtcagaaccattcgggataatctaaaggtggcacagtcccggcagaagagttatgcagataaccgacgtcgtaacctggaattcgcagtggacgattttgtgtaccttcgggtcacgccattgcggagcgtacacaggtttcagacgaaagggaagctcgcacctcggtttgtgggtcctttccgcatcattgctcgatgcggagaagttgcttaccagttggagctgcccgcctccttgggcaacgtgcatgatgtgttccatgtgtcgcaacttaagaaatgccttcgagtgccgtccgagcaggctgactcagagcagattgaagttcgcgaagacttgacctacgtagacagaccactgaaaatcctggacaccatggagcgcaggaccaggaaccgagtaatccgtttttgcaaggtccaatggagcaaccacgccgaggaagaagctacttag

SEQ ID NO: 81386 - DNA, 561 bp, Oryza sativa
  Clone ID: PAT_MRT4530_80918C.1
atggcagtgaacgccagcttcagttcccatggttttggtgagggtcaccacgtcgctcagcttcgtgacctcgcccgcttccttggcttctcgtgtcccgagtacacggggtactccgtggaccgcgttcccactcgctgtgagctctctgtgtacctttaccctcgtggagccgaggggagggggcgcgcggaccgggtccacgggagtggggcccacgcggaagcctcacggtccacggtggaccgggcgcacccgggcacggcggagcggctgccgagagaggggaagggaagggggaaaagaggcggtggtccacggctcaccctaggtcgacgacgacgacgaaaaaggcggccggagcggaggaaggcggcggcgcggctcgggtcgacggggtcgacggagttccggcggtccgcgggctcggcgagggggtggacggggtcgacggtggtgcggcgaagccggaggaggcgacgccggggcgggagacggtcccggcgagcggagaaggccggccggaaacgggcgagggaggcgcggggagggtttatatag

SEQ ID NO: 81387 - DNA, 304 bp, Oryza sativa
  Clone ID: PAT_MRT4530_80919C.1
aaagggtgtcaagattgtcagaaatttggagcaattcagagggcaccggcgtcagctatgaatcctatcattaagccatggccatttagaggttggggaattgatatgatcggcatgattaatccaccatcgagtaaaggacataagtttatattggtggcaaccgattattttaccaagtgggtggaggcgattcctttgaagaaaggttgattctggggatgctatacaatttgtttaagaacatataatctatcgatttggtattcctcaaacgtaacagccctaaaatttgacaactttt

SEQ ID NO: 81388 - DNA, 384 bp, Oryza sativa
  Clone ID: PAT_MRT4530_8091C.1
cccccgggctgcaggaattcggcacgggcgccgctgctcgcttcctccccctctcccacgaaagatggcgtctcacattgttgggtacccccgcatgggccccaagagggagctcaagtttgccctggagtctttctgggatgggaagagcagcgctgaggatttggagaaggttgcgaccgacctcagggccagcatctggaagcaaatggctgacgctgggatcaaagcgctactcatggactggtggagagattgggttcagcacctacttctcgatggctaggggcaatgccactgtccctgccatggagatgaccaagtggtttgacaccaactaccactttattgtccctgaacttggtcctaacaccaatttctcct

SEQ ID NO: 81389 - DNA, 384 bp, Oryza sativa
  Clone ID: PAT_MRT4530_80920C.1
atgaccagtattgtctggcacccgtcgttcgcgatcgttgtgatcgtggtggttgtcgtggtcccgaacgggatcgtaaggagtttccctcagtatcgcttgaacggccctgatgtgctgggctggagtagtcgattgattccccacttctgtgttggacaccaagaccttgtggcttcggaagtcatctttgtcggctcgtggttcatgtcggaaggacaaagtttggccgtatcagaatccttctcgagcttggatgtcgtcgatattccgttctccgtctcgatgggaggatatttcgacatggaatcgccttggttcgtagccactgcgttctcgtctccggtcattggaggaccggttgagatcggcgtcgtggtgtaa

SEQ ID NO: 81390 - DNA, 479 bp, Oryza sativa
  Clone ID: PAT_MRT4530_80921C.1
aagaagagaggggtagaaagccaacaacaagagcatctaaatggacaagtaaaaaggaggactagaggtgatgaaagtttttttcttgtccaataagggctagtatctactcatgggtataaatatatacacccggagtaattgtaaatgatctcacagattaatacaactactctcggtgcatcgccatcctctttaccgagattttacttgacgcggggttgcatcggctttcgatcttcggcgaaggggtaagtcctacgttccgccggccttggcaattgtatcggctacattggtgttgttcaaggctgcatcgctttggtctcttggatcgctctggttcggttgatattttggcctacctatttatcatatatcttagttaatctagtttggtagcttgatttacttgtatcggctgagattcactttagggtttatgccggtattggctaaatcgctttgctagattagat

SEQ ID NO: 81391 - DNA, 1008 bp, Oryza sativa
  Clone ID: PAT_MRT4530_80922C.1
atgagctttcacccgttgatgactggggattattctgatttccagaagttggtggataaggccattcgacaggaggataagtacaaccgaatggagcagaagaacacaggattgctcacttcaaagctcagcaggggaatagtcagaggccgcgtctcattatgggacctcaggcagtgtcacagggaggatctccgtcagttgttcgtccgccgtgtcagttctttaacaacaatgctggcaacaacaaccgcaactaagctccacgtcctgttgcaactccagtccagcaccagcctgtcaagagggagcaaggaaacaagtcaggggtgtgcttcaactgtggtgaaccagaataactccaatgcacccacatcaaaggcccgtgtcaatcatgttgctgctgcagaagcccaaggtgctccaaatgtgattttgggtatgtttcctgttaactcagttcctgcaacagtgctttttgattctggtgccacacattcatttttgtctatgagttttgcgggaaatcatgggatggagatagaagatcttagacatcatttgatggttagtacccccagtaaccaagcactctcatcacaacgtagcccctctatcagaatagagattcaaggtgtaccatttctggccaaccttattctgttagaatccaaagaccttgatgtcatcctagggatggactggttagccagatataaaggtgtgacagattgtgccaatagaaaagtaaccctcaccagcaatgatggtcaagttgtaactgttcatgcattgccttctgagccgttaaggtcaagtctgaaccaaataactttggaagagattcccatagtacgggactacccggatgtgttaccgatgatttacctgattccgacgttcccggagagtccgattttgcaggagaagactttgaagagttccaaggctagcaaggcaagtcacacagatcccaaacaattctttgagcatgttgatcccgtttaa

SEQ ID NO: 81392 - DNA, 236 bp, Oryza sativa
  Clone ID: PAT_MRT4530_80923C.1
ttttgcccttttccccaccagaagctttaacggttaataaagcttttattcctaaaagccgccaagttctaaaggaactttcgctcaaagggtgtgaaacagaaaatgaaaccttcaccattttactctaaatacaagggctaagcaggcatgtggcctttttgtatctgcagaactttccctttgccacatcggcatgagtgctagcccattgaggcaatatgtagaacctatga

SEQ ID NO: 81393 - DNA, 2979 bp, Oryza sativa
  Clone ID: PAT_MRT4530_80924C.1
atggagaggagtagatgcgtacctagctatctacgtcttgcgtgcggggaggagccgcggggcgcgcccgaaggcggcctcgccggcacagccgacgggaggcggcgcacccgcgccccgatggtcgctgccggcgaccaccggcgcggcggggcggcgcccgagagaggggagggaagggggaaacgaatcggcggtccacggctcaccccggatcgacggcgacgacgggaacggcgaccggagcggagagaggcggcggcgcggctcgggtcgacggggacggcggcgttccggcgatcggcgaccgaaacggagaggtggacgaggtcggcgaggacgcggcgaagccgaaggtggcaacgccgaggcgggaggtggtccggggcgacgacggcggcggaccggagctcggcggcgatggcggagagagagagcgacggcgcctcgtgggtgattgctcctgcccaagcctctagtcatgatactcccggtcccatgtcaccgacaaggtcgctcacacaaggttcccgcactgtcacggagtacctgcacgagtttaatcgtctggctcgttatgctccgaaggatttgcgcactgatgaggagcgccaggagaaattcttggaaggacttaatgatgagctctcctacccacttatgactggagattatcatgatttccagaagttagtggataaagctattcgtcaggaggacaaatacaatcgcatggagcaaaagaagcgccggattgctcatttcaaggcacagcaggggaatagtcagaggccacgccttactttgggaccccagtccatgccacagggaggttcttcatctgttgttcgtccgcagcgtcagttcttcaacaacaacgcgggcaacaacaaccgcaaccaagctccacgtccggtggcaactccgtcgcagcaacagcctgccaagagggagcaaggcagcaagcccggtgtgtgcttcaactgtggagacccaggacattatgctgacaagtgtccgaagccccgccgcgcaaaggtcgtccctgcccagaacaactcctccgcaccagcagccaaggctcgtgtcaaccatgttgctgctacagaagctcaaggtgctccagatgtgattttgggtacgttccctgttaactcagttcctgcaaccgtgctttttgactctggtgctacgcattcatttttatccatgagttttgcgggaaatcatgggatggaggtagaggaacttagacgtcctttgatggttagtactccgagtaaccaagcactctcctcacaacgtagcccctctgtcagaatagagatccaaggtgtatccttcctggccaaccttattctgttagaatctaaagatcttgatgtcatcctagggatggactggttagccagatataaaggtgtgatagattgtgctaatagaaaagtgactcttaccagcaatgatggtcaagttgtaactgttcatgcattgccttctgaacctctaaggtcaagcctgaaccaaataacgttggaaaagattcctatagtacgagagtacccagatgtgttccccgatgatttacctgttatgtcttttggacttaccaatgcccctgctttcttcatgaacttgatgaacaaggtgttcatggaatacctggataagttcgtggttgtctttattgatgacattctcatatattcccgaactaaagaagagcatgaagaacatcttcgccttgcactagagaagctgcgagaacatcagttgtatgccaagtttagcaaatgtgaattctggttgtctgaagtaaagttccttggtcacgtcatctcagcaggaggagttgccgttgatcctagtaacgtggaatccgtaaccaactggaaacaacccaagacagtttcagagatccgcagtttcctaggcctcgcaggatattaccggaggttcatagagaatttctccaagattgccaagcccatgacacgactgcttcaaaaagatgatgggaaggtggtcgcctatgcatctcgtcagttacgtccgcatgagaagaactaccctactcatgatcttgagttagctgcagtggattatgacctgggaattcattatcacccgggaaaggctaatgtcgtagcagatgcccttagcagaaaaggctattgtaatgttatgggaggacgacagttgcctttggaattgtgcaaggagtttgaaaggttgaatctgggaattgtcagcagaggctttgttgcagctttagaagcgaagcctactctcattgatcaagtcagagaagcccaaattaatgatcctgatattctggagatcaagaagaatatgagaagaggtaaagctatcggtttcttggaagatgagcaaggaactgtatggttgggtgagagaatctgtgtcccagacaacaaagacttgaaggatgcaattctaaaggaagctcatgatactttatactccattcaccccgcctttgaagataccagaatggaagtgggaggaaatcggtatggatttcatcactggactacccagaacgtcgtcggtctagcgccgccgtcgccgccgccgctccagccgtgcgtcgccgtcgctccagtcatcaccgtcgctcgtggaggtcgccgtctcgtcgccgttctcgtccgccccttcgccgtcgctgtcgaccgccggagcaccgtcgccgtcgtcaagccgaaagttgccgccgcttctttctcgtcgccgacgtcgtccggtcatcgtccgccgtcgctttggtcgccggtgagttcgtcgtgccgcctgcaacccgtaggtgctttccgttcacgctgtcgtgccgtggttcgccgacgagctcgtgtggttcggtcgccgccggtggtgacgtcgtcgctgacgtcatcgtcgtcgtccatccgtgagccgcggtggatccaatcgatctcggccgtccgttgtagatag

SEQ ID NO: 81394 - DNA, 249 bp, Oryza sativa
  Clone ID: PAT_MRT4530_80925C.1
atggccacgctgccacagcgccacgccctggcggcccggaagcatgggccaccggaggattgccgttcactgggcctggtggtggtgggcattttatgcctggcggtgaagtacggggtagcgatgagggagcggtgggtggtggtgaagtacggaatagcgatgagggaggcgaggaatttggagattttgtgggttttagggtgtgaagttaaacacaatatcgaaattactgtccagagctcctaa

SEQ ID NO: 81395 - DNA, 382 bp, Oryza sativa
  Clone ID: PAT_MRT4530_80926C.1
cacattggaacttttttgccttgaaatctattccggttcactttttattgtggaacggcgccggggagcgacccggaaaatccagcccggccccggagggcgccaaatttttcccaaaaggaggacgatctaagactgggggaaaaaagaggaagagtcccgacccggggaaaaagggtaacgggccacaaacccacaaaaaaaactaccgggaaaaaaaaagagggaaggcggggggccccaaggggggagccaacccacctttctggggacgcgcaactgcccattttccacggggaaaattggccgaacacgcctagataaaaaaaactgcaaacccccggggagggggggtttgggtttggcccccacagggggtttt

SEQ ID NO: 81396 - DNA, 257 bp, Oryza sativa
  Clone ID: PAT_MRT4530_80927C.1
gacattttcggtattgttgagggtctgatgaccactggggatgccatcactgctacccagaagactgttgatgggccctcatctaaggactggaggggtggaagggctgctagtttcaacattattcccagcagcactggagctgctaaggctgttggcaaagtgcttcctgtcctcaatggaaaattgactggaatgtctttccgtgtcccaactgtcgatgcttctggtggtgatctgactggtaggcttgagaa

SEQ ID NO: 81397 - DNA, 870 bp, Oryza sativa
  Clone ID: PAT_MRT4530_80928C.1
atggcccgacagggattgctgggtaggggaacgattagagcgctggaaccggtgactctcccccttcgtcggcgccggcgccggcgcaagagccggtgcggacgagcgcgggcacgacgcggcgcgccgggccgatggaggaagacgggcggcggcggcgggcgagcgcctagcggtagcggagccgaggaaggaggcggcggctgcggaggggggtcgagggctcggtgcgggtgcgggtgcgcgtgcgcggcgaaggggactaggggtaggggaggcgaggggcgagcgaaccggggtgaggacgagggtgacgggagagcggttttgggcgagtgcgaaggtttgctggactcaccgagagaacgccagaacggcagcatgtcgacactcccggtccagattaacccagctccgccgatcgaacattcgacggcagaagagcctgtgctagcaatcattatccctaacctgatcgatcagccgatcctctcaatccgtctcccggcccaggccgcccccctaatttggccgtatcccggtgcacgtcaaatcaagatcaagaacgacaaaagggggagctgcatccaccagcgacaggggaacagcggcggcgggcgggggcagagcggcggcggcgagctcaccttccacgacgaccgcgtcgacctgcctcgccacgacggcgggcgggggcagagcggcggcggcgagctcaccttccacgacgaccgcgtcgacctgccgcgcgctggtcaccgcccaacgccccggcgctgtccatggcgcgtaccgcgcaggccaacggcgtgtggttgtggagctcaggggagagtccttcacctacactcgccgcatttcatgccctag

SEQ ID NO: 81398 - DNA, 502 bp, Oryza sativa
  Clone ID: PAT_MRT4530_80929C.1
ggaaaaaggagcaacggggaggcgagatttggaaggaggaggcggcggcactgtgcacggcacggctggctcgggcgaaagtttctttcttgtccaataagtatctacccatgggtataaatatgtacacatggagtcattgtaaactatcttacatatcaatacaactactttcgccgcatcgccaccctcttttccgaggattttacttatcatccagtggaagatggcacctgacgcggggctgcattagcttttgatctccggcgaaggggtaagtcctatgttccatcggcccagacaattgtatcggctacattggtgtgcttcaaggctgcatcgcttcgatctcttggatcgcttcggttcggttgatatatttccctacatatttatcatatatcttagctaatctagtttagaatcttaatttgatcatatcagctgagattcattttagggtctatgttagtattggctaaattatctagctagattaaat

SEQ ID NO: 81399 - DNA, 205 bp, Oryza sativa
  Clone ID: PAT_MRT4530_8092C.1
gcggcactcaccaaggcgatgatgaatgagctcatcaagctggactccatagccgtcgactgcgaggttaaggagcaatgtcgagtgctggacaagcgcatgcataattacattgaggcccttgacgccatccgtgccaggaccaaaaaagcgagaaggggcgcgccccaatgcccgatccacgcacctgtacgcgtggacgcta

SEQ ID NO: 81400 - DNA, 408 bp, Oryza sativa
  Clone ID: PAT_MRT4530_80930C.1
gttctttcttgttgtctgttgtctgggttcttttgttgtgtttttcgtgaaattccaagcgcggcttccttgtggggacgcgaaacttcacctgaggcgctttggacctcagtacagcggacccctgcgccgggacaaggaaaggcgccccctgttttaggggggttgaagccggccccccccccagcgcctcttggggggggtttttttggttttggcccacggccgggctcaaagcccgatcctggggggcgccccttggggccccatgggaaaacccgggggggtgttggcggcccccccgctgggggggggccccggcccttccccccctggggtgcatgggccgccgccccgccccccgggggccggggcagcatttcggccccccctgaaccgtgggggggg

SEQ ID NO: 81401 - DNA, 376 bp, Oryza sativa
  Clone ID: PAT_MRT4530_80931C.1
gtcctcggccgaccgtaaccgaagcgcctgcaccgtcctccgcgcgtccgcccctcactctcccagccggcggcagcggcagcggcgaggtaagcctgaggccggtcggcgggccgaggcgggagagaagggcggcgccgcgacggcggccggcggccgcggcagcccggccgagctcctcggcgaccgtgcgagggccgcgacgccagtgggggaggccttggagttgggcggcggcggaggcacggggaggaggagacaggcagcggccagcggaggggcggcgccgcgcagtggggagcggcaaggcggcggcgtccacctctcccctctctacctctattacctccgagtcttcaccggcgaggaggccacg

SEQ ID NO: 81402 - DNA, 458 bp, Oryza sativa
  Clone ID: PAT_MRT4530_80932C.1
gcgagccgccgcgcgctgctcatcttccacaggccgccgcacaccgtggcctcctcgccggtgaagactcggaggtaatagaggtagagaggggagaggtggacgccgccgccttgccgctcctactcgcccgccgccatcctcgccacgccgtttcccatccaccacgccacgccgctttcccatccgccaccccactgcgcggcgccgcccctccgctggccgctgcctgtctcctcctccccgtgcctccgccgccgcccaactccaaggcctcccccactggcgtcgcggccctcgcacggtcgccgaggagctcggccgggctgccgcggccgccggccgccgtcgcggcgccgcccttctctcccgcctcggcccgccgaccggcctcaggctgtcaggcacagagagcgagaggagtaaccgaggaagagggggagagtgactcagcctga

SEQ ID NO: 81403 - DNA, 982 bp, Oryza sativa
  Clone ID: PAT_MRT4530_80933C.1
gcacgaggaccaccgccgccgctcccccgcctaacacggccacgcgcgctcaggtgagcagcggaggtagcttacctcgctacggcacggtgcgacgcgagacgccgcgccacgcgttgtttcagggaggagtactactgcaagcagggcggcggcgccggaggaagggaggcggtgggggggggtcgtctcttgggcgatgggttcgtccacggagcacggcggcgccggcgggaggggcaagaaggggtcggggtcgcagctgtggaagaaggcgctgctgcattccagcctgtgcttcgtcatgggcttcttcacggggttcgcgccgtcgtccgtgtcggactggacgtccgcggccgtgtcggcgggcggggtggggagcagccacgtggtgaggtcgctgcacgccacgggcggggcggccgtcaaccggagccttctggcgcaggccgccgccggcgcggtggacgccgggccgcagccgctgctggtggtggtcacgacgacggagtcgacgccctcggcggccgggcagcgcgcggcggcgctgacgaggatggcgcacacgctgcggctggtgccgccgccgttgctgtgggtggtggtggaggccaacccggacgtggcggccaccgcgcggctgctccgcaccacggggctcatgtaccgccacctgacgtacaaggacaacttcaccgtcgccgacgccgccgcgggcaaggagcgccaccaccagcgcaacgtcgcgctcggacacatcgagcaccaccgcctcgccggcgtcgtcctcttcgccggcctcggtgacacgttcgacctccgcttcttcgaccagctccggcagatcagaaatgattggcacccctcaactaacggaagaggggaggccgtcgcggctgtcctttctccaggaccccgaggcgatagcacaatgcgtggtcggtcgctggctgatgctgcataaaacgccacctccccc

SEQ ID NO: 81404 - DNA, 158 bp, Oryza sativa
  Clone ID: PAT_MRT4530_80934C.1
cccacgcgttcgcggcagagccagtccaagccaaggttgtccggcggcagtagggacagactcgtcctctccggcgccggcagcagccagtccaagccaaggttgtccgtagcctttcctttaccgctccgacctgcctcctgtttcgcttgccagtt

SEQ ID NO: 81405 - DNA, 133 bp, Oryza sativa
  Clone ID: PAT_MRT4530_80935C.1
gggttactaaattgtaaaccttttcattagagagctgaacagttcctggtgaataaacagttcccccaatgaatgcaaactgcaaaattagttgcatttgcccattgatacaactctgttataagcttgaaag

SEQ ID NO: 81406 - DNA, 372 bp, Oryza sativa
  Clone ID: PAT_MRT4530_80936C.1
atgttgggcctgttcactttgtggatttccaaagggcaacacaacaacatcgtctggaggttcgccggcgacggcgataacggggacccgcctttctgcaccaaacatctgccgatcttcagggtcgacggtgctcggcgacgagaagaagctcgtggaggcgtcggcggcgagttggtcttcctcggccacgaattctcggcgtgcttccgggccgagcaattcctggcagcgttgaagcccagatgcgcctacctcgtcgacgactgccgtctagatgagaaagaatattgccggcaagacattggcagatgggagatgaagagaggtcagatggaagggctccccgacgacgacggtggcggcggataa

SEQ ID NO: 81407 - DNA, 306 bp, Oryza sativa
  Clone ID: PAT_MRT4530_80937C.1
atggctgtacgcctgtacgataaaaactccagcgccggtgaccgcggtccacggtgcaccgatctcccgggaaggtgcagccgcccgcccctgtgcccccaccacccccacccccgccacggtctctgtctggtccacgaagacccggtgctctcacagcgatccaccggggagcagcacatgggcgctgcctggcacgtggcaggagccggctcgctcgctctcttcgcgataaggattagccctcgtgaacctattgccatcgagacccgtaccggccggccgggccggcgcgcccctaaataa

SEQ ID NO: 81408 - DNA, 3654 bp, Oryza sativa
  Clone ID: PAT_MRT4530_80938C.1
atgtcatccagcttcgtcaacaacagcgtcaacaccaacctcaacaaagtattccctgcttcaacaatgctggtgtggactcaagtcagcgaaatcgtcttcccggtttacaccacaatgccgatctcagccagtccatcaatgaccggaaacgagaacgcagtggctacaaaccaagacgactccatgtcaaaagatcctcccgccgaggcggagaacggaacatcgacgacatccgagctcaagaaggattctaatgcggccaaaccttgtcgttccgacaagaaccgcgagccgacgaagatgacttcagaagcgacaagagcagagaatcaattggccactccggcccagcacatcagagccgtcaacgctatactgagggaaaccccctacgatcctgttctgaacgacaatctcgcgcgttggacagaacgactacgggaattagtgaccaacctcagcaacacgttcaaagaggccgctgccgcagcgcacccggagcagccaccaactggcgatgccaatggtgaagaccctgaacggagggaatcgcctcatcgagccacccctccacctcgcggcactggcgatctccgagatcacctcaacggccgccaagaggcacgacgcacacgagacaatgagaatcattccctgcgtcatatctcttcatggcgccataataacgaagatcgaggagaccgctcaaacgaggaccgagaccgtgataaccgccacaaccgccatgatcacaacgattgcgaacggcgggtgccagacgatactggtcgagaacgtcaccataacgacgacgatgatggagaccaacgccgagacaacagcgggagacgacgacaggattctcgagatccaggccgccatcctcgtaatcgcaagcgagtacgcgtggtcgaaaaggatgcggaggcggctccccaagaatcggattcagcatatccagactctgacctccacgtttcacacatcttcggaggttccacaatgtactcctcaaagcgagaatacaagaaagtggaacgcgaagtctgttcgacatggcagggggctgcacccaagatgaagtggtctgaacagaaaatagagttctcggaagaagaccaccccaagaccgccgtcatcccaggacgatatccgatcgtggtcgaacccactattcggaacatcaaggtcgcgcgggttctcatcgacggtggcagctcaatcaaccttcttttcgccaacactttggacgcaatgggaattccgcaaagcgagttgacaccaaccgatcaacccttttatggaatcactccccaatcctcgtctagaccattgggcaatattacgttgcctgtgactttcggccaagctaacaacttccaaacggagcagatcgcctttgatgtcgctgaattcgatacagcttacaacgccatcatcgggagaactgcacttgcaaagtttatggccgcatctcactacgcgtatcaagtactcaagatgccgggaccgaagggaacaatcactattcaagggaacgcaaagctggcggtgcaatgcgacaaacggagcctcgacatggtcgagcaaacgcccagcccacccaccacgattgagccaccgaagaaaccgtccgacatgccgggggtccctagggaggtgattgagcacaaactcatggtgcgacccgatgccaagccagtaaagcaaagactgcggagatttgcaccagaccgaaaacaagccatacgagaagagcttgacaaacttctcaaagctggcttcatcagagaagtacttcatccagagtggctagccaatccggtcatggtacggaaggccaacggaaaatggagaatgtgcgtcgatttcatcgacctcaacaaggcgtgtcccaaggatcacttccctcttcctcgaatagatcagctggtggactcaacagccggctgtgagctgttgagttttctcgacgcttactccggctaccaccaaatcagcatggcaaaagaggacgaagagaagacagcattcatcacgccgttcgggaagtgcacgttcggagtaccgtcgggcaagctgctcggtttccttgtctctggcagaggaatagaagcaaatcctgagaagatcaaggcaatcgagaacatgaaatcgcccacaagactcaaggaagtacaaaagttaaccggatgcatggcagcactgagtaggaagctacgccactactttcaagcccacagagtcacagttgtctcctgcttccctctcggtgaagttgtgagaaacaaagacgttgtcagccgcatggcgaaatgggtcatcgagctgagccaatttgatgaccactttgtgccacgaacagccatcaaatcccaggtactcaccgacttcgtagccgattggactatgcctgataacaaatcagacaaccaagtcgacaacgaaacgtggacaatggcgtttgatggtgcacttaacagccaaggagcaggggtaggatttatcttgacgtctccttccggagatcaattcaagcacgcaatccacctcaacttcagggtgaccaataatacagccgaatacgagggactactcgccgggataagagctgcagccgcacttggggtcaagcgactaattgttaaaggggactccgagctagtcgcgaaccaggtgcacaaagattataaatgctctaaccccgagttatccaagtatctcgcagaagtcaggaagctagagaaaagcgaggagttgcccgaggacgatacagaggccgagaaaataacccgtaaagcaaaaatctactgtatggtcggcaacgatttatacaagaaagcgccaaacggggtacttctcaaatgcgtctcgtccgacgacggcagacacctcctccttgatatacatgaaggcatctgttggtcacatgccgccggtcggacattggtcgggaaagcctttcgacaagggtttttctggccaatcgccctcaaagatgcatgcgacatggtccagcgatgtgaagcctgtcaattccacagtaaacacacaaagctacccgcgcaagcgctccagactatccctcttacttggtcattctcgtgctggggcctagatattctcgggccattcccacgaggacagggcggctacaggttcctattcgtggcgatcgacaaattcactaagtggatcaaagcagtacccacgggggaaatcaaggccaacaacgccatcaaattcagcaaggggatattttgtagatacggactaccgcaccgcatcataaccgacaacggctcccagttcatcagcactgatttccaggattactacatcgagctgggagtcaagatatgcttcgcctcggtctctcaccctcaaagcaacggacaagtcgagagggcaaacggtatagtactacaagggatcaaaacccgcgtctacgacaggctcatgtcatatgacaaaaaatgggtcgaagaactcccattagtactttgggccatacgcaccacatcgacaacgtctaacaaggaaacacccttcttcctcgtgtacggctccgagtccatgcttcccagcgagccacgacatcagagtacacgagtacagaagcactccgacgaggaccaggaggagcagtga

SEQ ID NO: 81409 - DNA, 846 bp, Oryza sativa
  Clone ID: PAT_MRT4530_80939C.1
atgacggagctcgtggctcctcaccgggagaccgcgcaggcccccctttgccagttcggccgggggcttagggtgagatctcaagctctctctgtgtgtggacagattgcgtgccaggaagaaacgcgagacaccggcgatgtatacaggttcgggccgctgggaagccccacacctacctccactcccggcggagacaggcgcaacgtgggatcgtggctgtctgttgctgacgcgaccagtgtcagaccggtcacagatcgcatcttgcctgtaatggttgggatgaagcctggtattcatctaaccagggctaacgtgccatctctaagagaccggataaaggagcgcgctgcattgcgctgcatgcagcgtgacacgcttgaccagaccgcaataaatgcgtgcaaaccccacaaggggtcggggcacctcggccctcggggccggggcaggagcaacccgaccccccctcggggaaatcaggaggagggcggacacctcaccctcgggcccgacgtccccgaaggtgccaggccacgtgggcgattccatctgcctcaagcctccgggcgcaatactcccggtcccatatcaccgacagtagcccccggcgttatgtcagggcgatcatccttctcaagggaagcggtgggaccggtctccgtgattgggcagaaacccaacggtctcaaaccacgcatatcggtaacggtgtcttggccgtcagtcatgggcggtctcttcaagactgccacatcacttgagcagcgctcgaatctgggcgtgcagattcgtttcgtctggagatatggtaacgtcgcttcggtcggcgatcgtaattaa

SEQ ID NO: 81410 - DNA, 2937 bp, Oryza sativa
  Clone ID: PAT_MRT4530_8093C.1
gtcctcctcctcctcctcccctcgccgtcgccgccgccgctcgcttcctccccctctcccacgaaagatggcgtctcacattgttgggtacccccgcatgggccccaagagggagctcaagtttgccctggagtctttctgggatgggaagagcagcgctgaggatttggagaaggttgcgaccgacctcagggccagcatctggaagcaaatggctgacgctgggatcaagtacatccccagcaacaccttctcgtactatgatcaggttcttgacacggctgccatgcttggtgctgtcccagagcgctactcatggactggtggagagattgggttcagcacctacttctcgatggctaggggcaatgccactgtccctgccatggagatgaccaagtggtttgacaccaactaccactttatcgtccctgaacttggtcccaacaccaagttctcctactcttcccacaaggctgtgaatgaatacaaggaggctaaggcgctcggcgttgacaccgtgccagtacttgttggaccagtttcatacttgttgctctccaaacctgccaagggtgtagagaagtcgttcgctcttctttcccttctgagcagcatccttcctgtctacaaggaggttattgctgagttgaaggcagctggtgctacttggattcagtttgatgaacccacacttgttcttgaccttgactctcaccaattggctgcattctctgctgcatacacagaacttgagtcggcactttctggattgaatgtgcttattgagacatacttcgctgacattcctgctgaatcatacaagaccctcacatccctgaacagcgtgactgcttatggttttgaccttatccgtggagccaagactcttgaccttatcaagagtgctggtttcccctctggaaagtacctctttgccggtgttgtggatggacgcaacatctgggctgatgatctcgctgcatctctcactacccttgagtctcttgaggctattgttggaaaggacaagcttgtggtctcgacttcctgctcactcatgcacaccgctgtggatcttgtaaatgagaccaagctcgatagcgagattaagtcatggctcgcttttgctgcccaaaaggtggttgaggtgaatgcccttgctaaggcattggctggacagaaggatgaggcttactttgcagcaaacgctgctgctcaggcctccaggaggtcatcacctcgtgtgacaaacgaggaagtccaaaaggctgctgctgctctgaaggggtctgaccaccgccgtgctaccaatgttagcgctagactggacgcacagcagaagaagctcaaccttccagtccttcctacaaccacaattggttcattcccacagactgtggagctcaggagagtccgccgtgagtacaaggcaaaaaagatctctgaggaggagtacatcagtgccatcaaggaggaaatcagcaaggttgttaagatccaggaagagcttgacatcgatgtccttgttcacggcgagcctgagagaaacgatatggttgagtacttcggtgagcagctttctggttttgcattcactgccaacggatgggtgcaatcttatggatcacggtgtgtcaagccaccaattatctatggtgatgtgagccgccccaaccccatgactgtgttctggtccaagttggcgcagagcatgacctctcgccccatgaagggaatgttgactggtcccgtcacaatccttaactggtcttttgtcaggaatgaccagccgaggtttgagacatgctaccagattgctcttgccatcaagaaggaggtcgaggaccttgaggctggtggtattcaggtcatccaaatcgatgaggctgctttgagagaaggtctgccactccgcaaggcggagcatgctttctacttggactgggctgttcactccttcagaatcaccaactgcggtgttcaggacaccacccagatccacacccacatgtgctactctaacttcaacgacatcatccactccatcatcaacatggacgctgatgtgatcaccatcgagaactcccggtccgacgagaagctgctctccgtcttccgcgagggtgtgaagtatggtgctggcattggcccctggtgtctatgacatccactccccaaggatcccgtccacagaggagattgcggaccgcgtcaacaagatgctcgcggtgctcgacactaacattctctgggtgaaccctgactgcggtctcaagacccgcaagtacaacgaggtcaagcctgcccttgccaacatggtttcggccgccaagctcatccgcacccagctcgccagcgcgaagtgaggatatccatagctgcaagttcccttcgattttgaggaggaatgccatcatagccatcttgtttttgaataatctgggtccagtggatccaattgtctgtggttaggtttagtcagtctcttggggccaagatcactcatacccattttacttttgaatcaatttggtggtttttgaggcagtttgtcggtgtatttgtattgtatgtaatctgagtgggaatcagcagtgtttcatctgcatctgaatcgttgcggatcaaattacaaaattttcaaggagagttcttgatgttatggtcttccaactacctaagtgttttgtgtcagttgttcacctgagttgagagtggttgatttctgatgattccttgctggtggagatcactttgcattttatttagatataaagccagtcacttgaaatagttagatgttgggatttgaacacattgttgtaagcatgcaacattagcaaactgttcatggtcatttctggtctggttgcttggatcaggacatgaaatcggacttgaaagtggaacaaaagtatgcttgcaatgagcagt

SEQ ID NO: 81411 - DNA, 420 bp, Oryza sativa
  Clone ID: PAT_MRT4530_80940C.1
atggggccagataaaatttcattaaatactttgcttaattctataattcctagatttttctgggatttatttgagctaaggaacgccatagcgccgtgtgccctagcgccgccgtcgccgccgtcgctccagtcgtgcgccgccgccgttctagacgtcgccgtcgctcgggaagaccgccgtcgtggtcgccgtcgcgtcgccgtcctcgttcgccctttcgccgtcgccgaagatcaccggagcgccatcgccgccgtcgacccgaagaccgccgccgtttcttcgtcgtcgccgtcgccgtccgttggtcttccgccgctcctttggttaccgcatggttcattgcggggcaccagactgagaagtggcggagataagcccacgggggtcgctggggagtccatgccttgtttataa

SEQ ID NO: 81412 - DNA, 5790 bp, Oryza sativa
  Clone ID: PAT_MRT4530_80941C.1
atgccgggggtacccagggaggtgattgagcacaaactcatggtgcgacccgatgccaagccaataaagcaaaaactgcggagatttgcaccatatcgaaaacaagccatacgagaagagctcgacaagcttctcaaagccgaccaactggtggactcaacagccggttgcgagttgttgagcttcctcgacgcttactccggttaccaccaaataagcatggcaaaagaggacgaggataagacagcattcatcacgccgttcggggtattctgctacgttaagatgccattcggactaataaccacaggaaacactttccagcgcacggtccaaggtgcacttagtgaccagctcggaaacaatgtcgaggcttacgtcgatgacattgttgtcaagaccaagacaagcgactcattgattgacgatctgcgggaaacgttcgacaacctccgacgatatcgccttatgctcaatccagagaagtgcacgttcggagtaccatcgggcaagaccccccgagctctcctctacccgtcgcccccttcgccttcgcctctcgtcgtcggagaagccctagcgccgtgcgccctagctcagccgtcgccgccgtcgctccagccgtgcgccgccgccgttccagccgtcaccgtcgctcgggaaggccaccgtcgggatcgccaagtcgccgccgtcctcgtccgttgcttcgccgccgtcggagaccgctggagcaccatcgccgtcgtcgaaccgaagagctccgccgcttcttcttcgtcgccgccgccgtccgttgggtttccgccgtcgttttggtcgccgatgccgcgctacaagcctgagtacttgtttggtgttgagggttttgtccaggagttgcgtacaatgtcctttgtcattggatttgggactgcccctttttatgcccagattcctcatgatcgtcatgaagagaagtgccgagtcaaagtcaccttgaacagtaatagtgaagatatcccctcagtgatgttcgaagctggaggaagaaactacatccatgcaagtcaggaggtggcaaggatcgccataggagagctccgcgatcgttacagtgatcagttggccgatactgagtatcgctatcatcctcgtcaaccccagggaagtgaccgtggcagctaccttgagactgaaggaattgagaatgatgctaccacaaggcatttggttgagatgctgtgggctatggatgaaagtcgtgcggagactgtgttagcggctcaagatcgtgaagatcggaatcgtggtaagatttgcaagctagaagacaaggtggatcgtttggagaaggaactagccgcattgaagggagaagcaccaccgcagaaggccaggattcgtcttaccgcaaggaagagagctctatttgtccctcgctatcaattggcgccaaaggttcgtgtggtggagaaagaagttgccccaactctagcagatcctccggtcaacatcataagtgatgatgaggaagaagaatccaagcgcaaccattccaagattgagtgggtagcaactcaagatgatgaagatgagccgaaagagccttcaatcgacctccgatgctcggaagaactagacaagatggtgaatactcgcagcaatgggaatggccccaacaatcccaataataataacaatgaagggaacccaactcttgcccaagtcctggctcaacaggtgcaacttatgaacatgatgatgcagcaacttcagaatcagcagaaccaaggaaataaccatgcacctccgcagaacaggttaactgattttcttcgtgtgaggccacctaccttttctagcactaccaacccagtggaagcaggtgattggttgcatgccatagagaagaagttggatttgcttcaatgcactgatcaggagaaggtctcatttgcatcgcatcagttgcatggccctgcctctgaatggtgggatcatttccgccttaacagaactactgctgaacctatcacttggcttgaatttaccgctgctttccggaagacgcatataccatcgggagtggtgtctctcaagaagaaggaattcaggtcgctcacccagggatcacgctctgttacggagtatctgcacgagttcaatcgtcttgctcgttatgctccggaagatgtgcgcaatgacgaagagcgtcaggagaagttcttagaaggacttaatgatgagctttcttattcactcatgattggagattatcctgatttccagaagctagtggataaggctattcgccaggagaacaagtacaattgcatggagcagaagaaacgccggattgctcaattcaagacacaacaggggaataatcagaagccgcgtcttactttaggaccccagtccataccacatggaagttcttcgtccgttgttcgtccgcagcgtcagttcttcaacaacaatgctggcaacaacatacgtaatcaagttccgcgtcctgttgcagctccaacacagcaacaacctatcaagagggagcaaggcagcaagcccgcggtgtgtttcaactgtggagatccaggacattatgctgacaagtgtccgaagccccgacgcgtgaaggttgtccctgctcagaacaactctactgtaccagtatcaaaggcccgtgtcaatcatgttgctgctgcagaagctcaagatgctccagatgtgattttggtccgggagtatcccgatgtgttcccagatgatttacctgaaaagatacatcagaccaagttcatcaccatggggagctccgacaagttcgtggtggtctttattgatgacattcttatctactcccgaactgaagaagagcatgaagaacatcttcgccttgcactagagaagctaagagaacatcggttgtatgctaagtttagcaagtgtgaattttggttgtctgaagtgaagttccttggtcacgtcatctcagcaggaggagttgccgtcgatcctagtaatgtggaatccgtaaccaattggaagcaaccaaagacagtttcagagattcgcagtttcctaggcctcgcaggatattatcgaaggtttatagagaatttttccaagattgctaagcctatgacacgactgcttcagaaagatgtgaagtacaagtggtcggaagaatccttagaagcgaagcccactctaattgatcaagttagagaagcccaaattaatgatcctgatattcaagagatcaagaagaatatgagaagaggaaaagctatcggtttcttggaggatgagcaaggaactccgtcgccgccgtcgctccagccgtgcgccgccgccgttccagccgtcaccgtcgctcgggaaggccaccgtcgggatcgccaagtcgccgccgtcctcgtccgttgcttcgccgccgtcggagaccgctggagcaccatcgccgtcgtcgaaccgaagagctccgccgcttcttcttcgtcgccgccgccgtccgttgggtttccgccgtcgttttggtcgccgagcaccaggttgagaagtggcggagataagcccacgggggtcgctggggagtccattacctctggttttgagggggagattatgatccaggaacggtgcactgtagtggattgtgttgtgcgagagaggaatagaagcaaatcccgagaagatcatggtaatcgagaacatgaggtcgcctacaagactcaaggaagtacagaagctaaccggatgcatggcagcactaagcaggaggccgaagaggcattcattgcattcaagcgctacctatcaaatccacatgtacttgttgcccctcaacctaatgaagaattatttctctatattgccgccacgccatattccgttagcactatcattgttgttgagagagagaaggtgcaactaccagtctactatgtcagcgaagctctccacgacgtaatgacaagatatccacagatccaaaaactgctctacgcagtaatcatgacatcaagaaagctatgccagtacttccaagcccacagggtcacagttgtctcctccttccctctcggtgaagtcatgagaaataaagatgttgtcagccgcattgccaaatgggtagtcgagctaagccaatttgatatccacttcgtgccacgaacagccatcaagtcccaggtactcgccgatttcgtagccgattggaccatgcccgataacaggtcagacaaccaaatcgacaatgaaacgtggaccatggcattcgacggcgcactcaacagcaagggagcaggggcaggattcatcttgacatcaccttcgggagatcaattcaagcatgcaattcacctcaacttcagggcaaccaataacacagccgaatatgaaggactactcgcggggataagagttgcagctgcgctcgtagtcaggaagctggagaaaaggttcgatgggatcgaggtccgacatgtataccgcaaagacaacatcgaaccagatgatctagcacgacgtgcgtccaggcgagagccactcgaacctggcacctttctggacgtcctaaccaggccatcagtgaaagaggcaagcggcgaagatagcccggtcgcccccgacatcagctcgggggctatagaggcagagcgcaccgttgccgatatcgagaccacggacgactggcgcaccccactcattaaattcataggcagcgaagagttgcccgaggacgacgcagaagtcgagaaaatatcccgtaaagcaaaagtctactgtatgatcggcaatgatctatacaagaaggcaccaaacggggtactcctaaaatgcatcttgtccgacgacggcagacacctcctcctcgacatacatgaagagatctgtgggtcacatgccgccggtcggacattagtcggaaaagctttccaacaagggtttttctggccaaacgccctcaaagacgcctgcgacatggttcaacagtgtgaagcctgtcaattccacagtaaacacacaaagctgccagcgcaagcactccagactatccctttcacttggccgttatcgtgctgggggctagatatactcaggccattcccacgaggacagggcggctacaggttcctattcgtggcgatcgacaaattcaccaagtggattgaagcgacacccacgggggaaatcaaggccgacaacgccatcaaattcatcaaagggatattctgcaaattcggattgccccaccagcaattgacaagtcgagagggcaacggcataatactacaaggaatcaagacccgcgtctacgacaggctcatgtcacacgacaagaattgggtcgaggaacttccatcagtactatgggccgtgcgtaccacaccgacaacgtccaacaaggagacacccttcttcctcgtgtacggctcagaggcgatgctccccaccgagctacgacatcaaagtacacgagtacagaagtattccgatgaggatcaggaagagcagcgatacgacgatgtgaatctactcgaggaacatcgcgaacgagttgccgttcgagcagccagctaccaacaagcccttcgccgttaccacgagaagcgcatccgagcacgcatgctttcgatcggcgactacgtcctccgacgggttcaaagccaagcagggcgcaacaagctctcacccaaatgggaaggaccgtacacgatcacgcaagttttgcggccaggtcaaaggtccaagagccttatcttccgagaagaattctccgatgacaaggctggaggctag

SEQ ID NO: 81413 - DNA, 334 bp, Oryza sativa
  Clone ID: PAT_MRT4530_80942C.1
gggcagaattacatcacagttttaaattttcaataaagccactaggttagtagtactaggactccaaagtctccaatagtccaattacatttgtagtgtaatttacatcctgaactaagtaaacatactaatggaaaatgcactgatcctccattaggattcatacatactcctcggatataatgtgcagaaaaggaaatgacacgatgcaatcaggggctcaagagaagtttcatcatcaggtcatcagctttaatttcaacctctttttcttggcgggagccaaacctagatcgttgcacagctgctcattaggttgcagcgtctttggaac

SEQ ID NO: 81414 - DNA, 412 bp, Oryza sativa
  Clone ID: PAT_MRT4530_80943C.1
atgcagctcaacccgaaagcaagaactcgtcgaaataaaactaaagcaaaaaagactctatccatgtgtggcaatcatcaagaagcacatcaactcaacccgatgatgtataccgagtcgtattgttggaatcggctgtatcggcttatccaatctgacccggacttagccgatcccgatcgtagccgatttggactccagccgattcttattctgttcccgaatcgatcttcgtctttgattccgcttcgatctaattttcattttcgatactagatattaccaaatttggtcgttaacaattatattttcgaaacgaaatttcaaacccttactgggcaccactcacggcctcccacgaatcccggcagagcagcctcctcatgccggcgtgtgcttcaccgtcgtcgcc

SEQ ID NO: 81415 - DNA, 303 bp, Oryza sativa
  Clone ID: PAT_MRT4530_80944C.1
atgccggtgttcacctactgcatcaaaacggcctacatccacaacgccaacgcgagctcatgcaggcctatggcttcatcaagtaccgtagccagctcgagcgacagcggtggtgggctggtcgatggcggatccagtggtagcggtggcacagcagctccgtccccaatgacgatgatgacgaggtgggcggtggcggctgtgtgcggcggcggtcgcgacggcgacgacaaggaggcggtggaggctttgtgcgacgataacagcgacaacgaggatggcggcagtggctgcgagtcatag

SEQ ID NO: 81416 - DNA, 501 bp, Oryza sativa
  Clone ID: PAT_MRT4530_80945C.1
atggtggtaccaattgagatgttcaggttcttccagaacagcaacatcagccacttcatctggaatacattctgtgatatctccaacagggtagaatttgatgctgaaggaaggtctgaaactgatcctctcctcaatccagcgacgaacataggcctcatgctccaaaggcgaaccgaacacaatcttattcgggccgcccggaacaacgggttgatggccgttcctgtcatccatgggaggcttgcagtggcggggccacactccccagcgttgttggagcttggacggattggggacttctgcggatctgctggctgctggctgctggctgcggaatttgctggtgtcacgctacgatgggttgacaaggacctcgtcgcagctctaccccttccccttcttcatcgactgccgacgatgccaaggaaaagggactgtcgccgcaacaacttccgccagcatgtcaatctagacgatgaatactatgctctcaagtag

SEQ ID NO: 81417 - DNA, 1863 bp, Oryza sativa
  Clone ID: PAT_MRT4530_80946C.1
atggctgacaatgagaaaggcaataaggtcagaagtcaggacattggtacctcaagctcccgagtgaatgaaacaccagacaccagttgtgtggcagtggtccaacacctgattaaccagaaccaattgcttatagagatactacagcagcatcggatgccaattttgaacccgagtcagatgcaacctcaagtgcagttggaggcagtccaagcactcacaccacaagtcagcgcaccgccaacatcccagaaggcccctcatgccatgccacatgttgacccaaaagaagcaagtatcatctgttttatgtgtgatgagcaagggcactatgcaaggaactgtcctcagcagaaaagaaaagcaccaatgcgaaccgaagatgaagtccgtaagatgatcattaccagcacagaatggcctccaccaggaatgacaaaacatcagagaagaaattccttccgaggtgcacaacagttgacagagcatcttttagctaatggaggtagagtgtctgatagtgaagattcagatcaagtctcctcagatgatgaagatgaaatggaacgtaaggcatgctctcgttggggagaagtcggtcatgttgccagcttgtgtgccactacctgctttcattgtgaggaagaccatccacccggtgaatgccccatgagcaggatcacttgtttcttttgtgaaggaactgatcatgtaccaaaagattgtcaattcagttttctgctgacgaagaagatggccaaccaacccgccagttccaacggagagaagcatcaaggcaacacaaatccccgccaagatcaccgtttcagcctaactccagtgccaggacagaggaatcgaaatgagaaaagaaaatgccgagtccgggaagacatctgttgcttcaattgtcaaggaatgggtcatttcgccgacaagtgcccaaaaccgagaaacatagctgccggcacgtcagtccacgcaactccctgcaatcagaagcttgctcctcaacgaattgtcctccatgcatcccgaagcagtcctatagcccgcgttgcaacagctccaattccaatgagtgcactaccacaaggtgtcgatgctcaatttcagccccagccaccagctgacaagacagaggccagtatctgcgttgtacctttggaagttccaatacagcagctgagaaatcaagtacaagatgaagaacccgagttgaaggagggcattactccaaaaactgtccccaaccaaggcaaaatcgacctccacattaccgccaatttacacgaagcagacattccaaccgtattgtggtcactggagcaaacgccgtacccgtttcaccgaaaggcagcaagccaaaggacctcatcgtccccagaagcgtccgcaatccacattaaagaataccacctgatagagataggccgaaagatgattgataaaaagagattggcaaagatgttctctagcatgaaagaagtaggccgaaaggtgattgataaacagaaacatgttctgcatcgctcacggaagacccctgattgtaattgccccgcaacagtcaccttgtcattaagtaagcaagatgacctagttgataacttgtccgaggttgactccgaagatatgaatcatgagaagttctggaacggaagcatcactgcactaccgcaacctagtctgagtcagccaaaaggtgcaccctggtccaagtcaggtgaagagaagattccatccgcaacaggaggtcaagccaagcagttccgagtggtgaagttttgctggaagtttgtcaagacgcaacggaagaagtcagacaagaagagaagaccgcccaacctatcttcttgctag

SEQ ID NO: 81418 - DNA, 2528 bp, Oryza sativa
  Clone ID: PAT_MRT4530_80947C.1
ctcgtaaactgaaccagagccttggaggatgcatcagtttacctgcatcaagcactctcaggacttgaagtaacccgtcgcgcctcccctttccccccctcctccctgcacctgatgagcagccacccactcctctaccccgctctccccccattgccgccgccgcctgcgacggccgggagctcatcccgagacgacgtctctagctagcatcgagcgttctttctctcctcgggctctcggtgctgagataaggcaaatcaagagagcaaaattttggtggtacatgtggtgattctatgtcgacaaggcgtcatcttgcagtatttaccactgcaagcctcccatggatgacaggaacggccatcaacccgttgttccgggcggcctatcttgcaaaggatggggatagggaggtcaccttggtaatcccctggctttctctgagggaccaagaattggtttacccgaataagattgtgttcggttcgcctttggagcatgaggcctatgttcgtcgctggattgaggagaggatcagtttcagaccttccttcagcatcaaattctaccctgcgaagttctctaaagaactgagaagtattctacctgttggagatatcacagaatgtattccagatgaagtggctgatgttgctgttctggaagaacctgaacatctcaattggtaccaccatgggcgcaaatggaaaaataagttcaggcgagtgataggtgtggttcacacaaattatatagcatatgtgaaaagagaaaagaatggacaagcgattgcctgtttcatgaagtacatgaacacctgggttacccggatttattgccacaagattatcagattgtcaggtgccacccaagatcttcccagatctgttgtgtgcaatgtccatggcgtgaatccaaaatttcttgaggtaggtaaactaaagttgaagcagctgcggaatggggaaatagccttcacaaaaggggcatactatattgggaagatggtgtggagtaaaggatacagggaacttcttgacctgctgtccaaatatcagagcaagttggtgggtttggaagtagatttatatggtagcggagaagattccgacgaagttcgaaaatctgcagaacttctgagtttggccgtgaaggttcacccaggacgtgatcatgcagatcccctgttccatgactataaagtattcatcaaccctagcacaacagatgtggtctgtacaacaactgccgaggcccttgcaatgggaaagattgtcatatgtgccaatcacccttcaaacgagttcttcaagcagttccctaattgccgcacctatgacagtggcgaggaatttgtacaactaacgctggatgctctagcagagcagcctgctccactgactgacatgcagagtcatgacctatcttgggaggccgcgaccgagagattcatggaagccgcggagctgaaccttcctatctcagcagagccaagaatccatcaaacatccaaggtctctctccctgcttttatgaggactcgtaaactgaaacagagcttggaggatgcatcagtttacctgcatcaagcactctcaggacttgaagtcacccgtcgcgccttcggtgctgttccgaagacgctgcaacctgatgagcagctgtgcaacgatctaggtttggctcccgccaagaaaaagagggggaaggagagcgggaggcagacaggcagtcatccaagtgtgcctcgccgacatgttgacgcgcctttcaacggtggcaaggccgagtggcgccaacggaaggtggtggagaccgacgtggagacggcgaccgcggcgcccaagccaccgctttttttcccgcgccgagacagcgacgcgtcggccccgccgtatccgcctctcccgatcctcctgtccccctacccccaggacgggctacccctgccgctcttctcactcgatgcggaaacacccctggacacccagacgtgggccccagtgcgcgcctcgcccgagggtacacggtggactgtctacgccctgccgcccgccacgggtggcccggagcgccctactcgacagcttcgcgccacgaaacgtttgaaatcacaccaccctgcttttgtgaatttccccctaagcagattgaacaaatttgccggcaaaagcccaaagggcacgtcgcgggcttctgctcagctcaagacgaggagactggtggagtttctgcttctttttgtcagactcacgtgtgctaatgacaatcggactagtgtgcatcgggagggacccactgggtagctgatgacctgatgatgtaacttctctttagcccctgaatgcatcgtgtcatttccttttctgcacattatatccgaggagtatgtatgaatcctaatggaggatcagtgcattttccactagtatgtttacttagttcaggatgtaaattacactacaaatgtaattggactattggagactttggagtactagtactcctcacctagtggctttatc

SEQ ID NO: 81419 - DNA, 3366 bp, Oryza sativa
  Clone ID: PAT_MRT4530_80948C.1
atggcggcatcgggctctgtctcctgccggctggaggatgtgacattgcatgagttcaataacctggcccggtacgccccggaggatgttcgtgaagatgaagaaaagcaggaaaagtttctggcaggaatggaccctgaactttctgtgcgtctggtctctggggattaccctgatttccagcgcctgtcgcagcaacagcagaatcagcaagggaaccgtgcaccccgtccccttgcaccggccgtgcagcctggtcaaggtcgcagggatgttcaaggtcagcagcgtctatgcttcaactgcttcgagcccaggcacttcgctgataaatgcccgaagccgaggagccagcaaggccaagcgcctccccgccctaacaacggtggtaaggatgccacccggggtcgtgtgaaccacatcactgcagagaatgtgctgacaactccagacgtcatcgttggggctatgacagcaaagtattatagcccggtcgtacctatagagatccagggaattccttttcccttggatctgatccttctagacaccaaggacttggatgtgatcctcaagatgaattggttgacccaattccaaggagtagtggattgtgcaagacgtactgtcaccgtgtaccagaagcctgatcaaccagttgttttctttgcgcacccgactcccaccggcagctcagtacttcatcaactaggactgtcagaaatacccgttgtcagtgagttcggtatgccgcccaagcgggagattgagttcaggatagatcttgctccaggaaccactcccctgtacaagcgaccctaccgtatggcagcaaatgaattggccaaagtcaagaagcagttggaagagttgaaagagaaggggtatatacggccgagcacttccccctggggtgctcccgtgacttttgtagaaaagaaagacaagacaaagaggatgtgcgttgactaccgagctctcaatgaagtcactatcaaaaacaagtaccctcttccccagatcgatgatctgttcgatcagcttaaaggtgccactgtcttttccaagattgatcttcgttccggatatcaccagttgcgtatccgcgaagaagatatccctaagaccgcattcaccacgcggtacgggctgtatgaattcacggtgatgtcgttcggtctgaccaacgctcctgccttcttcatgaatttaatgaacaaggtgttcatggaatacctggataagttcgttgtggtctttattgacgacatactggtctactcacagtcagaggaagaccatcagcagcatctccgtctgctcagcaagtgtgaattctggttgtccgaagtcaagttcttagggcatgtgatatctgctaaaggagttgccgtggatcctgaaacagtaacagccgtcaccgatttgaagcaacccaagtcggtcacccaagtccgcagtttcttgggtttggcagggtactatcggagattcatcaagaatttctccaaaatttccaggcccatgacgcagttgctgaagaaggaagaaaaatttgtgtggagtccgcagtgtgagagagcatttcaaactctcaaagaaagctacgaccccatgaaggcaactatcctacccatgattttggagttgaccgctgtggtccatgctctgaaaatctggcggcgttatctcattggaaatcactgcgaaatatacaccgatcataagagtttgaaatacatcttcacccagccggatctgaatcttcggctaagaagatggttagagctcatcaaagactatgatgtgggaatccactatcaccctagtaaggccaacgtggtcgccgacgcgctgagtcgaaagggccattgcagtactctttgcgtccgtggcattccaccagaacttaatcaacagttggaagctctgaacctaagtgtagttagccatggattcttggctgcactagaagcaaagcccaccttgcttgatcaaatacgcgaggctcagaagaattatccggatatgcatgggatcctcaagaatatgaagcagggtaaagccgctggcttcatggaagatgaacacggaaccttatggaacggaaatcgtgtatgcgttccggacaacaaggaatttaaacaattgatacttcagggagctcatgaaagtccttattccatccaccctggcagtacgaagatgtacttagacatgaaagagaaatattggtgggttagtatgaagcgggaaatcaccgagttcgtggccctttgtgaggtgtgccagcatgtcaaagcagagcaccaacgaccggccggactgctccaacctctacaggtaccagaatggaaatgggatgaaattgggatggatttcatcaccggacttccaaaaactcaaggcggatatgattctatatgggtagtcgtggatcgactaaccaaggtggctcggttcattcctgtgaagaccacctatggagggaacaaattagatgaactttacttcgctaggatcgtgagtctccatggcgttcctaagaaaattgtatctgataggggaagccaattcacctctcacttctggaagaagctccaagaagagctgggtacccgattgaatttcagcaccacttatcacccgcaggcagatggacagaccgagcgtctgaatcaggtcctagaagacatgctccgcgcctgtgttctagattttgggaagacctgggataagagtctcccctatgcggagttctcctacaataacagctaccgagccagcatacaaatggcaccctatgaagcgttgtatggacgcaaatgccggactccgctgttgtgggaccaagttggggaaagccaagtgttcgggaccgatattctgagagaagctgaagctaaagtcagaaccattcgggataacctaaaggtggcacagtctcggcagaaaagttatgcagataaccgacgccgcgatctggaattcgcagtgcacgactttgtgtatcttcaggtcacgccactacagggagtgcataggtttcagacaaaggggaagctcgcacctaggtatgtggggcctttccgcatcattgctcgacgcagagaagttgcttaccagttggagctgcccgcatccttgggcaatgtgcacgatgtgttccacgtgttgcagctcaagaaatgtcttcgagtgccgtccgagcaggccgattcagtgcagattgaagttcgcgaagacttgacctacgtggagaagcctgtgaagattctggacactatggagtgcaggacttggaatcgggtaatccgtttttgcaaggtcctgtggagcaaccacgccaaggaagaagctacttag

SEQ ID NO: 81420 - DNA, 368 bp, Oryza sativa
  Clone ID: PAT_MRT4530_80949C.1
acgctttgatactttcaccgtgccattcgtccaagaaagtttaaagatgtagcagtttggcatgcatgttgtgtcctctcctattggagattcgcactacgttttctaatgaggcgagactgtttggtactgtttttttaagggactttggtgatactaaatgcatttctgtcagtggccgatcgagacagaaggggttgctgttgacttgttttgtttgtgtgctgtgtagtacttataccagctagaacccatttaccacccataatagcacattgtaatgatccttgggaatggatgaaagtattaagcctaaaaaaaaaaaaaaaaaaaaaaaaaaaaaaaaaacaaaaaaaaaaaaaaaaaaa

SEQ ID NO: 81421 - DNA, 356 bp, Oryza sativa
  Clone ID: PAT_MRT4530_8094C.1
actaaaagaatatgtttaaatccattaaccagatgcaaaataggcttggtgttctcttaatgcatacacaatttaatctgattgtctgatactgtatgatgtatccctgttactacatactgaagggacagggacaactttaaggttttacaaatgtacaacgggtgcttattctttgaatcattcatataatcatacgtaatgtcggaaccatgcttgacgtgaaagaattacaccgtcttttaactacaatctcctaagcaacggcacgcttggttctgaaaaactcacgattggttaggcatgcaccatgggcatacaagcaaatccgactgttggcgaccttacttctacaa

SEQ ID NO: 81422 - DNA, 6147 bp, Oryza sativa
  Clone ID: PAT_MRT4530_80950C.1
atgccgcgctacaagcccgagtacttgtttggtaccgaaggatttgtccaagagttgcgtacgatgtccttcctcatagggtttggaattgcccttttgtatgccctgatccctcatgaccgtgatgaagagaagtgccgagtcaaagtcaccttgaacaacaatcgtgaagatattccatctgtgatgttcgaggctggaggaggaagctacattcatgcttgtcaggaggtggcaaggatcgccataggagagctccgagaaagctacaatgatcggttggccgacaccgagtatcgctaccatcctcgtcaaccccaaggaagtgatcgtggcagctaccttgaaccagctgggatcgagaacgacgctaccagaaggcatttggttgagatgctgtgggctatggatgaaacccgcactaagattgtgatagccgctcatgatcgtgaagattggaatcggggaaagatctgcaagctagaagacaagatggtgctcactcgcagcaacgggaagggccccaacagcaacaacaacaataacaacaacgccgagaatcccacactcgcccaggtcttggcccaacaagcacagttgatgaatctgatgatgcagcaactccaaaatcagcagaaccaagggaataatcatgcgcctcctcagaacatgttggcagagtttcttcgcgtgaggccacctgttttctctagcaccactaatccggtcgaagctggtgattggctgcacaccatagaaaagaagttggatctgctccagtgcacagaccaggagaaggtctccttcgcgtcacaccagctgcatggccctgcttcggagtggtgggatcacttccgcctcaacaggactacccctgaacctatctcttggcttgaattcaccactgctttccgaaagacgcatataccatcgggattggtgtctctcaagaacaaggagttcaggtcgctcacacagggttctcgcacagtcacggagtacctgcacgagtttaatcgtctagagaagttcttggaagaacttaatgatgagctctcttaccccctcatgactggagattatcatgatttccagaagctagtggataaagctattcgtcaggaggacaaatacaatcgcatggagcagaattttgcgggaaatcatgggatggaggtagaggagcttagacgtcctttgatggttagtactccgagtaaccaagcactctcctcacaacgtagcccctcgatcagaatagagatccaaggtgtacccttcctggccaaccttattctgttagaatctaaagatcttgatgtcatcctagggatggactggttagccagatataaaggtctgatagattgtgccaatagaaaagtaaccctcaccagcaatgaaggtcaagttgtaactgttcatgcattgccttctgaacctctaaggtcaagtctaaaccaaatgactttggaagagattcctatagtccaggagtaccccgatgtgttccctgatgatttgcctggtgccaccgttttctccaagatagatcttcgatcagggtatcaccagttgaggatcaaagaggaagatatacctaagacggcttttactactcggtacgggctgtttgaatgcacagttatgtcttttagacttaccaatgcccctgctttcttcatgaacttgatgaacaaggtgtttatggaatacctggataagttcgtggttgtctttattgatgatattctcatatattctcaaaccaaagaagagcatgaaaaacatcttcgtcttgcattagagaagctgcgagaacatcagttgtatgccaagtttagcaaatgtgaattctggttgtctgaagtgaagttccttggtcacgtcatctcagcaggaggagttgccattgatcctagtaacgtggaatccgtaaccaactggaaacaaccaaagatagtttcagagattcgcagtttcctaggcctcgcaggatattatcggaggtttatagagaatttttccaagattgctaagcccatgacacgattacttcaaaagcatgtaaagtacaagtggtcagaagaatgtgagcagagttttcaagagttgaagaatcgcttaatatcagctcttattttgattttgcctgatccaaagaagggttttcaagtgtattgcgatgcatccaagcttgggttaggttgtgttctgatgcaagatgggaaggtggttgcctatgcatctcgtcagttacgtccgcatgagaagaactaccctactcatgatcttgagttagctgcagtggttcatgcgttgaagatttggcgtcactaccttttcggcacccgtacagaggtgtatacggatcacaaaagtttgaagtatatctttacccaaccagatctgaacatgagacagcggagatggttggaatggattaaggattatgacctgggaattcattgtcacccgggaaaggctaatgtcgtagcagatgcccttagcaggaaaggcttttgtaatgctatggaaggccgacagttgcctttggaattgtgcaaggaatttgaaaggttgaatctgggaatcgtcagtaaaggctttgttgcagctttagaagcgaagcctactctcattgatcaagtcagagaagcccaaatcaatgatcctgatattctcgagatcaagaagaatatgagaagaggtaaagctatcggtttcttggaggatgagcaaggaactgtatggttgggtgagagaatctgtgtcctagacaacaaagatttgaaagacgcaattctaaaggaagcccatgatactttatactccattcaccctggtagtattaagatgtaccaggatctcaaggaaagattttggtgggcaagtatgaagcgtgaaattgcagaatacgtagcagtatgtgatgtttgtcagcgagtcaaggcggaacatcagaaacccgcaggtttgctgcagcctttgaagattcttgaatggaagtgggaggaaatcggtatggatttcattactagactacccagaacgtcgtcaggccatgactctatttgggtaatagtcgacagacttaccaaagcggctcatttcattccagtgagagccacctattccgggagtcgtttggcggaattgtatatggcaaggattgtgtgtttgcatggtgttcctaagaagatcgtatccgatcggggaagtcagtttacctcaaaattttggaagaagcttcaggaggagatgggttccacgctgaatttcagtactgcttatcattcgcagacggatggacagaccgaaagagtaaatcagatattggaagacatgttgagagcttgtgttttagacttcggtggaagttgggataagaatttgccttacgcagaattctcatacaacaatagttaccaagctagtctacagatggctccttatgaagcactgatagatgtcggacatctatatgcggagattattggtttacttgacaagatcatggcagcttctgcaccatctaattttaacttgcggtctattcttgagaaagagaagttgactggaacaagcttcatggattggtatcgcaacctgagaattgttctcaggcaagagcacaaagagtttgtgcttacacaaccttttctagctgacttgcccaacaattctcctgctgctcaacgtatggagcatgaaaggcgatgcaaggaataccttgatataagctgtctcatgcttgctactatgtcccctgagcttgaaaggcaatatgaggcattggatgctcatacgataatcacgggactacgtaacatgtttgaggaccaagcaagagctgagaggtttaatacctcaaagtccatgtttgcatgcaggcttgcagaaggtaatccagtgagcccacatgtgatcaaaataattggttacaccgagagtctggataagcttggctttccccttagccaagagttggctactgatttgattctccagtcgctccctcccagctttgagccgttcataatgaatttcaacatgaacaacctaaacaggaccttggcagaattgcatgggatgctaaagactgccgaggaaagcattaagaaaaactccaaccatgtgatggttatgcataagcgcaagcccaacaacaagaagagtggtcaaaagagaaagctaaactctgatgagatcatgagtactagcaactctaagaccaaggttcaaaagacagggcccgctaaggatgcagagtgcttcttttgcaaggagacaggtcattggaagagaaactgtaagaaatacctagagcagctcaagcagaagcagaaggatggaaagagttccacctcaggtattaatgttatagaaattaatattgctacttcctctactgattattgggtatttgataccagaggtggttttgggtactttattacctttaccgacgactctagtagatatggttatgtctacttaatgaggcataagtctgagtcctttgaaaatttcaaggaatttcagaatgaggtacaaaatcatttgggcaagacaatcaagtatctacgatctgatcgtggtggagagtgcttgagccttgaatttggcaatcatctaaaggagtatggaattgttccacaactcactccaccaggaacacctcagtggaatggggtgtctgaacggaggaatcgtacattgttggatatgttgtggaagcaccggcttcacgaaggtccgataggatacggcgtacacctgcgagacaacgatgaacctactacctatgaggaagaaatggtgggaccagactctgagaaatggcttggagccatgaaatccgaaacagaatctatgcatgtcaatcaaatttggaactctgttgatccacctgatggtgtaaaagccattgagtgcaaatgggtctttaagaaaaagatagatgtagatggaaatgttcacatctacaaggcacgattggtggcaaaaggtttcagacaaattcaagcgattgctgcctatttcgattatgagatatggcaaatggaagtcaaaacagctttcctcaatggaaatctcaatgaggatgtgtacatgacacaacccaagggatttgttgatccacaatcagctaaaaagatatgcaaattgcagaaatccatttatgggttgaagcaagcatctcggagttggaatattcgttttgacgaagtagtccaggcgttgggcttcttcaaaaacgaagaagagccttgcgtatacaagaagattagtgggagcgcactggtgtttctaatcctatatgtagatgacatattattgattgggaatgatattcctatacttgaatccgttaagacatcgttgaaaaatagtttttcaatgaaggacttaggggaagccgcatatattctgggcataaggatctatagagatagatcaaagaggctaattggattaagccagagtacatacattgacaaggtgttgaagatgttaaacatgcaagattctaagaaaggtttcttaccaatgccacatggcattaatcttggcaagaatcagtgtcctcaaacgactgatgagcgaaacaagatgagtgtgattccatatgcctcggcaatcggatccattattgattcctcgacaagggtttctacacatataccacgctacaagcctgagtacttgttcggtaccgaaggatttgtccaggagttgcgtacgatgtctttcctcataggatttgggattgcccctttgtatgcccagatccctcatgatcgtgatgaagagaagtgccgggtcaaagtcactttgaacagtaatcctgaagatataccatcagggatgttcgaggctggaggtggaagctacattcatgcttgtcaggaggtggcaaggatcaccataggagagctccgcgaaagctacaacgatcggttggccgacaccgagtatcgctaccatcctcgtcaaccccaggggagtgaccgtggtagctaccttgaacctgcggggatcgagaacgatgctaccacgaggcatttggttgagatgctgtgggctatgaatgaaactgtcgcgaccggaaaaattgccttttcccgaacgctagtgtattaa

SEQ ID NO: 81423 - DNA, 1899 bp, Oryza sativa
  Clone ID: PAT_MRT4530_80951C.1
atggtcgccgccggcgaccaacggcgcggcggagcggcggccgagagaggggagggaagggggaagcgaaggaggcggtccatggctcaccccgggacgacgaggacggcggaaacgacaaccggagcggaggaaggcggcggcgcggttcggatcgacgaggacggcggcgctccgacagtcggcgggcgaaacgaaggggtggacgaggtcgacgggaacgcggcgaagccgaaggaggtgacgccgagtcgggaggaggtccggagcgacgacggcggcgaaccggagctcggcggcgacggcggagagagaggaagacggcgcgggcacgaatccgacggggagagatgtattttagagtcgttttgggacgcgacagaatgtgagcagagttttcaagaattgaagagtcgcttaatatcagctcctattttgattttacctgatccaaagaagggtttccaagtgtattgcgatgcatctaaacttgggttaggttgtgttctgatgcaagatgggaaggtgattgcctatgcatctcgtcagttacgtccgcatgagaagaactaccctactcatgatcttgagttagctgcagtagttcatgcgttgaaaatttggcgtcattatcttttcggtactcgtacagaggtgtataccgatcacaagagtataaagtacatctttactcagccggatctgaacatgagacaacggagatggttggaattaattaaggattatgacatgggaattcattatcacccgggaaaggctaatgttgtagcagatgctcttagtaggaaaggctattgcaatgctacggaaggacgacagttgccattggagttatgtaaggaatttgaaagattgaatttgggaattgtcggtagaggtttcgttgcagccttagaagcgaagcccacactaattgatcaagttagagaagcacaaattaatgatcatgatattcaagaaatcaagaagaatatgagaagaggaaaagctatcggttttttggaggatgagcaaggaactatatggttgggtgagagaatctgcgtccccgacaacaaagatttaaaagatgcaattctgaaagaagctcatgataccttatactccattcaccctgaatacgtagcagtatgtgatgtttgtcagcgagtcaaggcagaacatcagaaacccgccggtttgttgcagcctttgaagattccagaatggaaatgggaggaaatcggtatggatttcatcagtggtttacccagaacgtcatcaggtcatgtctctatttgggtgatagtcgacagacttaccaaagtggctcatttcatcccagtaaagacaacatattctggtagtcggttggcagaattgtatatggcaaggattgtgtgtttgcatggagtccctaagaaaatagtgtctgatcgaggcagtcagtttacttcaaatttttggaagaagcttcaggaagagatgggttctaagctgaactttagtactgcttatcatccacagacagacggacaaaccgaaagggtgaatcagattttggaagacatgttgagagcttgtgctttagacttcggtggaagttgggataagaatctaccttatgcggaattttcgtataacaatagttatcaagctagtcttcagatggctccttacgaagcactgtatggtcggaagtgccgcactccgcttttgtgggatcaaacgggagaacgtcaggttttcgggacggatatcctaagggaagcagaagaaaagattccgacgtttccggagagtccgttttcgcaggagaagattttgaagagttccaaggccagcaaggcaagtcacacagatcccaaacaaccctttgagcatgttgatcctatttaa

SEQ ID NO: 81424 - DNA, 679 bp, Oryza sativa
  unsure (1)..(679): unsure at all n locations
  Clone ID: PAT_MRT4530_80952C.1
gcatcatnatttccaacgnacccaccactnnnaaatggnnaaataccggnnagctnnttagttgtgcatcttgaacaacgacccctctaaatgcgtactccggaggctaagttggtaatgaacctcccctgactcgtgctaaggctaagggtaaggcctcaactcttgctacaactaaatctcacaagagaagcactagatcaggtcgactgattggtccacggttggatccacgaagccagaagattatatatgacatggacggttctatccttgccataaccaacttagagtcaccccggcttcaagggccttattcggagccgcctcctaagaggaggaaaacgcctcggtgttcgtccccaggacacagaagattgctgccattctaatggtgaacatatggtgaaaaagaaattctgacactgtccactggcatgatgatatggtgtccaacccgttgtgcatctgtgtgaaagctttttgtccttttaaccagctaagtagagctagcttctgtaaaatgtatcgtgggtacaccatgatgtatgtttctttgctaggcttcgaaatggatgcttgctaaaatatgggcgtaggtattttgcatacaatagatggtgttgacaccctgtgaactttgtaaggtcacttccagttgagaaactatccttcgtgt

SEQ ID NO: 81425 - DNA, 926 bp, Oryza sativa
  Clone ID: PAT_MRT4530_80953C.1
atgtctcccctcgcccttcggcttttctttgcgaaacggtttttcaaaattctcctccttgtccctccaattcttatagttgttaaaccgtggaggacaaactgtcagcttcgtgtctgttcggaagtcaagtcaagcatcaagcttcgtgcagcaaagagcgagaaggggtatgcagatggtcagtatcagagagaagagcaacaacaacggtgtatgaaagtcacagatcaatggatcagtcgaaagctaccaggatcagaagatgggtgtattgatgcaggagatgcaaagctcgatgcaaggtcgaatgtagcggaagcaactctagcagtaatgttgataccgcaaccgtagagtccaaagcagcagatgcaacgacaatgtctccgacaacaagtacaagctcagatgcaagccggaatcaggatcagagcgaaagtcagtttgttttccaagagcaagcacctgcaacctcagacagtacgccaccaagtcttcagcagaccagcacagctaagtcaccaccaatcccagaggcaacaagtgctacctatagtggttatggtttacaagttgaaggttcaaccagtgccgcaatcagggtagcacttgaagaagcaagttgcaaggtatcagaagaattaagccgatccccgagcaaccgattgaattctaaggttatcaaactgccagtgtcaacagttcagatcaagataagtaagtttcgtgagcagccacagttctggtctgggtcagttcaagcagaactagccggtctagttttcgcaaagcaaaggaacagaaaggtcgaatccagccagttcaatcgtgcagatcagtcaaaccgcccaccagcaccagctttctttctagccatcccagaatctcgggacgagattcctgtaaggggggtagatttgtaa

SEQ ID NO: 81426 - DNA, 876 bp, Oryza sativa
  Clone ID: PAT_MRT4530_80954C.1
ttagaggatgtattttagagtcgttttgggacgtgacacatccttggctggcttcttctctccccccgtctttggcttgtcgttcttgcgtctcaatgcgtcgtccgcatgagcgcatcgatcggtgacctcgaacaatctttgagtagttgtgattcgccttgttgccaactcctgagtagtatagcgatctctgaccccggttttgaaaaagcgaatcacagaggcgtcggtgatttcggggattgtatttctgcactcattaaagcaccgaacatagtccctcaaagattcgcccggattttgtgttaacgcgtgtaggtcgtcttcgatcgcgtggcgcttgtaagttccttggaagttagcgacgaattgctgccacagatcgatggcaaatacgtcgcgtggtgtactggaggatgatgagccatagtcttcgagcaagtgtaggactgacgactcgtggggatcgatgtcgattactccaatgaatcgatccgagatcaacgtcgctccttgttccttgtctgcatccttaagagagatttttgattgctggaccttaggaagcggcgtcttaatggcgcagagaaggaccttgtagcttgagaagtcgtgattcttcatcttctcaggctcgtatgacgtcgacgtttcgttctccgctacggcgggaggatccttcgacatggagttgcccggggttatagccacggcgttctcatttccggtcattgatggaccagccgagataggtaccgtggtgtaaaccgggaagacgatttcgtcgacttgagtccacactagcattgttgaagtagggactccttggatggggccggtgttgacgctgttgtcgatgaagcttgatgtcat

SEQ ID NO: 81427 - DNA, 127 bp, Oryza sativa
  Clone ID: PAT_MRT4530_80955C.1
tttaagctcacagttcagttctaccacgtacaacagcagatttgagagagggagaataagacacgggaagaggtatggagcttagctagccatcacatggtttttccgctttccgatttttgacttt

SEQ ID NO: 81428 - DNA, 469 bp, Oryza sativa
  Clone ID: PAT_MRT4530_80956C.1
ctttgctacggattttttttccctggccaagtttctgtcctacctgatcaccgtgttcatggtggccatggccgtcttcttctcgtccaggatggctggctgggccgtctgccccggcgccggcggcatcaccggaggatgcgtctccggcggcgaggacgtcgccaagacctgcctcgccttcgcgctgctcacggtggcggcgcaggctcacctcgcgagcgtgctgctgatggatgagaagaagaagaggaatccgccggcggcgagctgggtcgcgtggctgctcgccgtcagtacctgtgcgtccgtctccggcatgttcctcgcctacatcagctacggcggcttcgtggcggcgacctcgctggagtggccggtggccggcgtcgcctccgccgtcaacctcgccgtcgccgcgtgcaccgtcctgcgttacgtgcgtgtgaacggggatatggacggttag

SEQ ID NO: 81429 - DNA, 775 bp, Oryza sativa
  unsure (1)..(775): unsure at all n locations
  Clone ID: PAT_MRT4530_80957C.1
ctctttgcttctgcaactcacagtcaatggcggctgaaatggcgttagtgaaacccatctccaagttctcttccccaaagctctcaaacccgagcaaattcctctccggccgacgtttctccaccgtgatcagaatgtcagcctcttcctcaccgcctcctccaaccaccgccacctcgaagtccaagaagggaacgaagaaagagattcaagagtcgcttcttactccgaggttctacacgacggacttcgaggaaatggaacagcttttcaacacggagatcaacaagaaccttaacgaagcagagttcgaggctctgcttcaagagttcaagaccgattacaaccagacacatttcgtgaggaacaaggagtttaaagaagctgcagacaaattgcaaggacctctccgacagatcttcgttgagttccttgagcggtcttgtactgctgagttctctggtttccttctctacaaggagcttggtcgaagactcaagaaaacaaaccctgttgtggctgagatcttctctcttatgtctagagatgaagcaagacatgnccgggttcttgaacaagggattgtctgatttcaacttggctcttgatttgngtttcctgacaaggcaaggaaatacactttcttcaagccaaaattcatcttctacgcgacttacttatccgagaaaatcgggtactggagatacatcacaatctacagacacctcaaggaaaacccctgagtccaatgttacccaatcttcaagtactttga

SEQ ID NO: 81430 - DNA, 207 bp, Oryza sativa
  Clone ID: PAT_MRT4530_80958C.1
atgcattactactcaaatcagaatccatctaatatccaagtattacctatccatttcagcatcaaaggagaaaacaacatcaacaagggagatcggaaaaaccaacaaatcattaccgaatccataaaaaatcaacttgccaaggccatccccaagttctcggtgatcgaatctagcgccgagctcacaggaaccagcaacccatgg

SEQ ID NO: 81431 - DNA, 239 bp, Oryza sativa
  Clone ID: PAT_MRT4530_80959C.1
ggggttgataaatggggtaagggtttttgggggaccaattgggacaaaggtaccacgaaaaacatggaaggccataatttattcaccattggtttataggcgggcggaccaaagagagtacttcggatttataaaccccagggaggggtacaaaagggtagggtaagaagccaaggaaccagttttcggggtcctaggagaacactagaagtactcaactggaaatggcccatggggga

SEQ ID NO: 81432 - DNA, 1851 bp, Oryza sativa
  Clone ID: PAT_MRT4530_8095C.1
atggcgagagataagcaatctgctttaatcgtcgcagcgttcgtactcctctgttcagggtgtttgtgcggagttgcagatggggcgaagggagggaggaagacgaaagggccggtgatcggcatcgacctcgggacgacctactcgtgcgtgggggtgtaccggaacggccacgtggacatcgtcgccaacgaccagggcaaccggatcacgccgtcgtgggtggcgttcaccgacgacgagcgcctcgtcggcgaggccgccaagaaccaggcggcgctcaacccggaccgcaccatcttcgacatcaagcgcctcatcggccgtaggttcgacgacgaggaggtgcagcgagacgtgaagtatctcccgtacaaggtggtggacaagggcgggaagccgtacgtcgaggtgcgggtcaaggccggcgaggtgaaggtgttcagccccgaggagatcagcgccatgatcctcgccaagatgaaggagacagccgagtcctacctcggccagcgcgtcaccgacgccgtcgtcaccgtgcctgcgtacttcaacgacgcgcagaggcaggcgaccaaggacgccggcacgatcgccgggctgaacgtgccgcggatcatcaacgagccgacggcggcggcgatcgcgtacgggctcgacaggaagggggcgggggagatgacgaacgtgctggtgtacgacctcggcggcgggacgttcgacgtgagcgtgctgagcctcgaccacggcgtgttcgaggtgctcgccaccagcggcgacacgcacctcggcggcgaggacttcgaccgccgcgtcatggaccacttcatccgcctcgtcaagcggcagcacggcagggacatcggcggcgacggccgcgcgctcggcaaggctcgccgcgagtgcgagcgcgccaagcgcgcgctcagcagacagcaccaggtccgcgtcgagatcgaggcgctgttcgtcggcgtcgacttctcggagacgctgacgagggccaagttcgaggagctcaacatggacctgttcaagaagacgctgggacctgtccggaaggccatcgccgacgccaagctcaagaagtccgacatcgacgagatcgtcctcgtcggcggcagcaccaggatccccaaggtgcaggagctcctcaaggagatgttcgacggcaaggagccaaccaaggggatcaaccccgacgaggctgtcgcctatggcgccgccgtccagggcagcatcatcagcggcgagggcggcgccgagaccaaagacatcttgctgctcgacgtgacgccattgacgctcgggatcgagaccgccggcggcgtgatgaccaagctgatcccccggaacacgaggatcccggtgaagaagtcgcaggtcttcacgacctacgaggatcaccagaccacggtctcgatcaaggttttcgagggcgagcggagcttgacgaaggactgccgcgagctggggcgccaggaggagatcgaccggatggtgcgcgaggccgaggagttcgcggaggaggaccgccgcgtccgggagcgcgtcgacgcgcgcaaccgcctcgagaactacgtgtaccgcatgcggagcgccgtgcgggacggcggcatggccggcaagatcggcgacgacgacagggagaggatggagtccgccctgacggaggctctggagtggctggaggacaacgacggcggcgcacggacggcggagaaggaggactacgaggagaagctgaaggaggtggagcaggtgtgcggcccgatcatcaagcaggtctacaagaagagcggcgacgcgtcggccggcgccggagacgacgacgacgtgaatgagctgtag

SEQ ID NO: 81433 - DNA, 182 bp, Oryza sativa
  Clone ID: PAT_MRT4530_80960C.1
caacttcaacaagtatcaagtgtagtatatcgtcatcattcaagtacagggttacatacattaatcacacttcatttttattaagcttctttcatcatttcattttcttcagaggaaggctatcttagattacagatgaatatccatacacccagcttgttgctacatacataaactttatt

SEQ ID NO: 81434 - DNA, 1203 bp, Oryza sativa
  Clone ID: PAT_MRT4530_80961C.1
atggagagctcaccggcgtgcgagggaggcggcgctttggcgacgtttggcggcaagcgagcggcggccgaggtgtgccgtggggagagcggcggagtgcacggcggaggccctagcggcgacggcgtgtggccggagatgggcggcggcggcggagctcggggcggagaagcgaggagggagggcggagacggcgacgagacggcgagccgggggcaggacaggaggaggaggacggcggcggcgaggacgaaggccggcgacttgggcgcagggctcggagtgggcacggggaggcgggaaaggcggcggtgtgggcggttgccgccggggtgcggtcggctggaggaaggggacgaccccgacaggtggggtccacctgtcggcgtcccggagggagggggaaggggaaacgggccggtccaacaaggagaggccgagcgcgggcaagaaaagggggaaacttcagggcgtgacaatgtcgctcccgccaccgccgcttggcgctactgcgcgagccgccgtgcgaactgcgccgccgctcggccatgcgtcgccgacggttcctcttgacgttttccccactgtcggtctcccggagaccccttcaaccccccctcctttggccgccccgcctctttcctctagccgccggcctcccatccccttccgtcgccgccgctctgcttccaccgccgccgcgcacaaccgcgcgccgttgtcggccattccccgtcgattcctctcgcctctgccctcttggagctcccgtggccctccccgaaccgccgccttggctgccggccttccctcacgtgcccgcgccgtgccacccatcccgccgccgcatgactgtcttcgctggccgccgtcgcgctgcctccccatcttccgagccggtggatggaaccgcctcgaccccctctggcctccagtgcccgcatccccctccgattcgccgctgctcgccggaactcgtcggctgtcatccccgtcctcccgccgccccgcccgcgccaagcgcgcctcccgcctcggcgccgcctccttcggcttcgccgcaccgtcgccgtccccgtccaccccctcatcgagctcgccgaccgccggagcgccgccgtccccgtcgacccgagccgcgccgccgccttcctccactccgggcgcctcctccgtcgccgccgtcgcctcggggtgagccat

SEQ ID NO: 81435 - DNA, 1981 bp, Oryza sativa
  Clone ID: PAT_MRT4530_80962C.1
atggcgatggagccgacggtgaaggtggcgctggggacggcggcgttcgggatcttctgggtgctggcggtgttcccggcggtgccattcctgccgatcgggaggacggcggggtcgctgctgggcgcgatgctgatggtgctgttcggcgtgatgtccgccgacgaggcgtacgccgccgtggacctccccatcctcggcctcctgttcggcaccatggtggtgagcgtctacctggagcgcgccgacatgttcaagcacctcgggaggctgctgtcatggcggagccagggcggcaaggacctgctcgtccgcacctgcgtcgtggcggcgctcgcgtcggcgctcttcaccaacgacacctgctgcgtcgtgctcaccgagttcatcctcaagatcgcgcggcagaacaacctcccgcccaagccgttcctcctggcgctcgcgtccagcgccaacatcggctccgccgcgacgcccatcggcaacccgcagaacctggtcatcgccgtccagagcggcatctccttcggccagttcgtgttcggcatcctcccggccaccctcgtcggcgccgtcgtcaacgccgccatcctgctctgcctctactggcgccacctctccgacgagaagtgcgtcgaggtcgtcgccccggtccccaccgacgtcgtcgaagaggaggacgtcacctcccaccgcttctcgccggcgaccatgtcacacccccgttcctcctcccaccaccaccaccaccagcagcctggcagctcgctgtcgtcgcctgactgcgaggtgttcgagccagtgaagcccgtccctgtcaccagcaatggcgactccaacaacaagccggacgccgccgacgccgccgtcgtcgtcgggatccaccagaggcgccgcggcgtccgcggcggcgtgaggatgaaggaggaacatgcgttccggtgggtggaggagaagggggaggccatggagcaatggaagagcacggtgtggaagacgggtgtgtacgtcatcacattgagcatgctggtggcgctgctgttgggtctcaacatgtcatggagcgccatcaccgccgcactcgccctcatcgtcctcgacttcaaggatgcccgcccctgcctcgagaaggtttcctatccacttctactcttcttctgtgggatgttcatcactgtggatggattcaacaagacgggcattcctagcgcattctgggaattcatggagccctatgcacggatcgatacaccgaccgggatagtaatcctcgccctggttattcttctcctctcaaatgtggcgtcaaatgttccaactgttctcctgcttggtgctcgggtggcagcgtcagcagcggccatctcccctgcagcagagaccaatgcctggctcatcctggcctgggtcagcacggtggccggcaacctctccctccttggctccgccgcgaacttgatcgtttgcgagcaagctcgcaggtcggagcagtacggatacaccctctccttcttcagccacctccagttcggcttcccggcgacgctcatcgtcaccgggattggcctactgctcatcagaagcaactgaaaaatggtacagaacatatatatgaagaagacatggatatcaggacatgtacaaaaagaatgtgaattttcaggtcaggtcgattgtatttctgcaaagattcaattgtgggataaaagaaaaatgtctatctttgcctcggaattaagcacggatatcatggtgcttggaggctttttgagctgtacatttgttagttcatattggggggagaagatgtatatgttgcagtagcaaggatcataaaagggaaatgtatatttttgttcagcattctacttgtaatccatatatattttttgaagtcgaaaaaaaaaaaaaggcaggaaaaaagaaaatcaatgaaatgcaaacccctaaaaattcgagactagttctctccctcgtg

SEQ ID NO: 81436 - DNA, 789 bp, Oryza sativa
  Clone ID: PAT_MRT4530_80963C.1
atggccagtgcggcgcggtcggcgatgcgcgacaggccatgcgtggcaggaggcttgcgggaagtcgacacggtggcgacctcgacacatagggtagatagatatgggcgagagccgagcctcttcaggtcagcaatggcgacgcttgtagccgcggctttcccctcgaggacagtagcagcactccttgctgaaaccttaggttgcagctttatcgaagcagacaactatcattctcagggcaaccgccaagctagctcaccttcctcctcaccaccaagaacgcaagaacacagcaagagaggaggagattcaagaaccggaggaattgatgtcatcttcggctgtgattccgccgccgtcgccggagaggagggtgccgatggtggccgacaacggaggtggaggacatggggcgagatggtggcgtccgtctccatccactacttcatccgccacatgtgccgccacgccgccgcccggggctcgtcggccttctccgccgcgtcgtcggcgtcttcctctgttgcgccggtggagaaggcgtcggcggagcacgcggcggagatggagcggctcaatctcggagctgccgctcttcacgctggtggtgctcccgaagtcgtcccgcgcccgctgccgccatcccctgcttctccgcgccgtcttcggcgaggaaggcgactgccgccgtcgaacagaggggcatggacggtcggctcaaagacaaacaagtttcttgagactgtgagagaccgcatgagaaaacataagacagacaagaattga

SEQ ID NO: 81437 - DNA, 390 bp, Oryza sativa
  Clone ID: PAT_MRT4530_80964C.1
atggcgaccgcggtggaatcagagcacgacgacggcggtggcttgcaaggttacagatctgtgtgcaagcgagctgaggaggtcacggtggccgcggctaaggaggtcggagaggaagacggcgacgccagcggggaagtggttgagggagtggaggaggtcgcggaggtgcgggagcgcgcggtggacgacgtgatggagatggacgacgccaccggcaccagctcctcgccgccggcctcctcccacgcgttcaccaagtgcatgatgttgaagaccggcacctcgaaccacgacggggttgaatggcgagcggtcgccggccgccgccgccgccgccacggcagcccgtcttcttccccatttgaccccggtgttggtattttttaa

SEQ ID NO: 81438 - DNA, 303 bp, Oryza sativa
  Clone ID: PAT_MRT4530_80965C.1
atggcctggtctgcatgccctctgttcttgaaatgcggtgcatttctgtcagcctgcagtgcccggagaagcgacagcagttggttaaacgtgacggcgatgaacacggatggcacattctcgtcccatggagtcatcagcatattctcagcaagcagccaagcttactgtaagtttagcaacgagaaggaaactgtcaaggaccgtctgaccggcgtcgagtgctcctctgcataccgcagtttcgacaattccatcgctaaggccttggcgatgaaggatcgaaagaaggacaactcctga

SEQ ID NO: 81439 - DNA, 585 bp, Oryza sativa
  Clone ID: PAT_MRT4530_80966C.1
atgggggtgggatgggaggagtggatacctgatgatttcgccgcgcccagctgctggcagcgccgccgcctgcgtcggacagatgcgacgcgccgcgccaccggccgcgacgccgcctgccgggaggaatacccgccgggcgcacagccgcctgccggtgcctgcctccgaccagatgtgaaccgaagggggagggtggagagggcggggccgacggacggcgacggagggggcgagggagatatccacgcaggggacagctatgcacccctcgccgtcttcgactctcttcggtcaacgttggctctgtggccgcttctctaccaccatgcgccaccggccgactaccaccggctgctgcgcgcccaccggctgttgccacttgcccgccgtctcttaatgctaaaatttggtaagccccaaagtcatcatcggcctagagccagtatcagcttcacagtcctgaaatcgaccgatggatattatgaaatgctactagttggattcttgatggattcggtcaaagaagtttatctagaagagatcgtgttcaaggaggacgtgtcttggcagtttatctattaa

SEQ ID NO: 81440 - DNA, 300 bp, Oryza sativa
  Clone ID: PAT_MRT4530_80967C.1
cggcggccagagcagcacggtagaggagaagggagctgcggcggcgacggaggaggtggggcgtctttgcgccggatccgccagcgagcagaccggggtcaccggattcagcggccccggcctcctcactgggagatccggcggctcattaggagggagcggtggcgcagcacggtagaggagagggagctgcgggctgcggcagcgatggcgcacgcgagcggaggcggcgacggcgcatgcgagcggaggcggcgagcgaaccgacgggtgtggggagaggagaggacaggcggctag

SEQ ID NO: 81441 - DNA, 309 bp, Oryza sativa
  Clone ID: PAT_MRT4530_80968C.1
atgtgtgaaatgaaccattggaaaagctatgcatttaaactgcgggaaagggtggttcagatccttgatcccaaaaagttattttgtggcaatgatagccatgctgaaaataatcatcaatggaatggccccatactagcgaaagcaatgcaggagtgtttgtctatgttcttcctagactggaccgacgaggtcaccaatgttgatagtggaatcaactctctggtgtacatgaagaactggatggcttcaaatgtgtcggaggtctcaatctggtatccattaacaatatcagagcagacattgtga

SEQ ID NO: 81442 - DNA, 1645 bp, Oryza sativa
  Clone ID: PAT_MRT4530_80969C.1
gaagttataaacatgggttgcttttatttagagtaagaatccaaacaatacaggacattgaaataataacatcacaccaacagttatctccacaaagctctatacacacgactacacaaggcaagccttaaggcaaaattggaagtcttcaacaatcacttgcaccaaaaataaaaatctacaaggacatagttgatgattggggcgtctaactgtatagagaaatgaacttgaggaaaggattttgtaaccgggtagcgcccgacttatatggctgctgtgctgctggcactgggtagctattaccatcatagcatacttggcctggcccagggctgggcctaagttgctcacatatctcaggagctacagaatttgagaacccttcgatgagcgaacaattccaaggatcagcagatttgctactgagggacacatttgataagcaaatgttgctaaagatatccccctggatgcccagcaacattcctgcagtaccaatgtttacccccaccacattttttatcgttatgttgctaatgactggaagcgcattcttgtcatagttgtcgtcaggatgttccccatagtttccagtgatcctgatggctattgagacattgtccatgctcacatcagctatgtatatgtttttcacatacccaccgcgccctggggcagtcttgattctgattccatgcaccgagttgatgaaacgaaggccctcagctcgaacatcgaatatactactaaacatctcgcttccaaaggctattcctgcactattcccagtcagctcagtgatgttccgaatgtgtggccgatgcacgcttgctgtcaagtcgttgcagtacatggcagatgaagtggcccattgagtcgcagcaaaaacagttgcaaaaaccaaaaggacttgaagtgcagatgcggatcggctcatcattttctctagcagcgagtgaagaaactgtcaagtcagttcttcctccctcaaatcgactcaccagcaggcaccacaccagaacaacagccaagatcgacgactctctacttctccgggctcgccttctcgggccgcgaacgcagcggcgtcgacggcgacggctatgccgatggcttctgtgtgcttattaactccgttccaccaaagttcaccttggccatcaatggtgccattagcaccagggagttctctgccacgcccataagatggcagaggatcaataactggccagtcagatgaatcttgagatccgattattactgcatcggcgtcaagtgacacagtgagatgactgataagattaaaactcccagtcaaccaccttccagcaggcacaaagagctctgccccacccttatctgcaaatgagctgaggtaaaagattgcattcttaaacgctttcgtgttaagagtaacaccatcattaacagcaccaaactcagtaattgacacactgtgtggccgatgcacgcttgctgtcaagtcgttgcagtacatggcagatgaagtggcccattgagtcgcagcaaaaacagttgcaaaaaccaaaaggacttgaagtgccagcaggcaccacaccagaacaacagccaagatcgacgacctgatcttcatcaagtcagcgattggaggatcaaacat

SEQ ID NO: 81443 - DNA, 588 bp, Oryza sativa
  Clone ID: PAT_MRT4530_8096C.1
atgaaaagaggaaaaaataagaggtgcaaccgccgtggtacctgcggaagaggaggcaaagattggggatacactgagccgataggaggcgaggtcaccgctggcgctgaagatggaagggtttacgagagggcgagagagggtaccaccgggaagcgcacccatcaattgggaggccactcgctgtcgactcgagaaagaggagcgggaagaaagaaaggccattggccggctccggctatggcggcggcgcagggctgtggctacggtttggaggtagtgccttcggcccttggcagcaaaggggatgggaagttaccgagacttgaaggggagtggagacagcgaggagaaacatggtggcacggaggggaggtgaatgccggcgacggggatgtcgatttctccaccgatgtagtggggattagggtatgggggcggtggagttggatgggatcggaacaggacgggagaggacgactggataaggatggttgctcgtgccatgtggctcaactggtttcgccggaaaaagctcctgcctcgcatttgcattataaatggacccacggacctctgcaaaattaa

SEQ ID NO: 81444 - DNA, 324 bp, Oryza sativa
  Clone ID: PAT_MRT4530_80970C.1
tgcatgtctgttgttgaggaaagctttgaatatcttgatgcaccagttgagagaattgctggagctgatgtacccatgccctatgctgccaatgcttgaaagatggctggcccacaaggtgaccatattggcccggccacgaaacctgccttcttccaaaccggggccaatggcagcacctgcctgataggaaagacctttttaacataatcttccttttccgcgccggccaccatatgatacataatggtgtccaacaatggcccaaactcaaagcgagctaatttggcaggatatttcaaggacccccacctattcttttag

SEQ ID NO: 81445 - DNA, 915 bp, Oryza sativa
  Clone ID: PAT_MRT4530_80971C.1
atggacctcggcaaatcggcttccaccagtgcaacgttgaagaaactccaggaggatggcgctcttcctggtcgtggaaccatggagagggaagcaggaggtctgcccacgaagagattgagtagggaggaagatgcatcagccatgaacgtgcagaacccttcaacgcggttggccatcggacatcacgtagggaacgaccgaaagctctacacccagcgttgggggcggtgggttgtcggcggtcgtgtgtgcttcgtggatgtctgtctgacgatgaggaggacgcggatgatgacgatgacgatgggtcgcttggttccagcgtacgattacgaggatgacggcctggatctcgggaatcctgtcgtcgtcttccgctgttgtctcggcgccgatctccatcgtcgtcatcgatacggcggcggccatgaccagtattgtctggcacccgtcgttcgcgatcgttgtgatcgtggtggttgtcgtggtcccggtcctcgtttgagtggtctcctcgatttccgttatcatggcgccgtgaagagacatgacgccgagagcgattcacgttgtctcatgacaatagacatcccgagttggagaagacaccaagaccttgtggcttcggaagtcatctttgtcggctcgtggttcatgtcggaaggacaaagtttggccgtatcagaatccttctcgagcttggatgtcgtcgatattccgttctccgtctcgatgggaggatatttcgacatggaatcgccttggttcgtagccactgcgttctcgtctccggtcattggaggaccggttgagatcggcgtcgtgaaccttgagtaccaaggccccctacctggcgtaccactgtcgacgggtgatacccgtagaccggatatagagggtattgggatctag

SEQ ID NO: 81446 - DNA, 1612 bp, Oryza sativa
  Clone ID: PAT_MRT4530_80972C.1
tcctcccccactccccacgttggccggcaaaatctcgcccctaccggccacccgccgctagggtcgccaccgcaccgcgccgtcgccgccgtcgggttcgcgaggctaagctccaccccggccgccccttccctgtcgggattcatcgccggaattcgcatcccctcgcgctccgggcaccccgaatcccgtccgtcggttgccgtcgtcctcccgtggctcgtcgtcgccgttcgccgtcgtcttcctccgcgccggccaccctcggtgaggcatccctcccctcttttccccttcctccccctccttcggccgccgccgccgtcggccgcgtgccgtcgccgctagccctggccggccagccggctttgatgccgagccgagcccggcggccgcctctatcgccgcccccgatcggctcggggccgatctgggccgtcggtcccgtggaccggcggtggaccacccgcgtggtcccggtccacggtgaaccgcccccccttgagtcgctgcccagtggggcccgcctgtcggcgccgcgcctccctccgatggcgggttctccgaggagtaggcttcgtccgtgccgtcgaggatgcctgtggagtggtgttcccgctgcagttcaagtcaaggattagctccagttatcttttgtttttccgctgcatttataattctattcgggaatttctaggcatgacatcccgccctcgtcgtcaccgccgccgccgagctgtcgttgtcgccgccccacgccccaccgccctttctaggcctccctccagccggatctgggaggggagtggaggggaggggagccgcccacgtcgttgccgccgccgacgccctcccctgtccaccctccgaccggatctgggagaggagcgggaacaccaccccacaggcatcctcgacggcacggacgaagcctactcctcagagaaaccttcatctgacccgaactcgaactctggaggttgggaaaaaggtgtacaactgtacccacaagacacagccccacgacacgtttccgtgcgccgacatgccaccacgacataccggaaagaggccgtgacaggacccttcgcataaccccctctaaccaagcacaccacacctcaggtttcacccccactcctcgcaaggcagcgggcagtcccctctcgtgcctaggtgaatccggaagccgcataggccgtcgcagggcccatccaaactccatcacgcccacccttgcctggatgcgtcggctagaggaaagctacactacaagcccagccgttgcccacgctggcttgtggtaagtacgataagttcttccagggcatcccgcgaaccggtccttaattgccatgggtgcgactagcaaaaccatgcacccacagcccaccattcagtcgcattttagttggataattacgaccatgaagcatggccagatgtctcgagcacgcagctcattccgatactaaaaggtctaatactgtaattatcccatcaactgagctagtgtattgcgcaattattacttattttctcaaggggatcctctagagtcgacctgcaggcatgcaagcttgagtttctatatgcagggttctcaacgcgc

SEQ ID NO: 81447 - DNA, 1437 bp, Oryza sativa
  Clone ID: PAT_MRT4530_80973C.1
atgtccgaccgggcggcatgtgacccacagatcccttcatgatattttctcagcttctgcgtcgtcctcgggcaactctttgctgcctatgaatttgatgagtggggtgcgccagtcgtctgtggtctcgatatcggcaacgacgcgctctacctctgtagcccccgagctaaaggtgccaggttcgagtggctctcgtctggacgcacgccgtgctatatcatctggttcaatgttgtccttgcgaaattcccgaatagaattccaagcagaatgtgcattaaactccccgtccaggaccagccggggtacacaaacgacaatgttgacattcagatccaccgggaacaccactccacaggcatcctcgacggcacggacgaagcctactcctcggggaaaccttcatctgacacatacccgtcctctggggttgggaaaagacacagccccacgacacgtttccgtgcgccgacatgccaccacgacataccggaaagaggccgtgacaggacccttcacataaccccctctaaccaagcacaccacacctcaggtttcacccccactgctcgcaaggcagcgggcagtcccctctcgtgcctaggtgaatccggaagccgcataggccgtcgcagggcccatccaaactccatcacgcccacccttgcctggatgcgtcggctagaggaaagctacactacaagcccagccgttgcccacgctggcttgtgggctgacgtcagcacggaggggtgcggcgccgacatgcgggacccaccggtcagcgacccgggagagagagaaaggggcggcggctcgcgggcccactgtcagcggcacgggagatggaaggggcggcggctccacgtggcggccgaaccgacggccccgatctacccaagggtagatcggacggcggtgggagctcgcggccgggcgcgcgggcacggcgcaagccgaaccggcgaccatggcgccggcggcgcagcgctcacgcggcggcggtgcgcatgcggcagcggcgcaaggcgacggccgacggcgaccgaccggcggcggagagcggcggctagaggaggagcggcggctacgcagctaggcggcgacgcggcggctaaacggtgcgggagagagagaaaacgaggaggagggcctcaccgacaacggtcgacgacggcgggcgacggaggacgatggcgacggcgggacgagctccggaacctcctaacgaacaaaaggagagggattagagggagaggaaagagcgcgagagagcgagagcgccggccgaaggccgcggccatggcgtcactcaccggcgcacgacggggacgggtctccggcggcgaacctcaacggggaagaggcggccgaggtagatctcgaccccgcgaatctaacggcggcgacggcgcaagacggcggcgagcctag

SEQ ID NO: 81448 - DNA, 2760 bp, Oryza sativa
  Clone ID: PAT_MRT4530_80974C.1
aagaagaaatatagtatcatcagcgtattgtaaaataaccactttgttgttatcattttcccccaatccttctatcaacagattatcttcagctctttgcactagtaaaattagtgctttggctgccaaattgaatagaagaggggatagaggatctccctgcctcaaacctttatgtgtcttaaaataaggccccacttgatcatttacttggacagcaaccttaccacccattatcactttcattacccaatcacaccattgatcaggaaactcttttgcattcaggagacaaataggcctgtatttttgaatctgagctgcatccttaattttcggaatcaggttaataacaccaaaatttaatctatcaatgtcaaccaaccctttgtgaaagtcattcaccaattctagaagattaatcacaaaattcagtttatcctccaactccttcctttcttctctatcttccctgctcatcccacatctttcaaccttcgcatccaaattttcaattttctcaagaatgctttctttttccctcctatatctcccctcccaattcttattccaaccattaagttttttcctcaaagctctgaatcttttctgccatctctcaatactagatccataatagttaattttccaaacactctccacaatttcttttaaatcttctctaagaaaccaactgagttcaaatttgaagctcttatgagtaatctttaagactccagtatctatgagcaaaggattgtgatctgaaatgcttctagttaaagtttttgccattgtgaggggatattccttttcccaatctgtgttcacaaaaattctgtccaatttttctaaagtgggattctcttgattgttacaccaagtaaactttctcccacctagaaagatttctctcaaattagcttgctctatgacagcattaaaaatgaaactccacctattataccctccagctttgtttttatcactttcctttctaataatattaaaatcaccacccatgactaaaggtttcatttgtttctgaataatgttagccagttcagtcaaaaacctatccttgtgtgcattttgggctgctccatatacaactatcaaatcccagcagaaattggtttgcataacttgcaattcaattttaacatgaaaatctccttttgaaacagccaacatactcagtttgtcaatgttaattcctaccaaaattcctcctgagtgacccatagccggcaaccactcccatttcatatttttgttaccacttagacctctcaatagaccaacagagaaatcctgctttatggtctccataatcccaacaaaatcaatgtttttcttgaaaatctcaaggtttcctcttttgcttttatgcttactaccagaaaaatgagagcctttaagtaaagagtcaatatgctccaaatcagagtcatatccctcagaagagcacaattcatcaagcaaattttccacagggaattctatctcagttttagattcacaattcttattcttcataacctcttgttcttttaaaaataaactaattctagcacattctaagtctttaatcaaagacaagtttaaatcaatattatcaatagcacagctgtcctccttatccttcaatctcttgcttcgcctcttttcttcttcttggctttcagtatcttcctcagtgatcagtaccccaacttgtctggcaaagctatccacagattcctgggagtctaggaaatcttcactatctcccagattcactttttctttgtcttcttcactcatctccttgacatttttgctaacctccacagcaactttcttcccacccatcagctgatcttgaattacctgttcttgaatcttgagcaatttgtcttcaacaccttctcctaattgtccagcatctttatcactaccctcaacatccattatcagctttctcttcatgccagaactattgtcttcctcaacttgcagttgcatagccatctctctgtccttcagaatttgcagctgtttcatttgttcctccttctgcatcaactcaggcgtcacacttactactgacctagatttaccaaatgttgactgttctgcaaagcctaaatctttgtcatctgtctccaccaccacctcctccatgatctcctccctaaaccacccttgttcaatcacttcttctaaagtaaaccgagcttgatacaagaaccccttaggagttgtaagcacaagtttcagaggaaagacatctgtctccatcaaccccaccttcaacctaataatgttattagctctgaaggtcaccatatcaatctccatcactggccctagattagaacccacttcataaagagcctgatatcctttcatttcatcaggaataccggcaaccttaacccaagcaatattaagtttgcccacagcctcagcctcctgagtccactctttgacattgacttggacatctgtacctttcacagtgaagtagtcgaaatttgccaactcttcaaatctaagcttgtttgggaatctcatctgaaaggatccatttggcattgccttagccttccaaatccaattccaccgaaattgctgggtgaaaccttgctccaattgtgcttctgttagcttcccctcaaacagagttgatatagcagccatcgagttaacatgctcttttactgaaattgctttagtgttctaaataagaatacatcccaaccctggtgctccata

SEQ ID NO: 81449 - DNA, 225 bp, Oryza sativa
  Clone ID: PAT_MRT4530_80975C.1
atgggtgcgaccagcaaaaccatgcacccacagcccaccatggctgacgtcagcacggaggggtgcggcgccgacatgcgggacccaccggtcagcgacccgggagagagagaaaggggtggcggctcgcgggcccactacgctcacgcggcggcggtgcgcatgcggcagcggcgcaaggcgacggccgacggcgaccgaccggcggcggagagcggcggctag

SEQ ID NO: 81450 - DNA, 552 bp, Oryza sativa
  unsure (1)..(552): unsure at all n locations
  Clone ID: PAT_MRT4530_80976C.1
caagacacatcttgcctcaggtgtaaccacgtgccacataccaccacggtatcgggacggaaaacgttgacatagttcccaacccatcctagccataaacaagagtaccgacccaaccccacctacggccggaacccccgggacagccaggcaggattgagccccctagcagcaggacgccctggagaatgtccatcgacccccgacttcatccatctccaatccgtgtacttttgtttataaccagactgagccacaaactaagccttacccactagacatgtgaaagtacggtagtgctttgcaacagaggcccgagcttaatccttatagtggccggggtgctacttcccacaactggcatgcacccaaacccccccgaaaaacaggttttaggggctttgaaagaggaagagaggggtatgtccaattccaccataagccaaccattccataggtgaacaaggtaataataacaatagcaataggggatcctctagagtcgacctgcaggcatgcaagcttaggtttatatataaccaaggnngctcg

SEQ ID NO: 81451 - DNA, 1196 bp, Oryza sativa
  Clone ID: PAT_MRT4530_80977C.1
cggcccgcggccttaccccccctccccgtcgccgtcaccttcgagatcagctcttctcctccttaatgggcggtgccttaacctctctctgtgtttcagtgtgtttgttcgttcgttcccccaaaaaatttggatccgcctctgcagattggtgccttccttccgctggaggcaaacccccccccccccctcccttgtacgcttcgtcttcgtctccggcgacgagcggaagcaaaccttctccggcgagcagcaggatgcaggtgaagcagaaggtgtacgagctctacaaggggacggtggagcgggtcacgggcccgcgcaccgtgtcggccttcctcgacaagggcgtcctctccgtccccgagttcatcctcgccggcgacaacctcgtctccaagtgccccacctggtcctgggaggcgggcgatccgagcaagaggaagccgtatctcccacctgacaagcaattcctcgtcaccaggaacgtgccttgcgtaagacgcgctgtctcacttgaagaagagtatgatgcagcaggagctgaggtagttctcggtgatgatgaggacgcatcaaagccagaagaggaggaagacataccatcgatggatacattggatatagggaaaactgaagggataaactctattccctcatacttcagtgctggtaagaaggctgaagaagaggaggatataccagacatggacacttatgaagacacagggaatgattcagtggctaccgctcaaccttcatattttgtcgcagaagagcctgaagatgacaacatccttcgtactaggacatatgacgttagcatcacatatgataaatattaccaaaccccacgtgtctggcttaccggatatgatgagtcaagaatgccattaaagcctgaacttgtgtttgaagatatcagcaagaccatgcgcggaagacgtttatggccccagtcatacccactattgaatatgactacactatggacttcgatctgggcagtacaagcagatgatttgttaattgaagctacatatatgtccattctacatataagggactacatgtcactcttgagtcttgaccatgctatcagttgtttgcacactgacatagatagcaatttgatgttgcgacaggaaagtgaaagatcctgtagaaggtgtaccaaggcttatcatggtgcctaa

SEQ ID NO: 81452 - DNA, 2061 bp, Oryza sativa
  Clone ID: PAT_MRT4530_80978C.1
atggagttcttagatggaaggagtcctactcggacagaaatgggtcgtcattgtatcgtgccggtggcgcgccaggtaggggaactcggtgctcaaggttctactactatgtcatccagcttcgtcgacaacagcgtcaacaccaacctctaccaaggagttcttgcttcaacaatgctggtgtggactcaagtcggcgaaatcgtcttcccggtttacaccacggtgccgatctcggctggtctatcagtgaccggaagcgagaacgcagtggctacaacccaggacgactccatgtcgaaggatcctcccgccgaagcggagaacggaacatcgacgacatccgagcccgagaaggatcctagtgcggccaaaccttatatttccgataagaatcacgagccgacgaggatgaattccgaggtgacaaggtcctggtgtcctatccacaaaaccagaaaacacaccttgcaagcctgctgggtttttctcaacgtccacgctgaaattcgtgcctgcaaagagcgtggaattcagcgcacttcttcaactcgtgatgtctattgtcctattcacaagacaaaaaatcacgacctctcaagctgcaaggtctttctcagcgccatgaagacatcacctcctaaggtccagcagtcacatatccccttcagggatgaggacaaggaacaaggagcgacgccgatctcagatcgattcgttggggtaatcgacatcgatccccatgaactgtcagtcctgcacctgctcgaagactatggctcatcgtcaacaagtacaccacgcaagcgcacccggaacagccaccaactggcggtgctaatggcgaaaaccctgaacagcgggattcgcctcatcgagccacccctccacctcgcggcaccgaccgagaccgtgataaccgccacaaccgccacgatcacgatgatcgcgaacggcgggtgctgggcgatactggtcgaggatgccaccataatgacgatgacgatggagatcggcgccgggacaacaacgggagacgacgacaggattcttgagaacccggccgacgccctcacggcggaggcgcagcctagctacggtggacggtggcggcgccggcgcggtgagccggcgacggcggaagcgcggcactgcggtcgcggaaggcgaaggcgcggcctgacgacggtggacggcggcaccgccgaaagagcggcgctgcggccgcggacggcggaggcgcggcccagcgatggtaacatagactcagcatacccagactccgatctccatgtctcgcacatctgcggaggttccacggcatactcctcaaagcgagaatacaagaaagtggaacgtgaagtctgttcgacgtggcagggagctgcacccaagatgaagtggtctgaacagaagatagaattctctgtagaggaccaccccaaaactgctgtcatccctgggcgatatccgatcgtggtcgaacccactattcggaacatcaaggtcgcgcgagttctggtcgacggcggcagctcaatcaaccttctcttcgccggcaccttggacgcgatggggatcccacgaagcgagttgacgcccactgatcaacccttccatggaatcactcctcagtcatcgtccaaaccattgggcaaaattacgttgcctgtgactttcggccaagcaaataacttccgaatggagcagatcaccttcgatgtcgctgaattcgatacagcatacaatgccatcattgggagaactgcactcacgaagttcatggccgcatctcactacgcgtatcaagtgctcaagatgccgggaccgaagggaacaatcattattcaagggaatactaagctagcagtacaatacgacaagcggagcctcgacatggtcgagcacacgcccagcccacctgccacagctgagccacccaagaaagtgagcaaaacaaacaagacgccgaaacccgacagtgcaatcaagatcgttccactctccagtgccaaccccgacaagaccgttaagatcggggcatcactagacgagaaatag

SEQ ID NO: 81453 - DNA, 1017 bp, Oryza sativa
  Clone ID: PAT_MRT4530_80979C.1
gtcgtcttcggctcgctttctccaccgtctccggcgacgagcggaagcaaccttctccggcgagcggaggcaaccctggggggctaggcgagcagcaggatgcaggtgaagcagaaggtgtacgagctctacaaggggacggtggagcgggtcacgggcccgcgcaccgtgtcggccttcctcgacaagggcgtcctctccgtccccgagttcatcctcgccggcgacaacctcgtctccaagtgccccacctggtcctgggaggcgggcgatccgagcaagaggaagccgtatctcccacctgacaagcaatttctcgtcaccaggaacgtgccttgcctaagacgtgctgtttcgcttgaagaagagtatgatgcagcaggagctgaggtagttctcggtgatgatgaggacgcatcaaagcaagaagaggaggaagacataccatcgatggatacattggatatagggaaaactgaagggataaagtctattccctcatatttcagtgctggtaagaaggctgaagaagaggaggatataccagacatggacacttatgaagactcagggaatgattcagtggctaccgctcaaccttcatattttgtcgcagaagagcctgaagatgacaacatccttcgtactaggacatatgacgttagcatcacatatgacaaatattaccaaaccccacgtgtctggcttaccggatatgatgagtcaagaatgccactaaagcctgaacttgtgtttgaagatatcagccaagatcatgcacggaagacggtgactattgaagaccatcctcacttgtcagcaggcaagcatgcttcagtgcatccatgcaaacatgctgctgtgatgaaaaagatcattgatgttctaatgtctcaaggagttgaaccagaagttgacaagtaccttttcatatttttgaagtttatggcctcagtcatacccactattgaatatgactacactatggacttcgatctgggcagcacaagcagatga

SEQ ID NO: 81454 - DNA, 2010 bp, Oryza sativa
  Clone ID: PAT_MRT4530_8097C.1
atggcgagagataagcaatctgctttaatcgtcgcagcgttcgtactcctctgttcagggtgtttgtgcggagttgcagatggggcgaagggagggaggaagacgaaagggccggtgatcggcatcgacctcgggacgacctactcgtgcgtgggggtgtaccggaacggccacgtggacatcgtcgccaacgaccagggcaaccggatcacgccgtcgtgggtggcgttcaccgacgacgagcgcctcgtcggcgaggccgccaagaaccaggcggcgctcaacccggaccgcaccatcttcgacatcaagcgcctcatcggccgtaggttcgacgacgaggaggtgcagcgagacgtgaagtatctcccgtacaaggtggtggacaagggcgggaagccgtacgtcgaggtgcgggtcaaggccggcgaggtgaaggtgttcagccccgaggagatcagcgccatgatcctcgccaagatgaaggagacagccgagtcctacctcggccagcgcgtcaccgacgccgtcgtcaccgtgcctgcgtacttcaacgacgcgcagaggcaggcgaccaaggacgccggcacgatcgccgggctgaacgtgccgcggatcatcaacgagccgacggcggcggcgatcgcgtacgggctcgacaggaagggggcgggggagatgacgaacgtgctggtgtacgacctcggcggcgggacgttcgacgtgagcgtgctgagcctcgaccacggcgtgttcgaggtgctcgccaccagcggcgacacgcacctcggcggcgaggacttcgaccgccgcgtcatggaccacttcatccgcctcgtcaagcggcagcacggcagggacatcggcggcgacggccgcgcgctcggcaagctccgccgcgagtgcgagcgcgccaagcgcgcgctcagcagacagcaccaggtccgcgtcgagatcgaggcgctgttcgtcggcgtcgacttctcggagacgctgacgagggccaagttcgaggagctcaacatggacctgttcaagaagacgctgggacctgtccggaaggccatcgccgacgccaagctcaagaagtccgacatcgacgagatcgtcctcgtcggcggcagcaccaggatccccaaggtgcaggagctcctcaaggagatgttcgacggcaaggagccaaccaaggggatcaaccccgacgaggctgtcgcctatggcgccgccgtccagggcagcatcatcagcggcgagggcggcgccgagaccaaagacatcttgctgctcgacgtgacgccattgacgctcgggatcgagaccgccggcggcgtgatgaccaagctgatcccccggaacacgaggatcccggtgaagaagtcgcaggtcttcacgacctacgaggatcaccagaccacggtctcgatcaaggttttcgagggcgagcggagcttgacgaaggactgccgcgagctggggcggttcgacctgtccgggattgcgccggcgccgcgcggcgtgccgcagatcgaggtgacgttcgaggtcgacgagaacggcatcctgcacgtgacggcgtcggacaaggcggcggggcggtccaagtcgatcaccatcaccaacgacaagggccggctcagccaggaggagatcgaccggatggtgcgcgaggccgaggagttcgcggaggaggaccgccgcgtccgggagcgcgtcgacgcgcgcaaccgcctcgagaactacgtgtaccgcatgcggagcgccgtgcgggacggcggcatggccggcaagatcggcgacgacgacagggagaggatggagtccgccctgacggaggctctggagtggctggaggacaacgacggcggcgcacggacggcggagaaggaggactacgaggagaagctgaaggaggtggagcaggtgtgcggcccgatcatcaagcaggtctacaagaagagcggcgacgcgtcggccggcgccggagacgacgacgacgtgaatgagctgtag

SEQ ID NO: 81455 - DNA, 860 bp, Oryza sativa
  Clone ID: PAT_MRT4530_80980C.1
gcggcgacgtcaccactggcggcggctcggcggctcggacggctcggacggcgcacgctcgccggtgaacggcggctcttcggcacgaacggagggcaccaacgggtagagggcgactcggcgaacttaccggtgaccaaaagagcggcggaagaccaacggacggcgacggcgacgaggaagaagcggcggcggccttcgggtcaacggtgacggcggtgctccggcggtcttcggcggcagtgaagcggtggacggggacggcgacgacttggcgatcccgacggtggccttcccgagtgacgacgacgaccgaaacgacggcggcacacggctggacgaacagcggcgacggcggcacaaggctacacggggctagggctttatcggcaacgagaggcgaaggcgagggtggcgacgggtagcggcgacaccggggtccttttaaaggggctaggaggcgacggcgaaggcccacggcgaccggcgacgcgatggaaggttcgggctcggagagagaaaagccgatccgattcgacttcgaatcaaacactttccaagccgatttagccgatatttccaaaggggaaaaggtagaggagatctcgggaaacatttcccctcaatcaatttcaccggatcgggaaaggagcggccggatttggaaggagacggcggcatggctcggctagggtttcgggcggcggcggcgcgacgaagacgacgactccgacaggcgggacccacctgtcagcgatagcgagggcgcgcgcgcggctgcggactgggccggcttgggccgaggagagagagagagaggatttgggccgactttcggcccaaagccaaaagaagacttt

SEQ ID NO: 81456 - DNA, 2193 bp, Oryza sativa
  Clone ID: PAT_MRT4530_80981C.1
atgtcatggcacagggccggtgtcctgctgctaggggctcagtcctgcctacctgtcccgggggttccggccgtaggtgggattgggtcggtactcttgtctatggctaggatgggttggaaactatgtcacgtcttccgtctgtataccgtggtgatggccggcagcatcaaccgtcgtggtctggacctgactggcttcgttttggagctgcggggcatgtgcattgtcctggggtatccgcatggagtggactaccagggcaagcagctcccggagcaggagggtgacgatgcagagccccacgctgctcgggaggttactgcagtgatcctcactggctcacccgagaggtcttcgttggcggtcaccgcgggtggagattccttctccgccgcttgccagaacgccgcactcctcgccatcggcactcttcaccagctctacccggacgagttgcagcactcgccctaccgctaccatcatgcacctggcgcgcatggtggaggcgtacgacgcggctcgtatcgacttccatcagatggtgcgccgtgggatggtcgagaacaacatgaagatcctggagctgcgtcaggagaatctgcagctgaagaaggacctagacgcagtggaggcgcagctgcatcagctcaagatcgcccagggagaggagaagtgctgctaccggtgaaggcagtcactcaagtccgcagttttttgggtttggcaggatactaccgaagattcatcgagaacttctccaaaatagctcgacccatgacacagttgctgaagaaggaggaaaaatttgtgtggagcccgcaatgcgagaaggcattccaaactctcaaagaaaagctggtttcctcgccagtgttaatcttaccggatactcgcaaggacttcctagtgtactgtgacgcttcgcgccaaggattggggtgcgtgctcatgcaggaaggtcatgtggtagcctatgcctcacgccagctacggccccatgaaggcaactaccctacccatgatttggagttagccgctgtggttcatgctctaaagatctggcggcactatctcattgggaatcgctgtgaaatatatactgatcataagagtttgaaatacatcctcactcagtcggatctgaatcttcggcagagaagatggttagagctcatcaaggattatgatgtgggaatccactatcaccctattaaggccaacgtggtcagagacgcgctgagtcgaaaaagccgttgcaacactcttggcgtccgtggcattccaccggaacttaatcaacagatggaagccctgaacctaagcatcgttagccatggattcttggctactctagaagccaagcctaccttgctcgatcaaatccgcgatgctcagaagaatgatccagatatgcatgggatcgtcaagaatatgaaacagggtaaagctgctggtttcacaaaagatgaacatggaaccctatggaacggaaatcgtcgtgtcaaggcagagcaccaacgaccggccggacttctccaacctctacaagtaccagaatggaaatgggatgaaattgggatggatttcatcaccggacttccaaaaacccaaggcgggtatgattctatatgggtagtcgtggatcgactaaccaaggtagctcggtttattcctgtgaagaccacctatggagggaacaaactagccgaactctacttcgctaggatcgtgagtctccatggcgttcctaagaaaattgtatctgataggggaagccaattcacctctcacttctggaagaagctccaagaagagttgggtacccgattaaatttcagcaccgcgtatcacccgcagacagatgaacagaccgagcgtctaaatcagatcctagaagatatgctccgtgcctgtgttctagatttcaggaagacctgggataagagtctcccctatgccgagttctcctacaataacagctaccaagccagcctacaaatggcaccctatgaagcgttgtatggtcgcaaatgccggacaccgctattgtgggaccaagttggggaaagccaaatgttcgggactaatatcctgagagaagctgaagctaaagtcagaaccatttgggataatctaaggtggcacagtctcggcagaaaagttatgcagacaaccgacgccgtaacctag

SEQ ID NO: 81457 - DNA, 549 bp, Oryza sativa
  unsure (1)..(549): unsure at all n locations
  Clone ID: PAT_MRT4530_80982C.1
gacgtcagtgacattgagaaaccggcggcggtgaggtnncgncggcgcgacaacccggatcagttnttttcgggcgncgncggcggcggggtggtggacnangggatgatctagctgcggcggaggatccnccanatnagggcggcgganancgggtgggancccccggcggagtgggcggcgtgggaaaannantggtacgggagctaccacccccacgtgtgcgcgctggtgggcgccgtgcaggccttcctcatnagctnccgccccggcgtcggcgtcgggatcgtggcancggtggcggtgagcgttccgaccnccnccttcgtcctngtntccggcctcctccatgcctcccagtntttcctntccaacctccaacantanaagnttagcttccnagctaaccatggatgatcncncntgngttctttntagtttatantaatttaattttatntaaaaaaantagtatatgtaatgtttgatttgattatcgtttcaattncaggaaaagaaaaaaaaaaaaaaaaaaaaaaaaaaaaaaaa

SEQ ID NO: 81458 - DNA, 1692 bp, Oryza sativa
  Clone ID: PAT_MRT4530_80983C.1
atggtgaacactcgcagcaacgggaatggccccaacaacaacaataacaataacaatggagagaatcccacacttgctcaagttcttgctcaacagacacagctaatgaacatgatgatgcagcaacttcagaaccagcaaaaccaaggaaataaccatgcacctccccaaaacaagttagcagaatttcgtcgtgtgaggccgcctattttctctagtaccactaatcctgttgaagctggtgattggttgcatgccatagagaagaagttggatttgcttcaatgcactgatcaggaaaaggtctcatttgcatcacaccagttgcatggcactgcctctgaatggtgggatcacttccgcctgaataggactactgttgaacctatcacttggcttgaattcaccgctgctttccggaagacgcatataccatcgggagtggtgtctctcaagaagagggaattcagatcgctcactcagggatctcgctctgttacggagtatttgcacgagttcaatcgtctggctcgttatgctccggaagatgtgcgcaatgatgaagagcgccaagagaagttcttggaaggacttaatgatgagctttcttacccactcatgactggagattatcctgatttccagaagttagtggataaggctattcgtcaggaggacaaatacaaccgcatggagcagaagaaacgtcggattgctcaattcaaggcacaacaggggaatagtcagaagccgcgtcttaccttagaaccccagtccatgccacagggaggttcctcgtctgttgttcgtccgcagcgtcagttcttcaacaacaatgctggcaacaacatccgtaatcaagctccacgccctgttgtagctccaacacagcaacaacctgccaagagggagcaaggcagcaagcccgtggtgtgtttcaactgtggagacccaggacattacgctgacaagtgtccgaagccccgacgtgtgaaggttgtccctgcccagagcaactttaccgcaccagcgccaaaggcccgtgtcaatcatgttgctgctgcagaagctcaagatgctccagatgtgattttggtccgggagtatcccgatgtgttccccgatgatttacctgtgaagttccttggtcacgtcatctcagccggaggagttgccgttgatcctagtaatgtggaatccgtaaccaactggaaacaaccaaagacagtttcagagatccgcagtttcttaggcctcgcaggatattatcggaggtttatagagaatttctccaagattgctaagcccatgacacgactgcttcagaaagatgtgaagtacaagtggtcggaagaatacgtcgccgtcgctcgggaagaccgtcgtcgtggtcgccaagtcgtcgccgtcctcgtccgcctcttcgtcgccgccgaagaccgccggagcaccgtcgccgccgtcaacccgaagagcgccgccgcttcttcctcgtcgccgtcgccgtccgttcctcttccgccgtcgctttggtcgccgatggtgggagctttgtgtcaaagtcttgcctggtctttaaccaatgctaatgacgttgatgccctctacgagccgttctccttgaaggaagattgctttgtgctttcaattctgcatggcaaccatcaattcagggaagtggagacatgttaa

SEQ ID NO: 81459 - DNA, 456 bp, Oryza sativa
  Clone ID: PAT_MRT4530_80984C.1
atggagaagccacagaagaaaaaaaaatcaacaatatcacatttcactcaaaaacaaatcaagaacgttcatcctgttgcaaacaacgtttggacccaaacaagaacccatatccatatttccctttccccaaaaatcaagaaaacccaacgcaaattcaagaaaacccttgccaatgaacccatcgcgctgtcctcatcatcctccttgcctccgtggcagtcccgagctcaggggctggcggatctagcccccgccaccgcgtgcctcctcctacacctcgcaggagaggagaggaaaggaagggtggagatgaagaccttgccatacctcctcgtcatcggacctccttgccacaaacaatttgaccccccgccgatcggggagagggagaggcacctgcttgctgcccaggggagagggagaggcatccacatgcgcaggggagaaggatag

SEQ ID NO: 81460 - DNA, 5088 bp, Oryza sativa
  Clone ID: PAT_MRT4530_80985C.1
atggcagattacaccactcgtgggcatgagataaagttagatgagacacaaaccatagttgctacatcatcttccataagtgcagataataaagcgaagcaaaaacagtgccacaatttatttctagcaaggttcatggttaagcatagatcatgtcgtgttatattcgatagtggtggaagttgcaacaaccttgtgagttcagatttagttgagaaccttgggttgcctataaaaccgcatcctcatcgatattacatccaattgttcaattcttttcataagaatgaaggtaatgataatggtgctagatttactcaagataagttcaataggttcaatgacaaggtgaaaccgaagacggtttccaatcaagaaggtgaagatgatgaggacacaactagctcagatatgactatgcctatcttatgtattaatcaacaaaaggaattagccttttcgatggccggcagcatcaaccgtcgtggtctggacctgactggcttcgttttggagctgcggggcatgtgcgttgtcttggggtatccgcatggagtggactaccagggcaagcaactcccggagcaggagggtgatgatgcagagccccacgctacttgggaggtcactgcagtgatcctcactggctcacccgagaggacttcgttggcagtcaccaacgccgctctcctcgccattggcactctgcaccagcgctacctagacgagttgcagcactcgccctaccgctaccaccctcgtcgcggaggagcccgcgactacgccaccttccgggatgctagctcggaggatgacgccaccatcatgcacctggcgcgcatggtggaggcttacgacgcggctcgtatcgacttccatcatatggtgcgtcgtgggttggtcgagaacaacatgaagatcctggagctgcgtcaggagaatctgcagctgaagaaggacctagacgcagtggaggcgcagctgtgtcagctcaagatcgcccagggagaggtttgtcgccccaagcgccgtcgcgtctgccgcagcctgaagatcaccgcccgcaagagtacctccaggcccgaacttgttcgtcagtccctggcgtggacctgcttcgtcgagacccctcgtgccgagcccgcgcctgtggttcctcaggaggagggagcctccggcgttggcagcacggaggatgcgctgctgctcaccttccgccctggcccgtcgcagaatttttctgccagagtcgtgtggggcatggttataccgatggtgacaaccaggagaagtgctactaccggtgatggcaaccaacccgaaggtagcaaccacaacaaccatggcagcccacctccgcctcctcccccgcctccaccaccaccaccagacaccaactccatcctcacccaaatcctcgcccagcaggccaacatgatggctgctttcctccaccacatccaaaatccgccacagcataatgctccacctccaccaccacccccgcaacactctaaactcgccgagttcctccgcatccgtccgcctaccttctctagctccaataaccccgtggatgctttggattggttgcatgccgtggggaaaaagttagacaccgtgcagtgcaacgatgaggagaaagtcatctttgccgctcaccaactgcaggggcccgcatctctatggcgggaccacttccaggctacgcagccagaaggacagcctattacttgggcccgcttcaccgccgctttccggaggacccatgtgcccgccggagtcatggcccttaagaaaagggaattccaagagttgaagcaaggcaaccgctctgtgatggagtatttgcatgagtttaacaacctggcccggtacgccccggaggatgttcgtgaagatgaggagaagcaagagaagttcttggcagggatggaccctgagctgtccgtgcgtctggtctccggggattatccggatttccagcgtttggtggacaagagcatccgcttggaagccaagcacaagaaactggagtcgcacaagcatcgcttggcaaatttctgcaaccaacagggggctaaccaaagagtccgctacaccaatccctatccagggggatcctcctcgcagcagcaacagcagcagcaacctcactccgcgccccgagctcaattcgtggtgcgcgttccacagctgcagcagcagcagagtcagcaagggacccgtgcgccccgtcctcctacgccagccgtgcagcctggacaaggccgcagagacgttcaaggtcagcagcgtctgtgtttcaactgcttcaagcccaggcactttgcggataaatgcccaaagccgaggcgccagcaaggccaagcgcctccccgccccaacaacggtggtaaggatgtcattcggggtcgtgtgaaccacgtgactgccgaggatgtgctgacaactccagacgtcatcgttggtacgttcctcattcattccatccctgctaccattttgttcgactctggagcttcccactcgtttatatctgtgccattcgtggggagaaatcagttgggggtagaaaggcttaggaaccctctactcatcaccacccctggaggggttatgacagcaaaacacgaagaacttggatgtgatccttgggatgaattggttggctcaattccaaggagtagtggattgcgcaaacgcactgtcactctgtaccgagggccggaacaaccggtagttttctttgcacccccaacctctgtcggcagttcggaacttcatcagataggactgtcggaaacccccatcgtcagtgagttcggagatgtgtttccggaagaactacccggtatgccgcccaagcgagagattgagttccggatagatcttgctccaggaacaactcctctgtacaagcaaccctaccgtatggcagcaaatgaactggccgaagtcaagaaacagttggaagagttgaaagaaaaggggtatatacggccgagcacttccccctggggtgctcccgtgatttttgtggaaaagaaggacaagacaaagaggatgtgtgttgactacagagctctcaatgaagttactatcaaaaacaagtaccctcttccccggaccgatgatctgttcgatcagcttaaaggtgccactgtcttttcaaaaatcgatcttcgctccggatatcaccaattgcgtattcgtgaagaagatatcccgaagaccgcgttcaccacgcgatatgggctgtatgaattcacggtgatgtcgttcggtctaactaatgctcctgccttcttcatgaacttaatgaataaagtgttcatggaatacttggataagtttgttgtggtcttcatcgacgacatcctggtgtactcgcaatcagaggaagaccatcagcaacatctccgtcgggtgttgggaaagttgcgggaacatcaattgtatgccaagcttagcaagtgtgagttctggttgtccgaagtcaaattcttagggcatgtgatatctgctaaaggagttgctgtggaccccaaaacagtgaccgccgtcactgattggaagcaacccaagacagtcactcaaattcacagctttttgggtttggccgggtactaccgaaaattcatcgagaatttctccaaaattgccagacccatgacgcagttgctgaagaaggaagaaaaatttgtgtggagcccgcaatgcgagaaagcgttccaaactctcaaagaaaagctggtttcctcgccagtgttaatcttaccggatactcgcaaggacttcctggtgtactgtgacgcttcgcgccaaggattggggtgcgtgctcatgcaggaaggtcatgtggtagcctatgcctcccggcagcttcgtcctcatgaaggcaactaccctacccatgatttggagttagccgctgtgaggagatggttagaactcatcaaggattatgatgtgggaatttactatcatcctggtaaggccaacgtggtcgccgacgctctaagtcgaaaaagccgttgcaacactcttggcgtccatgacattccaccggaacttaatcaacagatggaagccctgaatctaagcatagttagtcgtggatccttggctatgctggaagccaagcctaccttgctcgatcaaatccgcgaggctcagaagaatgatccagatatgcatgggatcctcaagaatatgaaacaagagttcgtggccctttgtgatgtgtgccagcgtgtcaaggcagagcaccaacgaccggccggacttctccaacctctccaagtaccagaatggaaatgggatgaaattgggatggatttcatcaccggacttccaaaaacccagggcggatatgattctatatgggtagtcatggatcgactaaccaaggtagcccggtttattcctgtgaagaccacctatggagggaacaaactagctgaactctacttcgctaggatcgtgagtctccatggcgttcctaagaaaattgtatctgataggggaagccaattcacctctcacttctggaagaagctccaagaagagttgggtacccgattaaatttcagcactgcgtatcacctgcagacagatgggcagaccgagcgtctgaaccagatcctcgaagatatgctgcgcgcatgcgttctagatttcgggaagacctgggataagagtctcccctatgccgagttctcctacaataacagctaccaagccagcctacaaatggcaccctacgaagcgttgtatggacgcaaatgtcggacaccgctattgtgggaccaagttggggaaagccaagtgttcaggactgatatcctgagagaagctgaagcgaaagtcagaaccattcgggagaatctaaaggtggcccagtctcggcagaagagttatgcagacaaccgatgccgtgacctggaattcgcagtggatgactttgtgtaccttcgggtcatgccattgcggggcgtacacaggtttcaaacgaaaggaaagctcgcacctcggttcatgggtcctttccgtatcattgctcaacgcggagaagtcgcttactag

SEQ ID NO: 81461 - DNA, 306 bp, Oryza sativa
  Clone ID: PAT_MRT4530_80986C.1
atgaagagaatagtggaaagtaaactgaacataaagaaagtgaatccgagttgcttgttcgtgagagctattcccagttatgaatcaagtgatatgttcgaagataatctacagagtggtaacttgtatgaggttgactccgaagatatgaatcatgagaagttctggaacggaagcatcattaaactaccgcaacctagtctgagtcagctaaaaggtgcaccctggttcaagtcaggtgaagagaagattccatccgcaacagaaggtcaagccaagcagttccgagtggtgaagttttgctga

SEQ ID NO: 81462 - DNA, 387 bp, Oryza sativa
  Clone ID: PAT_MRT4530_80987C.1
ataaagagaatagtgggaagtaaactaaatgtaaagaaagtgaatccgagctgcttgttcgtgagagccattcccagttatggaacaagtgatatgtttgaagataatctatagaggtcagttgataacttgtgtgaggttgacgccgaagatatgaatcgtgagaagttctggaacggaagcatcattaaactaccgcaacctagtctgcgtcagctaaaaggtgcaccctggttcaagtcaggtgaaaagaagattccatctgcaacaggagatcaagccaagcagttcagagtggggaagttttgctgggcaagtacgttcaagaagatgcaacggaagaagtcagatcataaaagaagaccgcccaacctatcttcttgctag

SEQ ID NO: 81463 - DNA, 375 bp, Oryza sativa
  Clone ID: PAT_MRT4530_80988C.1
atgaagagaatagcggaaagtaaactgaacataaagaaagtgaatctgagttgcttgtttgtgggagctattcccagttatgaaccaagtgatatgttcgaagatagtctacagagtggtaacttgtctgaggttgactccgaagatatgaatcatgagaagttctggaacggaagcatcactggactaccgcaacctagtctgagtcagccaaaaggtgcatcctggtccaagtcaggtgaagagaagattccatccgcaacaggaggtcaagccaagcagttccgagtggtaaagttttgctggaagttcgtcaagacgcaacggaagaagtcagacaagaagagaagaccgcccaacctatcttcttgctag

SEQ ID NO: 81464 - DNA, 1032 bp, Oryza sativa
  Clone ID: PAT_MRT4530_80989C.1
atggattgggcttcactcccagcagacctcctcttctccatctccagccatctgcgcgagccggaagactttgtccgcttccgtgccgtctgcccgcagtggcgagccgccgtgtcgcatgaagagcacgctttcttccagccctggatcatggcgagccgctggcttgaggacgaatattccgaaaacttagtcttctactcgctctccacgctgaaaaccatcaaggtacgtgtccctgatatgaagggcaagcgcattgctgcgtctggctccggacacctcgtcgccatcgacaacgatgatgatctatccgctgtgctcgtcaaccccctcttcgggaagaccacggcgctgcctcgcctgcccgagttcttccacgacaatggcactcacggctgggttaccggtgaaggggtcatcacggtggtgctctacaattggatgagcgaaagcatggcgctatggtaccatggcggtgggatcactatgaagggctgggctatagtgcctgggaggaagttgtggttgaggatgccatactacctgagaatgcttgctgcccatggtgaccagatggagatgcatctaacagaccttgatagagacaacgataacagcgttgtgctactgcaggagacacagaaggttgagttgcttggcggctgctggcatgggtcagatgagttgttcaaggcaactaccccataccatcacgagtggttctcgctgtacaggatggtcaaacaggaggaaatcccagttcatgacatcaaaaatgccatagtagtgcagagctgtgactcttgcacccgcacctacatgatcccagcgagctgtgattttgctgcactctgtagcagaaatgccttctactacctcaggaagcagttcgacgatggtggctcatactatgcactttacaagaagtgcttagctagcgaagagttaacctttgtgaagcgcctaccggaagattggaagttgtcagacgagtggttcatgcccactttgaagattggaacactctga

SEQ ID NO: 81465 - DNA, 353 bp, Oryza sativa
  Clone ID: PAT_MRT4530_8098C.1
tactccatacatgctgtttcgtgccctcgcacgcaccgcagtcgcagccttcgtattcaccgtcctcgacttcatcgtctcggccttccacatccgccgtgccgtgccacgctcgttagcttcacccttccgtcactggcctccctgttgccgcagatccgcgatcgccgcgtgcgtcgggcgcactgtccgtggcgctacccctccgatctcaccgaacgccttcggccacgctcggcctcgtcttccagtcacgttctgccatcgatctcatcgccacgattgacgatctcctatcgatgcacgatccccacctcgtgtttcctctaccacatgtcttcgtaatccaatgc

SEQ ID NO: 81466 - DNA, 284 bp, Oryza sativa
  Clone ID: PAT_MRT4530_80990C.1
ggaccaaatctatgcttggatatatacgaaacttaaaaagggtttcataaatctaccatgtaggggatacgggcatatccttcataaggacatttgaatttttgggaactgggatgatccgtatacaagcattatgtctgaagtcacaaacatttcggaccttctcttcttcttctctatctgcagcagcagcagttcagggggggagctggtcctttgcggcggcggcggcgggggaccccggccccggcaacaaggcgtcctttggggggggcgcgttgacg

SEQ ID NO: 81467 - DNA, 239 bp, Oryza sativa
  Clone ID: PAT_MRT4530_80991C.1
cccacgcgacagggactcgtcgccggctgcgtcaccgacaccatcggaatccatgcgctgttgggtgcgtccctcgtcgacatccccgcccccaaggactggccgttcaccggcgtgctcatggagaatgaggaggacctaatctccggcctattgctgacactcgtacttaggatacaggggcctcaagaccaatgtggccaccatacgcggagccaagtcatgggggttgcttgtgc

SEQ ID NO: 81468 - DNA, 1227 bp, Oryza sativa
  Clone ID: PAT_MRT4530_80992C.1
cccacgcgtccgcgtcagtggcccctcttccttttccattatcatgagcatgtcttccccaaaacatctgctcgcctagatataccacttcatgcgacctccgtcatccgggccattactatgagaactctcttacctgttcaggagggacgaaacatggtgggtgctgaaaattgaccgcaccgagccgacgagcctggaaatcgaagatttggtcgaggttattgagaagaagcctcgtgagtctttgcaacgcgtacaatatgcgaaagccattgaccacataaacaatgggttatcaaatgataagcagttaatggttattcatatggacttgaagacttgaagctgtgagctgtttccatgcttgctaatggtgggatttccggccttagctcattcagactttctacattgccaacttactacaacatcggtacctgatcgcactctaagggaacaaaacgatgttaccagtgcaagtagcagtactagcatgaatgaacccaaatttgggataatacagatactgccaattgtgctgcaaaagggagtgctcaagactaactgcatagacagccgagaccgcacaaacagagcccaaattgtggatggactagtcggcttggggcgccagctgaaggcattggtgcagactaagggattgcagattcatatataagagcccttgtcaagtaccttgatgctgttctatgaggaaatggagcatgcattggctcttcaggttactggctctgctgctcaaaacaaggatttttggaagcaaaaagggcagtgcagtgcaatgaataagctgacccggaacatcctacattttgtgagcaatgcttacatggacagtgaaaagcagaattctccaaacatgtaatacaagaaactccactgctgtacaaccatccaacaatctcaaaaatctgcaacatatctgaccacgttgcgtgaaggatatgaaaccggtagcatggaggaaacaaaaaggactactattattactcagcttgtgaaaaaaatgttgagaaagttcatatacttgagaagtaaagccagtgccagcatccattattatagcccacagattcgaacaagaagctactgaactaatgaacaatccatcttcatttccttctgtaatatgctgtgccaacgtaccatctgacacattgtagtgatacctgcaaaagaagtgtggctagtgtgaattatact

SEQ ID NO: 81469 - DNA, 314 bp, Oryza sativa
  Clone ID: PAT_MRT4530_80993C.1
tctttttttttttattgttgattttttttttctcgacattgttaggtggtggtcttacttttggccgccaacagggatgatacctgaagaataaagacccccattacataaaaacataccgggactgggttttggattacccgattgggttgttcagggctcaaaaaggaaaaacattttggggactaaagatagggggaaccctcagatgcccatcaataccccgcgggaaaaaggacatcccaattggttcgtatgccccgcatgaccagtgggggcgaggggactaaaacctgcttttgaaggggaacccc

SEQ ID NO: 81470 - DNA, 192 bp, Oryza sativa
  Clone ID: PAT_MRT4530_80994C.1
atgcccgtcggagatcgccggccgccggttcccctaaccgccgcaatcgaccccataccggcgccgctgcacatcctgatcaccgggcaggcgcctttcatccctcggccggagcaagaggttgaggtgtcgagcgcggagagagaggcacccaggctgacctcgctggtggcgacctggtggtctgtgtga

SEQ ID NO: 81471 - DNA, 153 bp, Oryza sativa
  Clone ID: PAT_MRT4530_80995C.1
atgtcacggccagcgtccagcggcccgtcgcggcgagggagcgagcgtcgtgtggctatatccggagacgtcgtggagctgtttgtccccgctcgtggccgcgacggctcgctcgcgcgcgcggggaccgcctccgcccgctcccgcctgtga

SEQ ID NO: 81472 - DNA, 111 bp, Oryza sativa
  Clone ID: PAT_MRT4530_80996C.1
atggcttgtggcaacaatagcaatggcaacagcaccactgatggtgagaatggcaatgctagtggttctgcttccaataccaccgcaactaatgttgtagcaccccactag

SEQ ID NO: 81473 - DNA, 365 bp, Oryza sativa
  Clone ID: PAT_MRT4530_80997C.1
ctaccacaatctcaccctaggaaccccaacggggccattgttttttcccccccccccggacctggaaaaccggacagtgagcgcaaccaataatggtgacttagctcactcattagacacccaggctttacactttatgcttccggctcgtatgattgcgtggaattcgtcgagcggataaacaaatgttcacacaggaaacagcgtatgaccatgattacaccatagctctaatacggacatcacctatagggaaagctggtacagcctgcaggtaccaggtcacggaattcccagggtcggacaccacagcgtccggtaggcgttattggaacgagctgaatagttcttcttcggtattatgt

SEQ ID NO: 81474 - DNA, 901 bp, Oryza sativa
  Clone ID: PAT_MRT4530_80998C.1
tccacaaggaggtcaggggtggaaccagctccgctccaactaccaaggaggcagcgacaacaataacgatacattcaacaaccagccttccttgaaagatcttgtttttattcaggctaaaactaccggtgctctaagcaagaaactagctgccaatgacaagatctctactctagtccctgctaatgagactgggaggattccagggcaacccgaaccctccatagaaaatgttaaggcaatcatcatgaggggaggaaaatcgacttaggatccaccgtatcttaacactgcatgaactaggaggaacagcgaggatacatctcaatctagcacagcagggacagaggagatagcacctcaggaatatcgtgataccaatctgctgccatttcctcaatgatatcgaaagccatccgtggacgagcagtcctctcgttttgttgaagtcattcaaaagatccacataaacgtgccacttttggatgtgatgcaagtacccacacacgcttgctacctgaaggacattctaaacaacaagagaagtgtagcaaccacagaggtggtgaaactgacgaaggagtgtagcaacgctttactccaccgacttccagagaagaagaaagatccggggtgtcccacaatcacctgctcaattgggacacagcatttcgaccaagccctctgtgaccttggagcaagcttgagcgtcttgccaaaggaggtcttcgaaaaactcaacttcgcggtgttggcaccaacaccgatgcgtctccaactagctgaatctttggtccgctacccagtgggtattgctgaagacgtaccagtgaagatccgggatttcttcatcccgatagactttgtggtgcttgacatgcaaacaggccataacaaagga

SEQ ID NO: 81475 - DNA, 627 bp, Oryza sativa
  Clone ID: PAT_MRT4530_80999C.1
atggcggtgaggagaagcgagccgcgcggggagtccgggttgagggagaggaggtgcgagagctcgtcgtcgtcgtccgcatcggcgacgcgcgagggaccgccaggcatcggcggcgcgtgctgggtggttgcgggtgtgggggtcgccgacgccctcctctcccgcctcgcccctcctagtgtgagagcttgcccaccaccgcccacgtccacaagtgtaagcctcctcatcataaccctcttccgtttcccgcctcctacgtcgcctcaccgccgacacggtctcccccgccgccttcgactcgctcctgtcccttcccccgctgttctcatccccacccccgcagccgccgccgcccacttcgctgtcacgacctaccttgccatctccgtgcccgactttgatgtagcggcgggggacctcttcgcgtcccccggcggccgtgcacgcccgccaaccgccctgcagcgagtgagcgcggagaaaagagagagagggagagagatgatgtggcagcttgacatgtggggcccacgtgggtcccacgctgattcagccaccacgtcgaacaaaactggggtcaaaaccaccgagggacctaaagagaacggttttgttagttga

SEQ ID NO: 81476 - DNA, 601 bp, Oryza sativa
  Clone ID: PAT_MRT4530_8099C.1
caggaaggagcctcagaaatcatacagatcgagtgaatttcagaacatgcagagcccatcgcctcctagatgttcgccttagcaaaaccgccaattctcccagaaacgacttcacggtcgacgagacgaaacacaaaaatccacaaacagatcctactccggagctacgcggttgcggatccggcgatctcgacggatcgacgcgcgcgcgcacgtgcgcgcgacggaactggcaacaccgtacacgtgagccgagaggggggggggcgaaccggcgcaggtcttctccttggtgagcttgtagatgagcacggcgatgccgagcgcgtgcgcggcctccgcggcgacgaagaggttgtcgtggtcgtggacgatgaaccggatgaagacgagcgcggccatgccggtgacgacggccaggaaggccttcaccttgggcggctgccgccgcacccacgccatcaccgcgccgagcggccgcttcgcccccctcatctccgccgccctcgcctcgcctcgccgccgatcggagaacacggggaggcttctttttctccccttgttttttttctttttttttcctctctcgttttttttcccc

SEQ ID NO: 81477 - DNA, 387 bp, Oryza sativa
  Clone ID: PAT_MRT4530_809C.1
ttttgtactcctctacgcggtcacgggttccccagcggtggataaagcttgatagagagcgcatcgagcctttaaatctctctttcttcttctagacgtagtctgcaggcacctgcttctagcgttcagtggcgaacgtacaatctttcgtctgaggaaagctcccatccttgctgagtgctcgggctgtttctaccacagtggttccattcgcggagaattttgccttccatctcgttaatcggggacaaaggaggtgggaccttgctttctttactgcaagaaaagggaagcttcttcgttagaacgtctgcactttgcagggcaccgacgaaggcgatgctgcccttgctgatttcagccttattcttccgatggtccaggtga

SEQ ID NO: 81478 - DNA, 1528 bp, Oryza sativa
  Clone ID: PAT_MRT4530_80C.1
actagtggatccccgggctgcaggtttttttttttttttttttttttttttgaaatctcatccaagccacataggaataatgatcattattactttatcagtgcctcagtgcagcttccaatccatacaattttatttagagcctacattgggttgctatgaaacagcccgtataacatcaatgcactcaaactcccaaagccataattaatcgtaagaaagttcttggtcaataccttgcctcatggtcatcggtgctatcaattttctgcatctattcagccaatccaatagcacgtactacgtagcccgcccgcgggaatccgcctcctggcccccctctctgttttccttttctttttttttttaatgagacaagcaatttacggttctaattagtacctgaagaacgcacaaacaacattgcaacactgttattcagccgaattaaccgaataaaatctccaagatttcagcaattgaaaagacaacaagtcatgacagcttattcaacaaacagatcccacgcaacagtctgagcactccaaaatactccctgtccaattaaaacagtatggagaacaaaccgaacggagagtccttctcccggtcgcagtctcgaggcatccaccggaggcagcactcacagaaacttcctgtacggccggccggcgtcctcgtcctgcatatggaattcgcggacgatgcccttgtagacgaggatggggacggcgagtccgaagaggccgacgacggcgaggctgcggcgggtccagcggaagttgaactcgaggttctcgcggcctgcgttccactcctcgatccacttgttcttgtgcacctccatgccgccccccatcttctccgctccctctcctcgatccgccgccgccgccgcctcctctctccggctgcgagaatgcgctggtgggctcgtgaaaaggggcaaagacccgacgccgatctggtttggggagacggccgcctcgcggaggagcggaaggcgtggcggaagaaccacccacacggtttcgtcgccaagccggagacgttggccgacgggacggtcaacctcatgatctggcactgcacaatccccggcaagcaagggactgattgggaaggtggatactttcctctcactcttcatttcagtgaggattaccctagcaaacctcccaagtgcaagttcccacagggtttcttccacccaaatgtctatccttcagggacagtctgcctttcaattcttaatgaagacagcggttggagacctgctattaccgtcaagcaaattcttgttggaatccaggacttgcttgatcagcctaatcctgctgatcctgctcagaccgatggttaccatctttttatccaggatcctacggaatacaagaggcgtgttcggctgcaggccaagcagtatcctccgattgtctgagaatattggcatagggacccatgctgcacattcgcttagttcttgctagatctaaaatgagtccctctgcaaatatggattaggcca

SEQ ID NO: 81479 - DNA, 267 bp, Oryza sativa
  Clone ID: PAT_MRT4530_81000C.1
attccgcgagcgcgctctcgccgtgttgggtactggcgcgcgccacgtcactcccagatctcccccctcctgtgctccccgtctcagatctacaccgacggcgccgccgaaaccctagcccaaccccccgccttccgccgtcgcgcgcgggggggacctccgcgccggcgcagtctggggcatcgtgttcacgcggctcttatgatccgtcttaagcaaccgataggaccgcatgctcgtccttggactcgacggtgcgggcaagac

SEQ ID NO: 81480 - DNA, 837 bp, Oryza sativa
  Clone ID: PAT_MRT4530_81001C.1
atggcacgtgggccaatggatctttggaacgagtgggcgacccagatcctggtgctcttgagcttcactctgcagatcatcctactccagcttgccgggattcgtcgccgagaagctccagctgtgctgaggcttctcctgtggttggcataccagctggctgactccactgcgatctacgccatctgccacctctccctcggtggcacaccgcgtgagcaccagctggtggcattctgggcaccattccttctgttgcaccttggtggcccggacaacatcaccgcatattccctcgaggacagtaagctctggctccgacaccttctcactgtcgttgtgcaggtcttgggagctgcatatgtcctctacaaacaattcaggggcagtggaagcccactcctactcgccaccattttgatgtttgttgtaggtgttgtcaagtatggggaaaggacatgggcactcatgtccggcaacatcgacaccatccggagtacactcaagaaggagccgcataccaagtgccattcccacattgagtataagccccaccagatgagcttcagtaatgaagggcactttaggagggaggctaatgaagaggaattcctgatctgtaatgctcacgccctgttccacatttgcaagtatgcggttgtcgatgattcttcatatgacaatactagggatacccgtgccagtgacgccgcaatacttcgtggcattacggacgaacagaagtatgcagtgacggaaattgagctctccctctctccctcatgtacgatatgttgtacaccaaggttaagtgactctcaatttaaaacttattaa

SEQ ID NO: 81481 - DNA, 253 bp, Oryza sativa
  Clone ID: PAT_MRT4530_81002C.1
atggttcccgtggacttggagagacccagctgtggtcgcgaacacgcgttccggcatccaattgatcgcgggcacgagatgcgtctcgtcgtcgtatttcctgccatcttccggctgccatcggtccccgagggaggttcaggccaccgtcttcggcttgaagcttatctgctgtacaacccgttgccccaaggtcagactgctgccagcgttcgcctgttccaaaatcccaagtacttcccatggatggaag

SEQ ID NO: 81482 - DNA, 2109 bp, Oryza sativa
  Clone ID: PAT_MRT4530_81003C.1
atgctctcccgcgcagcctctctccgccgcgccgcggcggcggccttctccaccgccgcggcgaggccggagaccgggctgtacggcttcgatgtgctgcgcacggccaagggcttccgccgcttcgtcgacgacgccatcgagagggaatttatggatgaggcagataaggcatcaatgaggatttatgaacatcttcaatatctgaataccaatactactttgtacaatgcaatacttaaagctgagagcgaaggtgtcatgctcacagaggaagctcgaagggcagccaccaccttgcgtgttgactttgagaaagggggaattcatcttcctaaagataaactcgaacatgttaatcatctgaaccttgagattgcccagctgggtcgaaattgcatgtctgccagactgcaacttactatcagcaagcgatctcattatttggtgacatttgcttgttggttcagtgaaaatgttatgaacaaaccaggttttgtggatatatatccagcttcgcgcattccaagaaatatgcaacgccattttaaatccattcaccgtattaaaccttggggcgatgaggaacaaagaaatcaaatggacactacaaagcaaaagggtctaaggatagtcactgattcaggaactctatcaacagcactgagatgggtctcagatgaggaaatcaggaaacaggtatacctggtaggaaactctgaacctcgtgaaaacattacagttcttggcaagcttataaatgcacgtgacgagcttgcgaagactatgggatgcaaatcatatggtgattttgctattcgtcctaacatggctgcatctgtagatgtcgtgatgtcatttctcaaagatttgagtggcgtggttaggcataaagctggtgaggaatttaaacgtatacaggacttcaagagaaatgtatgcaatgaaaagagtgctaaacttgaaccctgggatgaggattacttcattggaatgatgaaatcagctgtacataacctggatgtctcagtggttgcagcatactttccattgtcccagtgcctaaagggcttaaacgtgctggtggaatcattatttggtgccacatttcatcaaattcctatgggggacggcgagtcatggcatccagatgtgatgaagttgtctctccatcatcctgatgagatcgttgctctagtttgcaatttttcaagttcgagcaaaataatggcaaggcttaaccattgggatgttgaaactctgtttcatgagtttggccatgcccttcattctctactctcaagaacggagtatcaacatttctctggtactagagttgctcttgatgtggctgaaatgccatcaaacctctttgagttttatgcatgggattatcgtgtcttgaggaaatttgctgtagatgaaacaactggtgatccaataccagaaaagttggtaaaggcacttaatgcttctcggaacatgtttccagcaacggagctgcagcgtcagattttctattctataatggacttgactttgtttggggagcaaggatccaagccaatggacacaatttctactgtagctgatttgaggagaaagcatacaagttggaaatgtgtagaaggcacacactggcatactagatttactcatctgataaattatggcgctggctactatagttatctttatgctagatgttttgccacaactatatggcaagaagtatgccaaggtgatccattatcccgcagcacgggtagtgcacttagggacaaatttttgaagcatggtggagctaaggatccttctgccctgttaaaggatttcgtaggtgattccattattataaactctggaggaggaataatccctgacattagctccttgtgtaaagaagtcggtttgtgaaataccattgggagtggagattgggatcattatttttgacattgagatgggttaaagggtcaaagactcatgatatcatgagtcaggagcttgatctgccacagggctgcaggatctagttgaaggtcaagctgaaaaaaataatagtagatttttgacaaagaactgatgaattgggtctcaatacaggat

SEQ ID NO: 81483 - DNA, 3339 bp, Oryza sativa
  Clone ID: PAT_MRT4530_81004C.1
atggccgccggcgatcataggggcgcgggcgccgcctcccgctggccgcgccgagtggccgccgcgtggggcccggccgtcagccgcccgcgacctcgggtgcggctgacgcgtgggacccacggcgccggccggtgcgagcccgggtgcgcccggtccaccgtggaccgtgaggctgccgcgtgggccccactcccgtggacccggaggagatctgcccagagccacaggcggtctgaccatgggtcagtcgccggtctgaccggcgtgtgcgcccggtctgaccggccggcagccgtcggtctgactggccaccagcgggcggcaaattttcacctctccaaattgtttctagaattattactaatatctatcatcctttgctctttgatagtgatgcctccccgcactcgccatggtcgtcgtgcacccactccggatcccgtgagtgagcctgaggaatcgtgcggcaatgagtacgctcaaagtgatgaagaggttgaggtcaatgttgaaggggctagtgaggaggctagtggagatgatgacagtggaagtggagaggatgaggatgaaggaaagtttgagggcttgcaggatctcttcaagactgttggcattgaccagattgtgactctcaaacaagactacaatgaagatttgatccggcagttctatgctacagtgtgggtggctggagactatggtgagatgaagtggatgtccaacacccttcaatgttctatctccaggaggcgggcccgcccgccgccctcgctgacgggtggggcccacctgtcatcgccttcctcccgccgcgcccgccgccgcgcccgtgccctagcgccgccgccgccgcggattgcgccgcatcccgccgtccccgcgcgcattaaagagaggggaattactccccgcgtttccctctcccgattccccctcttttccctctctctctccctcggattcgtccggattcatcccgcgaagttcgccggcgtcttcaatggcgcccgagatctccgcgcgcggtttcctctctccccggccgcgctctccccctcccgttgctatatattcgatccccgtgcttcgctcttccgtttccgccgctcgccgctcgctctcgccgtcggtttcgtgcccgcgccgtgctcctctctctccgccgtcgccgccgaccttcggttcgccgccgacgtcgctccggtcctccgcccgactcggcgccacctccttcggcttcgccgcatcgccgtcgacctcgtccgcgcctccgtttcgctcgccgaccgtcggagcgccgccgtcatcgtcatcccgagccgcgccgccgctttcctccgctccggccgccgttctcgtcgtcgtcgttgtcccggggtgagccgaagaccgccgttcgctttcccccttctctccgctctctcgggcgccgctccgccgcgccgatggtcgccggcggtgaccatcggggcgcgggcgcgccgctcccgtcggccgtgccggcgaggccgccttcgggcgcgccctcgcggctgccaagtgggcccggccgtcagccgcccgcgcccgcgggtgcggctgacgcgtgggacccacggcgccgaccgccgccagccgcgtgcgcccgagtgtctgatagtgaagattcagatcaagtctcctcagatgatgaagatgaaatggaacgtaaggcatgctctcgttgtggagaagtcggtcatgttgccagctcgtgtgccactacctgctttcattgtgaggaagaccatccacccgtgccaggacagaggaatcaaaatgagaaaagaaaatgccgagtccgggaagatatctgttgcttcaattgtcaaggaatggctccaactccagcgagtgcattaccacaaggtgtcaatgctcactttcagccccagcaaagaattgtcgtcgatggaagaagttgtgtctctccccgacctactccaggccaagcaaagggcaatcgacctccggagggcgataccaagcagaagaccgtcatccgcttcaaccagcaatcagaaggaagcttctcctgtgaatgatagcattatgcagtcctatcacatcatcacagaaccaatcgaggatgcagtcactggaacaatgccagctatatctctccagaatcaaaatgagcagccatgtttgtggttttcagtccgctacttatcgtggtgtaatcgaaagtttgcagcaatcatgcgggcccgcccgccgccctcgctgacgggtggggcccacctgtcatcgccttcctcccgccgcgcccgccgccgcgcccgtgccctagcgccgccgccgccgcggattgcgccgcatcccgccgtccccgcgcgcattaaagagaggggaattactccccgcgtttccctctcccgattccccctcttttccctctctctctccctcggattcgtccggattcatcccgcgaagttcgccggcgtcttcaatggcgcccgagatctccgcgcgcggtttcctctctccccggccgcgctctccccctcccgttgctatatattcgatccccgtgcttcgctcttccgtttccgccgctcgccgctcgctctcgccgtcggtttcgtgcccgcgccgtgctcctctctctccgccgtcgccgccgaccttcggttcgccgccgacgtcgctccggtcctccgcccgactcggcgccacctccttcggcttcgccgcatcgccgtcgacctcgtccgcgcctccgtttcgctcgccgaccgtcggagcgccgccgtcatcgtcatcccgagccgcgccgccgctttcctccgctccggccgccgttctcgtcgtcgtcgttgtcccggggtgagccgaagaccgccgttcgctttcccccttctctccgctctctcgggcgccgctccgccgcgccgatggtcgccggcggtgaccatcggggcgcgggcgcgccgctcccgtcggccgtgccggcgaggccgccttcgggcgcgccctcgcggctgccaagtgggcccggccgtcagccgcccgcgcccgcgggtgcggctgacgcgtgggacccacggcgccgaccgccgccagccgcgtgcgcccggtccaccgtggaccgagcggctgacgcgtgggcccccacccccgtggacccgggcaaatgaaggctacacgagctgcggcccggtagtcgagatgtcatacggcagagggttggtgcccaatgctaggggctcagttctgcctgcctgtcccgggtatcccggccgtagtcttgctcaatttttcccaagtccagaagaggagctccttgaagatgaaggctttggtgtctag

SEQ ID NO: 81484 - DNA, 1633 bp, Oryza sativa
  Clone ID: PAT_MRT4530_81005C.1
aaaaaaaacacaaacccaaaaccaaaaaagcgaacggaacatttcgccgccggccgccacgacgccggcgaccgccaccgccaccatgtcggcgctggctcccgccccgaagctgcagccggacgagcggtccaacctcctctcgctgctcgccgccgcctcccgcccgctcgccgacatcgccgccgacttcctcgcgcggttccccctcgagcgccgcctccgcgtcggcgccgcgctcgggttcctcctcgaggacaagaagatgcttcatcctactggtcggttgattgcatttgctattcttcaccagagttattcctcggagccggcaaacccatatgttccacttttattaaatgcagcctgtgatgaaacatcagaaaaatcggaacgggcatttgtccaacttttgttgacttcagcaagtggaaacaataacattgaggtgctgaagcagtcagctgtagattacataaatgggtctgattctgcatctcaggccttacttccacgagaacagcttgagaagctattcagcagtaatagtgtacagtctcagcctcagaccagtagttttagtgcaggaactgttagatgtgctataccggatccagatgtacctcaaagctgtgtaaattcgtcagagcctagcatatcattacctggaaccaaaccaaaatctgcttctgatgatagagattttgctcttgctggtttactccaagaaaaatcatggggaagattgggtccgcaatggatacgacccacacccccaagacttcacatacttgatggagagctacaatggttgaaccctgacaacaatcacgagctattatgggattatagcatgtgtgctgacacaagtcgaggtgctgctattcgagatttgattgcaagagccttaaaaggtccacttgcaccttcccaacaagaggaccttgttgaacacaatccactcattgctgttgaaattctttcgaaattgatgaactctcctgacattgatggttacttagatgttcttgtgcatatggagatgagcctgcattctatggaagttgtaaacaggcttactactgctgtagaactcccgacagagtttgtccatgagtacatctcgaattgcatccaatcatgtcagaacgttaaggataaatacatgcagaacaggttggtgagactagtttgtgttttccttcagtctctcatccgaaacaagatcataaacgttcaagacctcttcatcgaggtacaagctttctgcattgagttctcacggataagggaagcagctggcttattccggctgctcaaatctttggagtgaagaaatgaattatatgttggtcgtatcgtcatcaaatgtttggagatttctggttttgggttagttctctggactctgggtgctcaaggcctggtgatgtgtaccattttctatcagaatctgcagcacaccctccttacagcagtgcacacgcttgaaagagttattaagaagactataccaagaacagattcagtactcaatttatactcggtgcaaagttagatctgcttgtaagtccactgtacggtgacaaataatagatgcatgtttttgatataaaaaaaaaaaaaaaaaaaa

SEQ ID NO: 81485 - DNA, 396 bp, Oryza sativa
  Clone ID: PAT_MRT4530_81006C.1
atggccgaaggcggcggcaatggtggaacctcaccggagcgcgggcagaagcgggctctggcagcggaactagacggaggggaggtggacgaggtggacctcggccgcgcgaacccgatggcggcggtggcgcgaaaatgcaaaaatataccaattccacgtgagaggaacgtggggacacacaacgcggtgcggactgcggagaggggaccaacagctggaccattcctgtggcatgggagggagcgtggaacagctgtatggtccgacggcgtgggcgggcggcaccgccatggtcctacgccacagaagcgtggcaacgcggtggcgagccgaatcgtgcgataccaagttaccaacgcgatcccgcgagttgggagcgcggcatcgatctga

SEQ ID NO: 81486 - DNA, 4116 bp, Oryza sativa
  Clone ID: PAT_MRT4530_81007C.1
ctccttgtttggaatattcctggtttggagatagaattgtgcagccgggatggttgttcagaatggttgggcctaggcaacaggatgccgcgcttcaagcctgagtacttgtttggtgttgagggatttgtccaggagttgcgtacgatgtcctttgccataggatttgggactgcccctttgtatgcccagattcctcatgatcatgatgaagagaagtgccgagtcaaagtcaccttgaacagtaatagtgaagatatcccatcagtgatgttcgaagctggaggaggaaactacatccatgcatgtcaggaggtggcaaggatcgccataggagagctccgcgatcgctacagtgatcagttggccgacactgagtatcgctaccatcctcgccaaccccagggaagtgaccgtggcagctaccttgagactgaggggattgagaatgatgctaccacaaggcatttggttgagatgctgtgggctatggatgaaacccgcgcggaggttgtgctagcagctcaagatcgtgaagaccagaatcgtggtaagatttgcaggctagaggacaaggtggatcgtttagagaaggaactagccgcgttgaagggagaagcaccaccgcagaaggccaggattcgtcttaccgcaaggaagagagctctattcgtccctcgctaccaattggcgccaaaggtccgtgtggtggagaaagaagttaccccagccctagcggatcctccggtcgtcaatatggtgctcactcgcagcaatgggaatggccccaataataacaacaacaacaatggagagaatcccacgcttgcccaagtcctggctcaacaggcccagcttatgaacatcatgatgcagcaactccaaaaccagcagaaccagggaaataaccatgcacctccccagaacaagttagcagaatttcttcgttgcactgatcaggagaaggtctcatttgcatcacaccaactgcatggccctgcctctgagtggtgggatcacttccgccttaacagaactactgctgaacctatcacttggcttgaattcaccgctgctttccggaagacgcatataccatcgggagtggtgtctctcaagaagaaggaattcaggtcgctcacccagggatctcgcacggtcaccgagtatctgcacgagttcaatcgtctggctcgttatgctccggaagatgtgcgcactgatgaagagcgccatgagaggttcttggaaggacttaatgatgagctttcttacccactcatgactagggattatcatgatttccagaagttagtggataaggctattcgccaggaggacaagtacaaccgcatggagcagaagaaacgtcggattgctcacttcaaggcacaacaggggaatagtcagaggccgcgtcttactttaggaccccagtccatgccacagggaggttcttggtctgttgttcgtccgcagcgacagttcttcaacaacaatgctggcaacaacatccgcaatcaagctccacgccctgttgcagctccaacacagcaacagcctgccaagagggagcaaggcagcaagcccggggtgtgcttcaactgtggagacccaggacattacgctgacaagtgtccgaagccccgacgcgtgaaggttgtccctgcccagagcaactctaccgcaccagcgccaaaggctcgtgtcaatcatgttgctgctgcagaagctcaagttcctgcaacagtgcttttcgattctggtgctacacattcatttttatctatgagttttgtgggaaatcatgggatggaagtagaagatcttagacgtcctttgatggttagtaccccgagtaatcaagcactctctttgcaacgtagcccctctatcagaatagaaattcaagaagtaccatttctggccaatcttatcctgttagaatccaaagaccttgatatcatcctagggatggactggttagccagatataaaggtatgatagactgcgccaacagaaaagtaattctcaccagcaatgatggtcgagttgtaactgttcatgcattatcttctgagtctttaaggtcaagtctgaaccaaatgactttggaagagattcctatagtccgggagtaccccgatgtgttcccgaacgatttacttggtatgccgcctaaaagggatatagagttcagaatagatctggtaccaggaacaactccgatccataagagaccttatagaatggcagccaatgaattagcagaagtcaagagacaagtagatgatttgcttcagaaaggatacatcagaccgagttcatctccatggggagctccagttatttttgtggaaaagaaagatcatacccagaggatgtgtgtggactatcgtgcactaaatgatgtgactatcaagaataagtacccgctgcccagaattgatgatttgtttgatcagtttaaaggtgccaccgttttctccaagatagatctccgatcagggtatcaccagttgagaatcaaagaggaagatatacctaagacaacttttaccactaggtatgggttgtttgaatgtactgttatgtcttttggacttaccaatgcccccgctttcttcatgaacttgatgaataaggtgtttatggaatacctagacaagttcgtggtggtctttattgatgacattcttatctactcccgaaccaaagaagagcatgaagaacatcttcgtcttgcactagagaagctgcgagaacatcagttgtatgccaagtttagcaaatgtgaattctggttgtctgaagtgaagttccttggtcacgtcatctcagccggaggagatgccgttgatcctagtaatgtggaatccgtaaccaactggaaacaaccaaagacagtttcagagattcacagtttcctaggcctcgtaggatattatcggaggtttatagagaatttttccaagattgctaagcccatgacacgattacttcaaaaggatgtaaaatacaagtggtcagaagaatgtgagcagagttttcaagagttgaagaatcgcttaatatcagctcctattttgattttgcctgatccaaaaaagggttttcaagtgtattgtgatgcatccaagcttgggttaggttgtgttctgatgcaagatgggaaggtggttgcctatgcatcttgtcagttacgtccgcatgagaagaactaccctactcatgatcttgagttagttgcagtggttcatgcgttgaagatttggcgtcattatcttttcggtactcgtacaaaggattatgacatgggaattcattatcacccgggaaaggctaatgttgtagcagatgctcttagcaggaaaggctattgcaatgctacggaaggacgacagttgccattggagttatgcaaggaatttgaaagattaaatttgggaattgtcagtagaggtttcgttgcagccttagaagcaaagcccactctaattgatcaagttagagaagcccaaattattgatcctgatattcaagaaatcaagaagaatatgagaagaggaaaagctatcggtttcttggaagatgagcaaggaactgtatggttgggcgagagaatctgcgtccccgacaacaaagatttaaaagatgcaattctgaaagaagctcatgatactttatactccattcaccctggtagtaccaagatgtaccaggatctcaaggaaagattttggtgggcaagtatgaagcgtgaaatcgccgaatacgtagcagtatgtgatgtttgtcagcgagtcaaggcagaacatcagaaacccacaggtttgctgcagcctttgaagataccagaatggaagtgggaggaaatcggtatggatttcatcactggtctacccagaacatcatcaggccatgactctatatgggtgatagtcgacagacttaccaaagtggctcatttcatcccagtaaagacaacatattccggaagtcagttggcggaattgtatatggcacggattgagaagaatttgaagagttccaaggccagcaaggcaagtcacacagatcccaaacaaccctttgagcatgttgattccgtttaa

SEQ ID NO: 81487 - DNA, 786 bp, Oryza sativa
  unsure (1)..(786): unsure at all n locations
  Clone ID: PAT_MRT4530_81008C.1
gcctagcatatcattaccntggaaccaaaccaaaatctgcttctgatgatagagattttgctcttgctggtttactccaagaaaatcatggggaagattgggtccgcaatggatacgacccacacccccaagacttcacatacttgatggagagctacaatggttgaaccctgacaacaatcacgagctattatgggattatagcatgtgtgctgacacaagtcgaggtgctgctattcgagatttgattgcagagccttaaaaggtccacttgcaccttcccaacaagagcaagtcgtaatagaactggcaaaggactcgaagttggtgtatcattgcgggatgactccacaaaagctccctgaccttgttgaacacaatccactcattgctgttgaaattctttcgaaattgatgaactctcctgacattgatggntacttagatgttcttgtgcatatggagatgagcctgatttctatggaagttgtaaacaggcttactactgctgtagaactcccgacagagtttgtccatgagtacatctcgaattgcatccaatcatgtcagaacgttaaggataaatacatgcagaacaggttggtgagactagtttgtgttttccttcagtctctcatccgaaacaagatcataaacgttcaagacttcttcatcgaggtacagctttctgcattgagttctcacggataagggaagcagctggcttattccggctgtcaanatctttggagtgagaatgaaattatatgttggtcgatcgtcatc

SEQ ID NO: 81488 - DNA, 822 bp, Oryza sativa
  Clone ID: PAT_MRT4530_81009C.1
atggaggccgccatcggcgtcgttcacgcacacagtaacgtccaccagcagtgcagcaccacgacacgcatgcttatgccggccatgatccttcgtgcgccgaaaaccgtgccacatccccccggcagctcctcctcgcaccgtggtcgcttcctttaccgcctaccgcgcctcatcgcgccgtgccggcctcctccaccaccggacgcacctctcgcgccagtccggcctctcgccatcggctgcgcctctcgcgccagtccggcttcctcgccgccggccgcgcctctcgcgccttgccggcctccactgccatcggatgtacctctctgtgccaaggcggcctccgacccctccaatcactgccgcgctggctcagccccctcgccgccgtccagccactgctgcgaccatcgccaccgcgagcgcaccccgttgccacaacagccggtagcgccgttgccgtcgaccagccaccgtgttgttcaccgccgtccagccgccgccgccaccatcgccatgagctctgcgtcgttgccgctgacaccgtcgctgcgagctccgcagcgccgccaccgccgcaagctcgccccacacaagatccgtcctccagggggccggatccgcctccgtcgtgaccaagtcctgcccgccgtcgccatccttgccgccgccttccatcctgctgccattggatcccctcacttctccttcttcgtcgcagccgctactacgtcggccgcgctgccgcagtccatagtcacagtcgtcgccgacgccttgccagtctcttcctttcccgcctccatctcttgctgctag

SEQ ID NO: 81489 - DNA, 296 bp, Oryza sativa
  Clone ID: PAT_MRT4530_8100C.1
gctatactaacccctggccggggagagcacgcccagtcattcggagcggcctgaagacggagctccaagtggagaccgggagccccgggctacctataggctctgaacgacagggagcgcggctggcccccccacgaccacatacgggaaagcgactggaaatagagcggcatcgtgagaggcatctgtaccgtgagtggaacccggaggtggacgcccacctgcaggccgacgggtacgccaactagcaccgtgccctcattggactccagcaagctaggggtgcatgcgcggcg

SEQ ID NO: 81490 - DNA, 821 bp, Oryza sativa
  unsure (1)..(821): unsure at all n locations
  Clone ID: PAT_MRT4530_81010C.1
cggacatagctggagctcaccgcggtggcggtcgctctagtactagtgggatccccggtctggaggactgcggcacgtgcaacacaatgctgctagaaacgctatcggacgatgttgctgctcgcctcgcccgtgacgtggccttggcgagctgcgccgctaactcccggacataaccaccgatgaggcgtcctgggacaagttctgggcactgcgatgcggctcggatcgctttggctgcctggtcacatggcaccgtgaccctcgcacgactggcgctaggtggctgtgaggatcgttgtgccgcagcaccttaaccacgatgtgggcacactctccgataactcacgtgccgcctttcactgggtgtggtgctcacggggcacacgacagccacgcatggtgtgcctcattgagttgcaatgatacgacgactctccattaattgctcctcactgttggtatcatgatatatactcattaatctagttctagtaaacatatcacctaatactagatgagctatgtgtgctctgtcagatcgcctaagtgagtgatcctccgttctgtgtgctgtgcgcgcgnagctgtgagcgttgtccttactatcgctgtagtgctgctatggctttgtgtgtgcgagagctgtcgtcccttctacactagtacctgatggtatgacttccttcttctgcatagacgctgaggcgttcttcttgacagtcatgatcctactcgtcatatataatcttgtgcctgccattcctacttaatggcctctgcggtacagttgcggaccgactcacggtcgtcgtgctccg

SEQ ID NO: 81491 - DNA, 5539 bp, Oryza sativa
  Clone ID: PAT_MRT4530_81011C.1
aataccccgaactatttcagcaagaagaaaccactcgttcctttgccacctcccgatcctatggaatttcgtattcctattgaccccgagagtactccctctagggaacctcaacgacggctcagtaatgcaatgcgagaggttgtaaagaaagaggtcttgaaactcctgcatgccgggattatttatcccgtaccatacagtgagtaggttagcccagtccaggtagtgccaaagaagggaggaatgacgaggatgagcatcgattacaggaaacttaacaaggctacaaaaaaggatcatttcccgctacccttcattgatgaaatgttggaacggctggcaaatcattcctttttctgtttccttgatgggtattccggatatcatcaaattcctatccatccggaggaccagaggaagactacgttcacatgtccatatggcacctatgtatatcgtagaacgtctttcggactgtgcaacgctcctgcatctttccaaagatgtatgatgtctattttctcggacatggtcaaagatatcatggaagtcttcatgaatgacttctcagtatatggaaagactttcggtcattgtctgcagaatctagacaaagtcttacaacgatgccaagaaaaggacctggtgcttaattgggaaaagtgtcgtttcatggtccatgaagggatagttcttgggcatcgagtgtccgatcgaggaatcgaagttgatcgtgctaaaatcgacgttattgatcagcttcctcctcctatgaacatcaaaggaatccgcagtttcttgggacatgctggcttttatagaaggttcatcaagaacttttctacaatcgccagacccctgacaaatctgctagccaaggatgcgccctttgagttcgatgacgagtgcctaaaatcttttgaaattctcaaaaaggcactcgtctctgctccaatcattcaacctcctgattggactctgcccttcgagatcatgtgtgatgcaagtgactttgctgctggtgcggtcttgggccaaaccaaagataaaaagcatcatgcaatcttctacgctaacaaaactctaaccggagcctagttgaattatgcaactactgaaaaagagctgctcgcggttgtttttgctatcgataagtttagatcttacttagtgggagccaaggtgataatttttactgatcatgctgctttgaaatacctgctcactaagaaagatgctaaacctcgcctcttaagatggattttgctgctccaagaatttgacttagaaattaaagataaaaagggagtatgtttagttccgcacccaggccaagatctggcaaattggtttcttctggcccacaatgtaggaagactcaaaagaattcgtcagaagatgcataagctgccagaggcaaggaggaatcactgctcgcgatgcaatgcccctcacatacaatttgcaagtcgagatattcgatgtttggggtatagacttcatgggacctttccctaagtcttgcaactgcgagtacattctggtggcagtcgactatgtctccaagtgggttgaggctatgccgtgcagtgctgcggatgcgaggcatgccaagaagatgttcacagaaatcatcttcccaagatttggtacccccaggatggtcataagtgacggaggttctcatttcattgacaaaaccttccgagacctcctacgagaaatgggagccaaacacaatgtggccacaccttaccatccacagaccagtggtcaagcagaaacatcaaacaaacatatcaaaaacattatgcagaagacggtcaacaaaatgggaataggatggaaggatatattgccggacgcactgtgggcataccggacagcgtacaagacaccgttggtatttcttaacgacattgctagaaatataattcccagcaatggcgcagaaatacttctggtatattatggttacagagttcatccgcaagcgcacggatataccattgtagcatttcacccgagagtattccaagggtatcgtatttattttatcccgtaggaagatcatgtagcctagatttttctgggatttatttgagctaaggaagtatttttaataaatgaaattgcatttaatgaataatttaaattgaaaaaggtttttaaaagtctcttttggctttgggccgaaagacggcccaaaaacctctctccctctctccctcggcccagtcggcccagtccagcagcagccgccgctcgcgcgcgcgtccgcccgctgacaggtggggcccacctgtcggagtcatcgtcttcctcgcgtcggccgccgcccgaaaccctagcgccgcgccgccgtcgccgtccgctgctcctccgccgcttctttggtcaccggtgagttcgccgcaacgttctctatgtcctggtgccctccgttcgtgccgaagcgccgtcgttcgccggcgagcttgcgcgcccgagccgccgagccgccgccggagatgacgtcaccgctgacgtcatcagggtctgtctgctgagaagaatttgaagagttccaaggccagcaaggcaagtcacacagatcccaaacaatcctttgagcatgttgatcccgtttaaagctattgtttctattcaactatcgcatttattttcgaatgtcattgggtggaattaacctattgtttgttatagcccttttatgccgcgctataagcctgagtacttgtttggtgttgagggatttgtccaagagttgcgtacgatgtcctttgtcataggatttgggactgcctctttttatgcccagattcctcatgatcgtcctgaagagaagtgccgagtcaaagtcaccttgaacagtaatagtgaagatatcccctcagtgatgttcgaagctggaggaagaaactacatccatgcatgtcaggaggtggcaaggatcgccataggagagctccgcgatcgctacagtgatcagttggccgacactgagtatcgctaccatcctcgccaaccatagggaagtgaccgtggcagttaccttgacactgaaggaattgagaatgatgctaccacaaggcatttggttgagatgctgtgggctatggatgaaacccgtgcggagactgtgttagcggctcaagatcatgaagatcggaatcgtggtaagatttgcaagctagaggacaaggtggatcgtttggagaaggaactagccgcattgaagggagaagcaccaccgcagaaggccaggattcgtcttaccgcaaggaagagagctctatttgtccctcgttaccaattggcgccaaaggtccgtgtggtggaaaaagaagttaccccagccctagcggatcctccggtcgtcaatatggtgctcactcgcagcaacgggaatggccccaacaacaacaataacaacaacaacaacaatggagaaaatcccacacttgcccaagtcctggctcaacaggcacagcttatgaacatgatgatacagcaactccagaaccagcagaaccagggaaataaccatgcgcctccccagaacaagttagcagaatttcttcgtgtaaggccgcccactttctctagtaccactaatcctgttgaagctggtgattggctgcatgccatagaaaagaagttggatttgcttcagtgcaccgatcaggagaaggtctcatttgcatcacaccagttgcatggccctgtctctgagtggtgggatcatttccgccttaacaggactactgctgaacctatctgtcggtgacatggggccgggggttatcgtgactagaggcttggtcgcggtgtgtgaccggtcacagaccggtcagatcgcgggttaggtggcaacaggcggcctgtcacacgcctcgccccgtcccgtcagaggctaattaacttgccacccgcgtcggtccactcttgggaggatttgtgccagcagttcaccacgaactttcagggcacatatccgcgcccaggcgaagaagcggacttgcatgcggtacagcgaagggacgatgagtctcttcgttcgtacattcagcggttctgtcaagtccgcaacaccataccgtgcatccccgcacacgcggtgatctacgcgttcagggggggcgtgcggcacaaccgcatgctcgagaagatcgcctgcaaggagccccagaccaccgcgagcttctggccgcggcccctacccatgaggcgacgcggcgggcgcggtggtcggaggttgccctcaccttcgaccagaccgaccacccgccgtgcgttgcccggggaggacagatcgcgatggtggtttcccccaccgtttgcaatgtgaagttggggcgtgtcctcgtagacgggggtgcactctcaacatcctttcccccgcagcctttgacgccatcaaggccccggggatggtgctccggccgtcccagccgatcatcgcggtggccccatcaccgtccatggcgacctcaaagccgcgcttgcctgtatggagcagtgcgcggaccacctcgccgcggcgtccaagcccgcgggtggcgacgagaggctcagcacctccgtcccggccgccccgaggcagcggatggtcacgtgcgacgaggtcccggtcaaggaggttgccctgggcgacggcccgtccaagaccacacgaatcggtggtcttctggacgacaaataggaagacgcgctcgtctccttcctgcgggcaaacgccgacgtcttcgcctggagaccggcggacatgctcggggtccccagggaggtgatcgagcaccgtctcgccgtgcggccgggcgcaaggccggtccggcagaaagtgcggcgtcaggcctcgaaacgtcaagccttcatccgcgaggaggtggcgcgacttctggaggccggattcatccgtgaggtcatccatccggagtggctggcgaacccggtcgtcgttcccaaggcgaacggcaagcttcggatgtgcatcgactacaccgaccttaacaaggcatgtcctaaggacccttatcccctgccacgcatagatcagattgtcgaccagataggacgcaatgttgaggcctatgttgatgacttggttgtaaagacgcgcaaccaagagaccttactctcggatctagcggaaacttttgaaagtctccgctccgcccgcataaagctgaaccccgataagtgcgtgttcggcgtgcctgcgggcaagcttctcgggttcttggtctctgcccgaggtatcgaggccaaccccgagaagatacgagctatagagcggatgcgcccccccagcaagcttaaggatgtgcagtgcgtcaccggctgcatggccgccttaagtcggttcatatcgaggctgggagagaaggcgctacccctatttaagctcctcaaacgctccgggccgtcagcgcggcgttggttgtggagcgcgacgaggacaaccctcgctccgcgcgtccccgccctgtgtcgactcgacccaggagagagcagggaggagaggcccccgagc

SEQ ID NO: 81492 - DNA, 1500 bp, Oryza sativa
  Clone ID: PAT_MRT4530_81012C.1
atggccccctcgtggctaggtcaggagggagcggcaccggccgcgccgcatcgaaggccggcggatgaggtcaagctgtcggtggaggaggccgtggcgccggcggaggtggttgcggcacagacggaagaggcgaacgaggtggcggtggtgagtggtggtggaggcggtggagtccaggtgttgtcgcgtggtcgactagcagcaagagatggaggcgggaaaggaagagactggcaaggcgtcggcgacgactgtgactatggactgcggcagcgcggccgacgtagtagcggctgcgacgaagaaggagaagtgaggggatccaatggcagcaggatggaaggcggcggcaaggatggcgacggcgggcaggacttggtcacgacggaggcggatccggccccctggaggacggatcttgtgtggggcgagcttgcggcggtggcggcgctgcggagctcgcagcgacggtgtcagcggcaacgacgcagagctcatggcgatggtggcggcggcggctggacggcggtgaacaacacggtggctggtcgacggcaacggcgctaccggctgttgtggcaacggggtgcgctcgcggtggcgatggtcgcagcagtggctggacggcggcgagggggctgcggccagtcagcggcgaggtggccgtcggcagcagcggctacggtggtagtgaccgtgtgtacgagaggtacatccgatggcagtggaggccggcaaggcgcgagaggcgcggccggcggcgaggaagccggactggcgcgagaggcgcagccgatggcgagaggccggactggcgcgagaggcggtaaaggaagcgaccacggtgcgaggaggagctgccggggggatgtggcacggttttcggcgcacgaaggctggtcgaccgggggggcaccggtgcagtggtcccacatgtcagcagagcggcgctcggtcatgcttagcggcggccggttcggtactagtcttctcccggacctgtgtattgaggctgtcgctggtcttcgatgtagcccgtggttgtggcttattattccatgcccttctcttctaacggactttgtatttatacattaccccatatgcaacggggacaaagattccggagtatgtgagagtacatcacatcatggccggcataagcatgcgtgtcgtggtgctgcactgctggtggacgttactgtgtgcgtgaacgacgccgatggcggcctccatgcggaccatgctgtagctgcatcgatgccctggctggctggctggctggcgtgtataatccgggatcgggaatgtacgtgtacgtctgcgcgcggccagctcatcatacagatacgccgcgtccttgtcatcaaggaggaaaatacacgtcccgataacacgttcccgacacagacggctaggggcaataatatgacaattctccggccatctgaggcaccgagctgtacagcacagacgcttctcacaagtatacgaggt

SEQ ID NO: 81493 - DNA, 1190 bp, Oryza sativa
  Clone ID: PAT_MRT4530_81013C.1
atggatgaagtcgttgcgacgatggatatctctgagccaaataaaggctacgcgagctgcggctcggtaatcgagatgtctaggcaaatgaagactacacggctaggatgggtgaagggttatgtcacatgtttacgacgggttccatgcccatggaatgcggagtaaagatgtgtcttgtgggttggcctgggttggcttgagactagctgggacccaggtcgggttgccagttcagtctgaatcatcgtaggccttgggttaaggcagtactagatggttagttttgcgaagaaaaagatgtcgccaattgtttgccgaagctccggaagaccgcagggtccgctagcgaagcgaaggaagcagtgaagctagatgtgaagcaggacaaaagacttagatctgttaaggtcctatccttagtttttgatctgtctctcccctttgttttccctctctccctctccaaaccttgcaacagatggctgacaatgagaaaggcaataaggtcagaagtcaggacatgggtacctcaagctcccgagtgaatgaagcaccagacaccaattgtgtggcagtggtccaacacttgattaagcagaacaaattgcttatagagatactacagcagcatcggacgccaattctgaaccggagtcagatgcaaccttaagtgcagttggaggcagtccaagcactcacaccacaagtcagcgcaccgccaacatcccagaaggcccctcatgccatgtcacatgttgactcaaaagaagcaagaatcatttgttttatgtgtgatgaacaagggcactatgcaaggaactgtcctcagcagaaaagaaaagcaccaatgcgaaccgaagatgaagtccgtaagatgatcattaccagcacagaatggcctccaccaggaatgacaaaacgtcagagaagaaattccttccgaggtgcaccacagttgacagagcatcttttagctagtggaggtagagtgtatgatagtgaagattcagatcaagtctcctcagatgatgaagatgagaagtctccccaaggtttcaaccagaataaaatggaacataaggcatgctctcgttgtggagaaatcggtcatgttgctagctcgtgtgccactacctgctttcattgtgaggaagaccatccacccgcgagtgccccatgagaaagat

SEQ ID NO: 81494 - DNA, 4365 bp, Oryza sativa
  Clone ID: PAT_MRT4530_81014C.1
atgtcggtttggggagggagggaaaccgaccttggtggcggtcaaggagagcgagctggcgctcctggtttggaatggtacattcctggtttggagatagaactgtgcagccgggatggttgttcagaatggttgggcctatacaacaggatgccgcgttacaagcctgagtacctgtttggtgttgagggttttgtccaggagttgcgtacgatgtcctttgtcattggattcgggactgcccctttttatgcccagattcctcatgatcgtcatgaagaaaagtgccgagtcaaagtcactttgaacagtaatagtgaagatatcccctcagtgatgtttgaagctggaggaagaaattacatccatgcatgtcaggaggtggcaaggatcgccataggagagctccgtgatcgctacagtgatcaattggccgacactgagtatcgttaccatcctcgtcaaccacagggaagtgaccgtggcagttatcttgagactgaaggaattgagaatgatgctaccacaaggcatttggttgagatgctgtgggctatggatgaaagtcgtgcggagactgtactagcagctcaagatcgtgaagaccggaatcgtggtaagatttgcaagttagaagacaaggtggatcgtttggagaaggaattagccgcattgaagggagaagcaccgccgcagaaggccaggattcgtcttaccgcaaggaagagagctttatttgtccctcgctatcaactggcgccaaagatggtgaacactcgcagcaatgggaatggtcccaacaaccccaataacaacaacaatggagagaatcccactctggcccaagttcttgctcaacagacacagcttatgaacatgatgatgcagcaatttcagaatcagcaaaaccaaggaaataatcatgcacctccccagaacaagttagcagaatttcttcgtgtgaggccgcctgttttctctagtaccactaatcctgttgaagctagtgattggctgcatgccatagagaagaagttggatttgcttcagtgtactgatcaggagaaggtctcatttgcatcacatcagttgcatggccctgcctctgaatggtgggatcacttccgcctgaataggattactgctgaacctatcacttggcttgaattcaccgctgctttccggaagacgcatataccatcaggagtagtgtctctcgagaagaaggagttcagcgccaggagaagttttttgggaggacttaatgatgagctttcttacccactcatggttggagattatcctgatttccagaaattagtggataaggctatacgtcaggaggacaagtacaattgcatggagcagaggaaacgtcggattgctcacttcaaggcacaacaggggagtaatcagaagccgcgtcttactttaggaccccagcccatgtcacagggaggttcttcgtctgttgttcgtccgcagcgtcagttcttcaacaacaatgctggcaacaacatccgtaatcaagctccacgtcctgttgcagctccagtacagcaacaacctgccaagagggagcaaggcagcaagcccgtggtgtgtttcaactgtggagacccaggacattatgctgacaagtgtccgaagccccgtcgcgtgaaggttgtccctgcccagagtaactctgctgtaccagcatcaaaggcccgtgtcaatcatgtcgctgctgcagaagctcaagatgctccagatgtgattttgggtacgttccttgttaactcagttcctgcaacagtgcttttcgattctggtgctacacattcattcttatctatgagttttgcgggaaatcatgggatggaagtggaagatcttagacgtcctttgatggttagtaccccaagtaatcaagcactctctttgcaacgtagcccctctgtcagaatagaaattaaaggagtaccatttctggccaatcttatcttgttagaatccaaagaccttgatgtcatcctagggatggactggttagccagacataaagatgatttacctggtatgccgcctaaaagggatatagagttcagaatagatttggtacctggaacaactccgatccataagagaccttatcgaatggcagccaatgagttggcagaagttaagaggcaagtagatgatttgctacagaaaggatacatcagaccgagttcatcaccatggggagctccggttatttttgtggaaaagaaagaccatactcagagaatgtgtgtggactatcgtgcactaaacgatgtgactattaagaataagtatccactacccaggattgatgatttgtttgatcaactgaaaggtgccactgttttctccaagatagatcttcgatcagggtatcatcagttgagaatcaaagaggaggatatacctaagacagcttttaccactaggtatgggttgttcgaaggttgtgttctgatgcaagatgggaaggtggttgcctatgcatctcgacagttacgtccgcatgaaaagaactaccctactcatgatcttgagttagctgcagtagttcatgcgttgaagatttggcgtcattatcttttcggtactcgtacagaggtatataccgatcacaagagtttaaagtatatctttactcagccggatctgaacatgagacaacggagatggttggaattaattaaggattatgacatgggaattcattatcatccgggaaaggctaatgttgtagcagacgctcttagcagaaaaggctattgcaatgctacaaaaggacgacagttgccattggaattatgcaaggaatttgaaagattaaatttgggaattgtcggtagaggtttcgttgcagccttagaagcgaagcccactctaattgatcaagttagagaagcccaaattaatgatcctgatattcaagagatcaagaagaatatgagaagaggaaaagctattggtttcttggaggatgagcaaggaactgtatggttgggtgaaagaatttgtgtccctgacaacaaagatttgaaagatgcaattctgaaagaagctcatgatactttatactccattcaccctggtagtactaagatgtaccaggatctcaaggaaagattttggtgggcaagtatgaagcgtgaaatcgcagaatatgtagcagtatgtgatgtttgtcagcgagtcaaggcagaacatcagaaacccgccggtttgttgcagcctttgaagattcctgaatggaaatgggaagaaataggtatggattttatcactggtttacccagaacgtcatcaggccatgattctatttgggtgatagtcgacagacttaccaaagtggctcattttattccggtaaagacaacctattccggaagtcgcttggcggaattgtatatggcaaggattgtgtgtttgcatggcgtccctaagaagatagtgtctgatcgaggcagtcagtttacttcaaatttttggaagaaacttcaggaagagatgggttctaagctgaactttagcactgcttatcatccgcagacagacggacaaaccgaaagggtgaatcagattttggaagacatgttgagagcttgtgctctagatttcggtggaagttgggataagaatctaccttatgcagaattttcatacaacaacagttatcaagctagtcttcagatggctccttacgaagcactgtatggtcggaagtgtcgcactccacttttgtgggatcaaacgggagaacgtcaggttttcgggatggatatcctaagggaagcagaagaaaaggtaaagatcattcaagaaagattgcgtgtggctcagtctcgtcataagagttatgccgacaatcgccgtagggatttgagttttgaagaaggagattatgtgtatcttcgtgtcacgccttttcgaggagttcatcgttttcataccaagggaaaattggcaccgcgttttgtgggaccttataagattgtcagtagaagaggagaggtcgcttatcagttggagttacctcaatctttggcaggagtccataatgtgttccatgtttcgcaattgaaaaagtgtttaagggtacctaccgaagaagctaatcttgaccagatagaagtccaagaggatctgacctatgttgaaaaaccaatccgtatcctggaaacaagtgagagaagaaccaggaatcgagttatccgtttttgcaaagtccagtggagtaatcactcggaagaagaatcaacttgggaacgagaagatgaattgaagtcagctcatccgcacctgttcgccagttcttccgaatctcgaggacgagattctgtttaa

SEQ ID NO: 81495 - DNA, 1926 bp, Oryza sativa
  Clone ID: PAT_MRT4530_81015C.1
atggccgagcaagcaaaggtgcacgacctctctccgagtgtgagcggcgacgacggggagccaaacccacgccgtcgagctcgtactcccccacctcctccacaccaaaatcctaagcagggggaggcgctcgagagggtcgaaaaatccgcagcatcgccagtcgcgggtgatgcaggagaacggcgagatggggagcgtcgcctcctcgtctacggcgacggcagcacgcctcagggcgcgcttcaggctgttggcgcgctcctacgtcacccgcccgtcgtccctgacccggagtctccagcccagcgatggctagacgacgtggccaacttggtcatgacggcacagcagcgcctgggtgctggtggacggtccgccaccaccaagacctccggcgccgccactaccggctccgtgtcgtcaaggcggagggcgcggcgagcggcggctgttgcacgccattcggctgccactccctcgtcggcacctccgactcgggaggatcagcatggagagccggatgctcgcctcgacatcgagcgccggcgtaatagccggcgtactccccgcgcaacggagggcgcctcttcgtccagagtgtcacctcgacatggacgtgaggaccagccctccgtgcccccggctggtggtgtcagctgtagagcctttgtggcgagtcttcggaatgtccgttggcccccaaggttccggcccaccatcactgagaagtatgacgggagcgtcaaccccaccgagtttctccaggtctatacgactgggattgaggccgctgggggtgatgacagggtcatggcgaatttctttcccatggccctgaagggacaggcgcggggttggctagtgaacctgccacctgcgtcggtccactcttgggaggatttatgccaacagttcactatgaactttcaaggcacttatccgcgcccaggcgaagaagcggacttgcacgcggtacagcgaggggatgatgagtcacttcgctcgtacattcagcggttttgccaagtccgcaataccataccatgcatccctgcacacgcggtgatctacgcgttcagggggggtgtgcggcacaaccgcatgctcgaaaagatcgcctccaaagagccccagactaccgcagagctttttcagctcgcggaccgagtggctcgcaaggaggaggcctggacctggaactcctccggttccggagtggcagcttcggccgcccccggatccgccgctcagacagggcggcgtgacaggaggaggaagaagagagagcagggagaagaggcccccgagccgaacggtggcctaaggcccctgacgaccggagttggccctttgcccgcttgtccgacgacgccaggagcccccgacccccaggacggccccgaggccactgtgggaaggccgctcctgccatcctccgaccccgaggtcatcggcacagaagacgagtgcgccccgagaggccacttggacgaagaacgccccggggatgcggcccctggcgaagaggatcggccccgccgaaaggtgcagcggcctgtctactttgttagtgaggccctccgggacgccaagacccgataccctcaggcccagaggatgctttacgctattctgatggcctcgaggaaactgcgccattatttccaggcgcatcgggtcactgtgattacgtcttaccccctcggtcaaatcttgcataatcgagagggtacaggacgagtggtaaaatgggcaatcgagctttctgagttcgatctgcactttgaaccacgccacgctatcaagagccaggccctcgccgattttgtggcagagtggaccccggctccagagaccgtctcaacccccgaggccagcttgggcccatcgcagctgcctcacaccgcccactgggtgatgtag

SEQ ID NO: 81496 - DNA, 488 bp, Oryza sativa
  unsure (1)..(488): unsure at all n locations
  Clone ID: PAT_MRT4530_81016C.1
atgccctgcgagagtagagancagagagggacggcgaggcgacggcgcggccgggactcaagccgacgcgggcgagcaggcctcagcttcttcccgccggccatccccagccagccactgcggagaccccgcaccaccgctgcaggcgatggtgcgcttccgcgacgctgggtgcaccctcagcctcatggaccggcgccggtgagggcgagcggcgcggccgggacttggccggcgtggtctgtctgacatgtggggcccatgtgggtcccgctgactcagcgtccacgtcggacaaaccggggttaaaaccactgagtgaatggtttgtaagttgaggatgccacgtatctggttttgtaattaggggacgattttgtatctcgatgacaagttgagggaccttcggtgtactttttccttatatatcacagcccaaagaagagggaggtaaaatagactttttttagctaaaaaaaaaaaaaaaa

SEQ ID NO: 81497 - DNA, 468 bp, Oryza sativa
  Clone ID: PAT_MRT4530_81017C.1
atgaacatgcagagcctttcaatgcggttggcaagtaattcgccaacgcgttgtcgtcagctccggcagcgtagagtaccgtggactaaacctgaaggaactcttccgggtcggtgctcccatcgtatttctctattgctccaagttggaatctttcgggccatcggacatcccgaagtgaacgaccgaaagctctacacccagcgctgggggcggtgggttgtcggcgatcatacgttcttcgtggatgtctatctgatgatgaagatgacgaggatgatgacgatgacgatgggtcgcttggttccagcgtattattacgaggacgtcggctgggttctcgagaatcctgtcgtcgtctccatcatcgtcatcattatggcgacgtccttgaccagtatcgcccagcacctgccattcgtgatcgtcgtgattgtggcggttatcatggtctcggtcttcgcttga

SEQ ID NO: 81498 - DNA, 480 bp, Oryza sativa
  Clone ID: PAT_MRT4530_81018C.1
tcgacctgcagatcagtaacgctctgctctatgtgtgcatttttttattctgctattttgtctgctgatgacaaaagtgctgagtttatactgacctgattcttgtcaatgagttctgcaatatttgtatgttatatgcattaccgcatgatttatgcatgatgccatgtatggtaggaatgtaggatgtttgcatatggcctgttcatttggatatatttcttaccgttgggttatataaatcagtaagtggaaaatatatagttgtttcctgttgcctcatgatctttctatttgaaagaatgacgcagatagtattgctgatatgtgctattggttatgtcgattccttttttgttctccacatcagttgtaatgaaaacagaaaacctatacctgagcactcaatgatagtatggctgtcatctttgaatgttctttgcaatagctgacctgcctgattttatcaaaaaatcatat

SEQ ID NO: 81499 - DNA, 1515 bp, Oryza sativa
  Clone ID: PAT_MRT4530_81019C.1
atggacatctctaggacaaatgatggctacacgagctgcggcctggtagtcgagatgtcatggcacagggctggtgttctgttgctaggggctcaatcctgcctgcctatcccagaggttccggctgtaggtggagttgggtcgggtcagatcaagtctcctcggatgatgaagatgagtctccccgacatctcggcgaggaagagatggaatcaaaggtatgcacccgttgtggacaaattggacacgctgctagcatgtgtctcacactctgccctcattgtgaagaagaccatccaccagggaagtgtcccacccgcaagcctcaacaaagaattgtcgtcgatggaagaagttgtgtctctccccgacctactccaggccgagcaacgggcaatcaacctcaggagggcgataccaagcagaagaccgtcatccgcttcaaccagcaatcagaaggaagtttctcccccccctcccgcgctctcccgtggccgccccgcctctccccgccttctccttctctctctccggcgccggccgacctccagcagcacctcccgcctcgcccgtgcgccgtccggctgcgccgtcaccaccctcggcctcacagccgcctcctctcccccggccggccgcgccgtcttctccctcggcgtcgccgcgtcgacctccaccccggcctgccctcggtttcgccggaacgccgtcgcccgcgccggtctcgccctctgcctagccggagttccttcggcaaccccttcctccgtgcccgtgcaccggcagacgtcgccagctcctcctccggcatcgcagcgtcaaggttgccctcggcctcgcctcccctccatccgaaccccgctggtattcgttatcgtcgtctccgttcgtcctcgtcgacgactcctctggtcggtcgttcgtccttgccggctagtcgtctcgctgcgccgccaccctcgtcgtcatcgcagcagtgtgttccgcgccgtcctcgtctccgtgcagctgctgccggctgccctcatcacctcgtcgccggttccggtcgtcgtcctctcgtcgttcccggtcgtcgtggcgttcgtccctccgtcaagccgttctcgtccgtcgtccgcgtccgtcaagtgtgccgctgcagccccgtcgtcgtcttcgtcctcgtctccgcgtcgtcaagccttgtgccggccgcgtctcgccttcgtccaacgatcaccgccgaagtcgtcccctcgccgttcatctccgtcgttcctggccgcctccgccgcgcccgttcgtcgttgttgttcccacgcctcatcgcgtggtggtaaggatctctcctctcgctgccccgtcctcgtcctttcggtgtcgccccgtacccgttgtgcggttgtcgaccccggtacccgtgtaccggtgtcgcttctgtcgttccggaggttctcgaggcgtgggtcgcggtcgtcgccgaaggttcggaaggccgttgtctgcgagcaaggcaagtcacatcatccttga

SEQ ID NO: 81500 - DNA, 470 bp, Oryza sativa
  Clone ID: PAT_MRT4530_8101C.1
atagccccccaagcagccgcaccctcactccctcctctctcctctcctcccccccacggtggagaaggcggcgtgggcggtaggatcggcgaaatctacggcgaggacgccgaaggacgtgcaaccctgcatgagttcgtacatggcctactccgctcactacctcaatgtgctccggaaagtatggacctgcctgcaccgggatgacatcatgaagactgcgatgctcaaggagctccctccttatgatccggactggtactactcgagggctgtgtctattgtgaggaagatctgcctgatgcaggtgattggtgtgatggctttccgcaacagcgatgccggtcaccagatgaaggagacactgccaccagacatctgcgatagactcggcgatatctcaatgatgatgcttcatgagatgcagatgacgtacatgtgcaacgtggaccctgtcaacttccaactct

SEQ ID NO: 81501 - DNA, 2913 bp, Oryza sativa
  Clone ID: PAT_MRT4530_81020C.1
atgccgatctcagccagtccatcaatgaccggaaatgagaacgcagtggctacaaaccaagacggctccatgtcgaaagatcctcctgtcgaggcggagaacggaacatcgacgacatccgaactcgagaaggattctaatgcggccaaaccttgtcattccgacaagaaccacgagccgacgaggatgacttccgaagcgacaaggcgccatctcctaaggtccaacaatcacatccccattagggataaagacaaggaacgaggagcgacgccaacttcagatcgatttgttggggtaatcgacatcgatccccacgaaccatcagtcttgcacctcctcgaagactatggatcatcgacaacgagcgcgccacgggaggtattggctatcgatgatgtcggcacgtcagcgcgcaccaatgcagaagcggagaatcaagtggccactccggcccagcacatcagagccgtcaacgctatactgagggaaacctcctacgatcccgttctcaacgacgatctcgcgcgttggatagaacgactacgggaatcagtgaccaacctcagcaacgcgttcgaagaggccgctgccgcagcgcacccagaacaaccaccaactggtgatgccaatggtgaaaaccctgaacggagggaatcgcctcatcgagccacccctccacctcgcggcactggcgatctccgcgatcacctcaacggccgccgagaggcacgacgcgcacgagacaacgagaaccgttcccggcgtcatgtctcttcacagcgtcatgataacgaagatcgaggagaccgttcaaacgaagaccgagaccgtgataaccgccacaaccgccacgatcacaacgatcgcgaacggtgggtgccaggcgatactggtcgaggacgtcgccataatgacgacgatgatggagaccgacgccgagacaacagcgggagacgacgacaggattctcgagagctaggccgacatcctcgtaatcagattccgacccggagcaatagaaagtacgatggaagcaccgacccagaagagttccttcaagtctactccatagtactctacactgccggagcagacgacaacgcattggcgaattatttgccaattgcgttaaaaggctctgcacattcatggctgatgcatctcccgccctactcgatctcttcgtgggcagacctgtggcagcagttcgtcgccaacttccaaggagaaggccaacgggaaatggagaatgtgcgtcgacttcaccgacctcaacacggcgtgtccaaggatcacttccctcttcctcgaatagatcaactggtggattcaacagccggctgtgagctgttgagctttctcgacgcttactctggctaccaccaaatcagcatggcaaaagaggacgaagagaagacagcattcatcacgccactcggggtattttgctatgttaagatgcagttcggactgataaccacagggaatactttccagcacacggtccagggcgcacttagcgaccagctcggcaacaatgtcgaggcatacgtcgacgacattgttgtcaagaccaagacaagcgactcattgattgacgatctgcgggaaacgttcgacaacctccgacgatatcgcctcatgctcaatccagagaagtgcacgttcggagtaccgtcgggcaagctgctcggattccttgtctctggcagaggaattgaagcaaatcccgagaagatcaaggcgatcgagaacatgaagtcgcccacaagactcaaggaagtacaaaagctaaccggatgcatggcagcactgagcagccaaggagcaggggcaggatttatcttgacgtctccttccggagatcaattcaagcacgcaatccacctcaacttcagggcgaccaataacacagtcgaatacgagggactactcaccgggataagagctgcagccgcacttggggtcaaacgactaatcgtgaaaggagactccgagctagtcacgaaccaggtgcacaaagattataaatgctctaacctcgagttatccaagtatctcgcaaaagtcaggaagttagagaaaaggttcgatgggatcgaggtccgacacgtttaccgcaaggacaacatcgagctagatgacctagcacgacgtgcgtccagacgagaaccgctcgaacccgacacttttctagacatcctgacgaagccatcagtaaaagaggttagcggcgaagttagcccggccacccccgacattggctcggaggccacaaaggcagaacgcgccgttgccgatatcgagaccacagatgactggcgcatcccactaatcaaattcatcaacagcgaggagctgcccgaggacgatacagaggccgagaaaataactcgtaaagcaaaaatctactgtatggtcagcaacgatctatacaagaaagcaccaaacggggtacttctcaaatgcgtctcgtccgacgacggcagacacctcctccttgatatacatgaaggcatctgtgggtcacacgccaccagtcggacattggtcgggaaagcttttcgacaggggtttttctggccaaccgccctcaaagatgcatgcgacatggtccagcaatgtgaagcttgtcaattccacagtaaacacacaaagctacccgcgcaagcactcccgactatccctcttacttggtcgttctcatgctgggggctagatatactcgggccattcccacgaggacggggtggctacaggttcctattcgtggcgatcgacaaatttactaagtggatcgaagcagtatccatgggggaaatcaaggccgacaacgccatcaaattcatcaaggggatattttgcagatacggactaccgcaccgcatcataaccgacaacggctcctag

SEQ ID NO: 81502 - DNA, 1875 bp, Oryza sativa
  Clone ID: PAT_MRT4530_81021C.1
tcagatcaccggatcttctgttgcgcatcaagagtttccgccccaagaagatggacacaatgcagacaacaacattagcaatactaatgatggccgcctcgcccgtgccccagcgccgccgccgccgcggattccgccgcatcccgccgcccccgcgcgcaataaagagggggaaatcactccccgtgattccctctccctttccccccacttttccctctctctcttcctcggattcgtttggaaatactcccgcaaacctcgccggcgccattgatgcagcccgagatcgccgcgccggtttccttcccctccggtcgccctctctcactcccaacactatataaacgctccccgtgcctcactccaccgtttccgccgctcgccgccctctctctccgccggaatcgagctcgcgccgtcgctctctctctccgccgtcgccgccgagctccggtccgccgccgccgtcgccccggaccttctcccgcttcggcgccgcctccttcggcttcgccgcgtcctcgccgacctcgtccacccctccgtttcggtcgccgaccgccggaacgccgccgtcctcgtcgacccgagccgcgccgccgcctttttccgctccggtcgccgttcccgtcgtcgccgtcgacccggggtgagccgtggaccgccgtttcacttcccccttccctcccctctctcggtgcgccgcctcccgtcggccgtgccggcgaggccgccttcgggcgcgccccgtggctgccatgtggggcccggccgtcagccgcccgcgccctcgggtgcggctgacgcgtgggacccacggcgccggccggcgcaagccgcgtgcacccggtccaccgtggatcgtgaggctgccgcgtgggccccactcccgtggacccggacaaatgaaggctacacgagctgcggcccgatggctgacaatgagaaaggcaataaggtcagaagtcaggacattggtacctcaagctcccgagtgaatgaagcaccagacaacagttgtgtgacactggtccaacacctaattaaccagaaccgattgcttatagagatactacagcagcatcagacgccaattctgaacctgagtcagatacaacctcaagtgcagttggaggcagtccaatcactcacaccacaagtcagcatgccgccagcatcccaaaagacccatggtggcgtgccacatgttgactcaaaagaagcaagtatcatttgttttatgtgtgatgagcaagggcactatgcaaggaactgtccctagcagaaaagaaaaacaccaatgcgaaccgaagatgaagtccgtaagatgatcattaccagcacagaatggcctccaccaggaatgaccaaacgtcagagaagaaataccttccgaggtgcaccacagttgacagagcatcttttagctaatggaggtagagtgtctgatagtgaagattcagatcaagtctcctcagatgatgaagatgagatggaacgtaaggcatgctctcgttgtggagaaatcggtcatgttgccagctcgtgtgccactacatgcgttcattgcgaggaagaccatccacccgataggtgtccaacgagcaggatcacttgtttcttttgtgaaggaactgatcatgtaccaaaagattgtcaattcagttttctgctgacgaagaagatggccaaccaacccgccagttccaacggagagaagcatcaaggcaacacaaatcctcgccaagattacagtttcagcctaactccagtgccaggacagaggaatcaaaatgagaaaagaaaatgccgagtccgggaagatatctgttgcttcaattgtcaaggaatgggtcattttgccgacaagtg

SEQ ID NO: 81503 - DNA, 399 bp, Oryza sativa
  unsure (1)..(399): unsure at all n locations
  Clone ID: PAT_MRT4530_81022C.1
gccaagctctaatagcgactcactatagggaaagctggtacgncctgcaggtaccgtcccggaattcccgggtcgacccacgcgtccggggcttcaggccaagacgaatagtcagtctgtcggtggatgagatggaggcgatcgagcgcaggagaggagtccagcagccggcgcccgtgcagccaccgctgcagatagcttcacctcctgcgactcccgtcaagacgccgaagggaaagagcagcagtcgaaacaacagctccgtcagcctgtcgagcacgaaagcgaagaagaaggcagcagtctcttcggtggaggtccctccacacccccgttcaaagtcaaaaagcaagtcaaatccggacgaaagatgtctatctcctcaaaaaaaaaaaaaaa

SEQ ID NO: 81504 - DNA, 1225 bp, Oryza sativa
  Clone ID: PAT_MRT4530_81023C.1
gcacagcaggagttttttttttttttttttttttttcgtggaaaagatttattgcgacgctttattgcttattcaaatatggtacagtttcagaatttcagttccaaaccaataaatcagaaacaatactgaaatactgaatgcacacatcacaatggccaacatccaggattcttcagatggggataatatggcaacttcaacaagcttataaagtggtctataagtgtacagaaacaacccatcacaactcaattcatcttatgccgacgagttatccccatcctcactggatgtaatgaaatccaccacggcatcagaaagctctttacggtgagcagtgtagcagtgatttgctccctcgatgacatgtagcttgtggttcggtatatgcttcgcgaattcgtatgcatcttccacaggaatgatctcatcggctgaaccgtgaactgtgaaaaacctgcattctttgctgatggaaaggcatgctttatgcatatcagtggtcaatcgttccatcaaactctcttttgttaccttatataaaacctttcctgagttggttttgacatcaatgtaaccctctttgtcaattatattcataaactctttgcctagccgttcttcaatgcctttctccaaatgaaatcgaccagagagattaaccactgtgcgcacatcgtcatagatagaggcatacagaaccaccacatctcctcctttgctgtgaccaacaattgctttcacatcatatttctcctgattaagatgtgaaataacagaatgcaagtcatcagcctcctttctatagttcccgtactggaattccccttcactttctccatttccactgaaatcaaagcggaagattccaacccctttcttggtaagtgcattcgctagatcaacaatgatgctatcattcttggaagctgtaaaaccatggcagatcactacaatcttgttggaacccatgtgctgcagcaacccaatgagtttctctccatgtttattcgttaccactaccctttcttcctgagcagagggaaccgatgaatcctgggaagaggaggagagcggctccgccatggctgccgtatggcagcggcggcggtggcgtgctccggattggatcggaggattcccggggggagcgcagcgaagggagtgggagaagagcgcggcccgggcttcccctcgtgcgattcctgcagcccgggggatc

SEQ ID NO: 81505 - DNA, 305 bp, Oryza sativa
  Clone ID: PAT_MRT4530_81024C.1
gtggcaacccccttctggcaaccagctacgtatcagtcgataaacaaccaagtcatgctttatcagtagttgtcaacagctcaggctggtagcgcatcaatctcactaccaggccattagtagcgtgcacgcgattgtgcagcaactacagctgcagaaggtcggtgttgtctactttgatcagactcaagctcatgctcatgctttgttggccttaaacttgccatccatatgtggcatctatactaactactacattgctacgaggagcattctcatcgtgggcggtgtctgatactgaattg

SEQ ID NO: 81506 - DNA, 240 bp, Oryza sativa
  Clone ID: PAT_MRT4530_81025C.1
ctgttcatagctggacgcaatcgcttgcaggtcaatgagggaccgagcaaggcatgctgcaaccgcggcgccaactcaggaggatgccgccacaggataaacgtacaggtaccctcggtatcggaggggagtgaatgcaccgaacacatatcaagtgataagattgagccaacgaacctctaagtggagaagcgagaagcctttactaaaacagcaaacgtgacagcaccgaagatggaa

SEQ ID NO: 81507 - DNA, 363 bp, Oryza sativa
  Clone ID: PAT_MRT4530_81026C.1
tccccgggctgcaggaattcggcacgaggcatctcgcgagcagagggggacgccgcgtgtccctgctgctgcttccgccacagcgcggcatttgagcaattaaggaggtgtcaacattcagtacaagaaatgacttacataagggatgaagatacaagacttgagaccactcgggcgaggcgtaatagttccctctttctttagttggaaacaattcttttcttgggggctgggtgttattaaggaatccaagaaagcagtataggcataattttgaacttctgtttagcagtgtcgaatgttctcaaaaggcatgaagatttgaaagagcgcctctcacgggattctgataaactgattttt

SEQ ID NO: 81508 - DNA, 298 bp, Oryza sativa
  Clone ID: PAT_MRT4530_81027C.1
ttttacccataccaaaatcaagtatcaagcagtcgtatgttatcaacatgcatgtacagggttacataaatctatcacaacgcagtttgattaaccagtgtgcataataacatagcatttatacgaaggctgtctaacataacagctgaatattcatacaacccacctggctgtaacatacatatactggattacggtgaaatttagccggcgaaggcgctgttcttctatacaacaattgctaacgattctaaaaaatctgaaccgggagactgcccagatcataatccggttcttt

SEQ ID NO: 81509 - DNA, 127 bp, Oryza sativa
  Clone ID: PAT_MRT4530_81028C.1
gtcacgtccaattgggacggacatgtcaaccttgtgagcgacatgactagctgctacttagcaggagtgattaggtacccgtggaggctgagaatgatcagctgcaccggtgccaccccaagaggac

SEQ ID NO: 81510 - DNA, 2031 bp, Oryza sativa
  Clone ID: PAT_MRT4530_81029C.1
gggctgcaggaattcggcacgaggagagaactagtctcgagccccgggctgctggttatgagagcgcctgaagatgaattctgtcgacgacgaaaaaatttacatatgttcaagcaaacaagaattgctatgataaaatgaagagaatcacagcgtggcaaacgcctataatacaagttcactcatctaaaccacctctctcagaacataactgcaaacgtccatgcaccatcttcagatttaactgcgggcgatggtaacaaacctattgatacaaaagggccaaagtttttgaaccaaatgacattagcattccaggatttacagtgactgcatgtgtacttgtccatattcatttaaacaactcgttactaccccatgtcgtcactgctggaacgaaatggagtacgagcctgtgtttgggtctttaacagctttgaaattgtcgacgctcatcccaaagcgcccgagcacagaattccccagatctttgagctttccgatcatctcttccttcatcttttcccttttctcagctgccagtggctccagtcggaacagtgatctcttagcttgttcatttgaaggatccagctcaataatttttttcatatcagcaatagcttcatcatagtgttcaagcttttcatgtgcttctcccctccggagcaaggctttcaagtatgaaggattcagctcaagtgctttggtgcattctttgattgtttcatcatatttgcccaacttcaagaagcatacagcacgatttgaatgacatgcggagcgtatgtcttcggcagattccagctcagcagcaatttgcaaagctgtctcatattgcgacaatgccctctcatattctccagcaccaaaaaacttgttcccttctgcctttgcatcatttgcttggcttctagctttgctggtgcacggcctccaccactgcgcggtgacaaccaccgaggggctcgggagcagccggcgtgggaaacaaattgcttcgattagtacttcatcacgcatgaaatcgacaggaaacgccgcgagcaagagcttcgccgccatcgtcgcccgtcgccgcaaatcgggagcagccgcggtggcaatgttggtgaagtggaggcgaggaagagggcgtgcagccgttgccaacccgtacccctccacgccctctttcggcggctgcgacggcgccgtgggtccgatgctcggcggctgcgacggcgccgttctctctctgcgcggcttgaccgccgtgctggctcgcctttcctcatattgcgacaatgccctctcatagtctccagcaccaaaaaacttgttcccttctgcctttgcatcatttgcttggcttctagctttctcccggagctgctcgtcggtcagcgcgtcctcgaaggcctcctcctcgtcttccccatccgccctcgccgcctcccctccggccgcaccacccgccgcctgctcctcggcagccggctcctctgccgccgccggcgtctcctcgacctccggctcctgctcgatcaccaccatcacagcccctgctcgccgcctcgccggggttgaggcggcggcggtcaagacaacagaccgcggaggccccgacgctccctggggtcgccgaagggtgggggagccattcctctcgtcctccctcctgcttctgttcgcgcgtccgccgttgcgatatgccggagtgacctcctccaattttctcgattcctcgcgcgcaatcctgatgccgcagtggtcaaccccgccgtggtgctcgtcctttccgccgccgacctccgcgctatcggcatctctgccctgtgaggaggtcgccgccggcctccccgccccccttgcttgccctacctcctccctcgacagcggcctgccttcgcgcctgcggcctctcgccccgccgaaggcagtagccaccgacgtcctccccagctgcctagtgcctacccagacgagaagagtgagagagggaggagaaagggagaggaggggagaggatatgacgtggccagctgacat

SEQ ID NO: 81511 - DNA, 565 bp, Oryza sativa
  Clone ID: PAT_MRT4530_8102C.1
ccgggctgcaggctaaaatgtgtaatattaagtgctgtaaaaaatgaatgctattctaccttattatttaatatcagcgatagattgggggctccgctaattgtacttctcagtgctgtagcatggtaatgatgctaaagttgccttataaaaaacatgagttataaggctcagcattttgagttaaacggtaaattttagtaatttctatcatgatatttggttgtcagttagcttgggtgtaaaaatgagatttaaagatgaaaccatacatataaaagacatacattgtagcagtaatgtaaatccgagactgaacttacctgtcaatctgttattattttttttctcttggccagaaagagggaagtgaaatcgtacaagaaggtccaagatgcagtcttcgaagtcgaaaggtctacagtgacttgactgtcgattacttcaagatgttcctgctaaatgttccagcagcagttgtagctctgacactgtgagaatcatatgacatgatgtcagagatacatttttttttttgcattacgccatgtttaatatatttttt

SEQ ID NO: 81512 - DNA, 228 bp, Oryza sativa
  Clone ID: PAT_MRT4530_81030C.1
atggggtgctcggaggatgatgcacgtgtcaaggacagccggcggagggtggccatggtggcggagtacgtgtggaggccgttctggccgagcgcaacggcgccactagagagaagggagagggcggaggcaaatggagcggctctagtgctattggtgagctcaagaaaggtagaaatggagaggattgtgtggaggatggccaaaggcatgaaatcgaggccgtag

SEQ ID NO: 81513 - DNA, 499 bp, Oryza sativa
  Clone ID: PAT_MRT4530_81031C.1
gagacccttttgccttcacgtgaacgagcgtcttgctgcagcactgcagctgataggggaatatcgtctgtggtgcgctcgtgatcttagcctgcataaaaatactactgatccgtatcccaagcaaagacatgaatgtgctcacactcgatgacattaatacacacctcatcttatacgttgatacactacatcgccgaatgtaccatgattatctacttgctgatgtgcataacaagctagactatgaccttgccctcactggtgagaacttcctctcaaggggtattcatactctggtattgaatggctacatggccgagctcatacaccatgctgtattacgaaccaaaccaccccacatctgggcctgcaagcgatctgttaacacgcatgactccatgttgaaggatgagcctgataaccacattgactagtgactgaccaccccattcgcaggatgcccccctcttcatatgaagaggactaaccagaagaa

SEQ ID NO: 81514 - DNA, 243 bp, Oryza sativa
  Clone ID: PAT_MRT4530_81032C.1
atggagcggggcgggccctgcgacggcctctgtcgcttccggattcacctaggcacgagaggggactgcccgttgcccgctggggacgggggtgaaacctggggtgtggtgtgcttggctagagggggttatgcgaagggtcctgtcacggcctctttccggtttctccgaggagtaggcttcgtccgtgccgtcgaggatgcctgtggagtggtgttcccgctgcagttagtcaaggcttag

SEQ ID NO: 81515 - DNA, 800 bp, Oryza sativa
  Clone ID: PAT_MRT4530_81033C.1
atgggtgccacagctggaatcgatcgatataccgaggctttactgtcctggctcgtcatattcttgcatcgagatacatctatcgttatgatgtatcgcgtgtttggctactttaagtcctttagctatagctgcattgctttaccatttgtcttgatcgtttttgcatgcttccctaattgtctcgctgcatccaaagtgtatcgctttattgttggcttaatgctcacaagcaacaccgatcctcatgttgatcacgcatatacaaaccgccgccgagcgcgccgttgccaccttcgggttcgcgagcccgagggctaccccgtccaccccttcgccgtcggattccgcccccggaacccactctgcaccatccgccggtcctctcgaagcccgtccacctctcgccattcgccatcggcgaggaactcccctcccatccctctctatctcccgtaccgccgctgccgcttttgccgcgccgcctcgcttcggggccgtgccgccgtgcgccgccgcatagccgccgccgcgccaccgccgtccgccgccgcgccaccgccgtccgccgcatcgccgccgccgtccgctggtgtcgcgccgccgccgcgccatggccgtcgggccggcttgaggccatccaccttgccgcctgagtggccaccgcgtgcccgccacgtcagcaccacgtggtgcgccgcctccttcccggtccatggacccggtccaccatgaaccggtgccccgagcctatgacatgtggggctcgcctgttggcgccgccctctctctctctccga

SEQ ID NO: 81516 - DNA, 678 bp, Oryza sativa
  Clone ID: PAT_MRT4530_81034C.1
tcaccgagggtggccggcgcggaagaagatgatggcgaacggcgacggcaagccacgggaggacgacgtcggcgggcggacgagcttcggggtgcccggaaaccatggccgaaggcggcggtggaggtggtgctcacccgagtgcgagggaacgaaggctccggcgacgaacttcgacggaggaggggtggacggggtggatctcggccacgcgaacccgacggcggcgacggcgcggcgcgcgggcgtggtcgacgtggctcggaggaggcggagacgagggcgcggcggcggttgcgggcgcggcggcgcgagcgagatcggcgggaggtgggggaaggacccgacaggtgggccccacctatcggtgaccccgagagaggaggcggcggggcggcctgactgggcctcggcctcgtgttccgctcctccccaccgctctatgcctccgccgtctccatctccaacctcctcaacgtcaccgccgtcgaccccatcgcccttgcctgccgccaccgccgctccccatccgctcaagcgaacgattttgttagttgagggacctccgatatctggttttgcggctgggggacgattttgtaactcgatgacaagttgagggaccttcggtgtacttttcccgttcgaataagatgaacagtctagagaacggcccat

SEQ ID NO: 81517 - DNA, 2136 bp, Oryza sativa
  Clone ID: PAT_MRT4530_81035C.1
atggcccctcgcaagctgaacctaccctccgtgacgggccctgatcccagcaggatcgatgatgacaccaccgcctatctggggggttcgcttgtgaatgaggatgagttggcgaagctggtcacctccggtgtgttggcagagaagcaggcctttcccccaggaaaggctgtggtgccgaagcccggtgacaaccggacggtggtctttgccatgttcttcgaggtgggccttctgtttccgtgcaacgtgttgttgccagagatccttcgcctttttcaggtggagctcccccaactaagcccatcggctctcgtccagaacgccatcttcgactgggcgtgctgggccgctggctgccgcaacctggtggaagagttttgcatgctccggatcttccctctctcccagtcgtggcaagtcgaggtgaaccaagacgaggaggtcaatggcttgccaaagctcgtcatgccagagggggcaaacatgttaactcttgctcaggctgacaccgaagcccagaagatgatcggctatgtgtcgatcgttgaattcagccagctgcttacgcggcaggcggccggccgggcgaatcgggtgtacgatggcgatcttcctccccgtgcgaagcccttcaaggccgatggcgatgaagggacctccaggaagcggacacgcggacaagtcaaattggctcctcggaagagaaaggcccctacctccaccgactctgacgccgacgatgaagacactgtcgacgaccatgatggcgaagaggaaggggaggataagggggagacggagctcgcggccgaaatggccgctgacgagcccgccgacaaccgcactgagacgcgcggctacaccccaactccaagcccttacgatgtcgaaactggggtggagtcgaacagctcccccctcggccgaaaggaattggagggagggaaggcgctggtttcgattgaagcggccaagctggcgaaggggggttcagttaagaagacctccaaaaagaaagggcccgtcaatgtcgcatgcgtttttagcgacgacgagtcttcggacgagactccaacttcgcctgctacgagcctgggtcttttgaccgctcccggtgctacggtcgatgcgggcggagcaggaggtagcgttgccactggaacttcagcttttgctgaccgggttgtgagggccgcagccaggctcttcggaagccctctgagcaaactggtggtgtcgccgctcgccatccagaaggggaagaaaacggctgctgaaacgtcggcttcggagtattctcttgcggcaccccactttgcccctggtgatttcgagactcgggcggatcttatccccttcgtcgagggggtaagtaatctcgtttctccgactggcagcctgagcctgttcactgagttgaacgagttcgacgaaggctgttccgccatcaagagcttagctgtccggagcctagaaatggagagcctcgccgacaccctcaaggagacaaaggctaacaacaagcggctccgagttgagctagagaaggggagcgaggcgaaggccgagatcaagcgtctgaatgccgagcttaaaaaagaacaaaatcattccgccgccttgactgaatactacaacctcaccgagccgaagatggaggctcttcgccaggaggcccgtaaagcgaaagcagctgctgaaaaagacgcacaaaggttgacgcgggagatggcgaaagccactgagtccacgaagaccgcgtgtcgcacgctttgcctcgctcttactgacatgggggcgaaggtgcgaggaatccctagtgaagatacttctgccttcgacttcttggagtggaccgaacaggccggtggtgcggtctccgatttcgccactacgtacagcgattgctgcgcgcatctgtcagtggccgtcaccatgggcctgctgcaacaaaattggtccgagcacgttgccgagttccccaagtttgtgaagggtgattgggaggtcagctctctggacatttttcccgcacttcgtgcctggcgcaaacagttctggcaaaaggagggccgattcactgccaaggcgcgcctgctcgaacacttggcaaaggcagaggcagcagagtag

SEQ ID NO: 81518 - DNA, 438 bp, Oryza sativa
  Clone ID: PAT_MRT4530_81036C.1
atggcggcggcgctcgactacccatttcgcaatgcggccgacaacgtctttgtttctcacaacttcactgagagggaaggaggagacaactgtgactatgtgggcttgaaagtagtggtagtgaagaagggttgtcctcgttctcccatcctggcaacaaacctgcttagtgctgccatgcatccgcttgcccgacggtactccgaacgtgcacttctctggattgagcatgaggcgatatcgtcggaggttgtcgaacgtttcccgcagatcgtcaatcaattagtcgcttgtcttggtcttgacaacgatgtcgtcgacgtatgcctcgacattgttgccgagctggtcgctaagtgcgccctggaccgtgcgctggaaaatattccctgcggcagggaaccagcactgatgggtcttcttgggcagtaccgatga

SEQ ID NO: 81519 - DNA, 1347 bp, Oryza sativa
  Clone ID: PAT_MRT4530_81037C.1
atggacatctctaggacaaatgaaggctacacgagctgcggcccggtagtcgagatgtcatggcacagggctggtgtcctgctgctaggggctcaatcctgcctacctgtcccggaggttccggccgtaggtggggttgggtcggtactcttgtttatggctaggatgggttgggaactatgtcacgtcttccgtccgtataccatggtgaataagcctaacatacatcataacagcaaaagacttagatctgttaagatggctgacaatgagaaaggcaataaggtcagaagtcaggacattggtacctcaagctcccgagtgaatgaagcaccagacaccagttgtgtgacactggtccaacacctgattaaccagaaccaattgcttatagagatactacagcagcatcagacgccaattctgaacctgagtcagatgcaacctcaagtgcagttggaggcagtccaagcactcacaccacaagtcagcatgccgccagcatcccgaaggacccatggtgacgtgccacatgttgactcaaaagaagcaagtatcatttgttttatgtgtgatgagcaagggcactatgcaagggagtgtcctcagcagaaaagaaaaacaccaatgcgaaccgaagatgaagtccgtaagatgatcattaccagcacagaatggcctccaccaggaatgacaaaacgtcagagaagacataccttccgaggtgcaccacagttgacagagcatcttttagctaatggaggtagagtgtctgatagtgaagattcagatcaagtctcctcagatgatgaagatgaaatggaacgtaaggcatgctctcgttgtggagaaaatcggtcatgttgccagctcttttctgctgacgaagaagatggccaaccaacccgccagttccaacggagagaagcatcaaggcaacacaaatctcgccaagattacagtttcagcctaactccagtgccaggacagaggaatcaaaatgagaaaagaaaatgccgagtccgggaagatatctgttgcttcaattgtcaaggaatgggtcatttcgccgacaagtgcccaaaaccgagaaacatagctgccagcacgtcagtccacgcaactccctgcaatcagaagcttgctcctcagcgaattgtcatccatgcatcccgaagcagtcctatagcccgcgttgcaacagctccaactccagcgagtgcattaccacaaggtgtcaatgctcaatttcagccccagccatcagttgacaagacagaggccagtatcggcattatacctttggatgttccagcacagcagccaaaaaaatcaagtacaagatga

SEQ ID NO: 81520 - DNA, 128 bp, Oryza sativa
  Clone ID: PAT_MRT4530_81038C.1
ttcctccacaccactcgcgatccggactttgggttaacttttacatctgaaggattgattacaaaccctatacggacattgcgacccaccactctactcaacatcaacaagaacacagggtcgtctac

SEQ ID NO: 81521 - DNA, 594 bp, Oryza sativa
  Clone ID: PAT_MRT4530_81039C.1
ctaggaaaatgagcagatggtctccacgcttatgctttctgaaggctccaacttcttcgctgccctgagctcaagcaccacactgctcatgcttgtcattgttgcctttggtcctgtgccagttgagctaccttcacattcacttctcctatctgttgcgacaccaccgacttgacacatgtcattacttctttcccatctctttaatgtctgccccttcttcagaaaagtttggcttatggtgtgccaatagcaaaacatcccgggggcatagccagaggcttgaggcagacgcaatcgcccacgtggcctggcaccttcggggacgttgggcccgagggtgaggtgtccgccctcctcgtgatttcccctaacagcatttattgcagtctggtcaagcgtgtcacgctgcgtgcaacgcagtacagcacgctcttttatccggtctgtatacatcggccgtgtctcgtgtgtcttgccggcgagcatctttccacatacagagagagcttgagatcgcaccctaagcccccggccgaaccggcaaaggggggcctgcgcggtctcccggtgaggagccacgagctccgtcat

SEQ ID NO: 81522 - DNA, 369 bp, Oryza sativa
  Clone ID: PAT_MRT4530_8103C.1
atgccagattggttttttttgtttttggttttattattttggtttttgttttttaaaaaacacaaaacaaaaaggttttgtttttgtttgtcaaaaaagggccacctaatggaagggttaaagggtttttagcctttgaaagggaagttctgcaaaattttttaaaacaaaaacctatagcgtttccacaaatgagcacggaataccgacagggacccccatgggggatattttaatgggaaagggggggacaactacatgggggagcatttcccggaacaggggggtggagattaaaacttttggggcctcaaagggggaaaatatttgaaagaatttgttatgaatccctgaaaaaaaaaacttttt

SEQ ID NO: 81523 - DNA, 2361 bp, Oryza sativa
  Clone ID: PAT_MRT4530_81040C.1
atgacattcagcttcgtcgacaactgcgtcaacatcaacctcaaccaaggagttcctacttcaacaacactagtgtggactcaagtcggcgaaatcgtctttccggtttacaccacagtgccgatcacagctggtccgccaatggccggaaacgagaacgcaatggctacaacctggggcgactccatgtcgaaggattctcccgccgaagcggagatcggaacatcgatgacatccgagcccgagaaggatcctagtgcggccaagacttgtctttccgataggaatcacgagccgacgaggattacttacgaggtgacaagggatgaggacaaggaacaaggagcgacgctgatttcagatcgatttgttggggtaatcgacatcgatccccacgaaccatcagtcttgcacctgctcgaagactatggatcatcgccaatgagtacgccgcgcgaggtattggctatcgacgagatcggcacgtcagcgcgcaccaatgcggaagcggagaatcaagtgactacaccggcccagcacattagggccgtcaacgcaatactgagggaaaccccctacgatcccgttctaaacgacgatctcgcaggatggacagaacgactgtttggactaataaccgcaggaaacacttcccagcgcacggtccaaggtgcacttagcgaccaactcggaaacaatgtcgaggcctacgtcgatgacattgttgtcaagaccaagacaagcgactcattgattgacgatctgcgggaaacgttagacaacctccaacgatatcgtctcatgctcaatccagagaagtgcacgttcggagtaccatcgggcaagctgctcggtttcctcgtctctggcagaggaatagaagcaaatcccgagaagatcaaggcaatcgagaacatgaagtcgcctacaaaactcaaggaggaagccgaagaggcattcattgcactcaagcgctacctatcaaatccccctgtacttgttgccccccaacctaatgaagaattatttctctatattgccgccacgccatattccattagcattgtcattgttgtcgagagagagaaggtgcaacgaccagtctactacgtcagcgaagctctccacgacgcaaagacaagatatccacagatccaaaaactgctctacgcggtaatcatgacatcaagaaagctacgcctctacttccaagcccacagggtcacaattgtatcctccttccctctcggtgaagttgtgagaaacaaagacgttgtcggccgcattgcgaaatgggtagtcgagctaagccaatttgatgtccgctttgtgccacgaacagccatcaagtcagacaaccaaatcgacaacgaaacgtggacaatggtgttcgacggcgcactcaacagccaaggagcaggggcaggattcatcttgacatcaccttcgggagatcaattcaagcaagcaattcacctcaacttcagggcgaccaataacacaaccgagtacgaaggactactcgccgagataagagctgcagctgcactcggagttaggcgactaattctgaaaggggattccgaactagtcgcgaaccaggtgcataaagattacaagttcactagccccgagttatccaaaccattagtgaaagaggcaagcggcgaagatagcccggtcacccacaacatcagctcgggggttacagaggcagagcgcgccgttgccgatatcgagaccacagacgactggcgcaccccactcattaaattcataggcagcgaagagttgcccgaggacgacgcagaagccgagaaaatatcccataaagcaaaagtctactgtatgatcggcaacgatctatacaagaatgcaccaaacggggtactcctaaaatgcgtcttgtccgacgacggcagacacctcctcctcgacatacatgaaggcatctatgggttacatgccgccgatatactcgggccattcccacgaggacagggcggctacaggttcctattcgtggcgatcgacaaattcactaagtggattgaagcgacacccacgggggaaatcaaggccgacaacgccatcaaattcatcaaagggatattctgcagattcggattgccccaccgtatcataacggacaacggctcccagttcatcagtgccgatttccaggattactgcatcaggctgggagtcaagatctggttcgcctcggtttctcaccctcagagcaatggacaagtcgagagggcaaacggcatagtactacaaggaatcaagacccgcgtctacgacaggctcatgtcacatgacaagaagtgggccgaggaacatccatcagtactatag

SEQ ID NO: 81524 - DNA, 2865 bp, Oryza sativa
  Clone ID: PAT_MRT4530_81041C.1
atgatcaaggacattatggaagtcttcatggaagattttttggtctatggaaagaccttcggtcattgtctacaaaatttagacaaagtcttacaacaatgccaagagaaggacctggtacttaattgggaaaagtgccatttcatggtccatgaagggatagttcttggccatcgagtgtccgaacgagaaatcgaagttgatcatgctaaaatcgatgttatagatcagcttcctcctcctgtgaacatcaaaggaatccgcagcttcttgggacatgccggcttttatagaaggttcatcaaggacttttctacaatcgccggacctctgaccaatttgctagccaaggatgcgccctttgagttcgatgacgcatgcctagaatcttttgaaattctcaaaaaggcacttgtctccactccaatcattcaacctcctgattggactctgcccttcgagatcatgtgtgatgcaagcaattttgctgttggtgcggtcttgggccaaaccaaggataaaaagcatcatgcaatctgctatgctaacaaaactctgactggagctcagttaaattatgcaactaccaaaaaagagctgctcgcggttgtttttgctatcgataagtttagatcttacttactgggagccaaggagataatctatactgatcatgttgctttgaagctgcggatcactgacacgcaggaacaaccgataaacgacttcttgagagacgacatgctgatgacggttcgtgactccaacccgtggtatgccaacatagtaaactacatgaagacggtcaacaaaatgggaacaagatggaaggatagattgctggatgcactgtgggcataccggacaacatacaagacacccattggaatgtccccatatcagatagtctacgggaagtcatgtcgactacctgtggaacttgagcacagagcatactgtgccatcagaaactggaatatggactttgaaggagcaggagaatggagaaaaatgcaaattgctgaacttgaagaatggagagagaaggcctaccataacgcaaagatatacaaagaaaggacgaagcgctggcatgacaaaaggataaaaatcaagaaattcaaccaggagacaaaacccagaaccctgtccttcctcctctctcccacttttgcaaacctcctcttcttctcatctcaattccattgcttcatcaccctcaattcaccagtggctggcaaatctttgatcccattcatcggctcttcctccaactccacatacaaccttgacggagagccgacaccggtgaatcaattgatcctggtggagcattacacgatggaaggggtgaatgcactgtgggcacaaccccttgcaacagtgccaggctcccctgcgattctggagctgatcggcaagctccctggttcggccgaacccttctcggccccgttcggccccccgttcggcaccctgttcaccaaggcaggggatgaggtgttccataagtatgttacacccaccgctactccatccactccgaaggaggagcgtttccacattcaaggagtgcgaactcctggtggcgggtatggcaagggtttactccggccgttaacagcatcagagaaggagggggcagcggaatcccatagccctccacctatgaaggtgaagcataatttgacaccccctccaattgtgagggctcctggccaatatcaagaagatgaggtgaagtcgccggaaccctcgatccataagctcgccgcacaagtgaagaaactccgcaaggagaacatagagcttagggatcgcaacacggagctagggccgtgcgccgccgtcactcctgttgtcgccgtcgctcggggaggtcgccttcgtggtcgccgtcgcatcgccgtcctcgtccgccccttcgccgtcgctgaagaccgccggagcaccgtcgccgtcgtcgagccgaagcgccgtcgttcgccggcgagcatgcgcgcccgagccgcccgagccgccaccggtgatgacgtcaccgctgacgtcatcgggactgtccgccgtgagccggccgtggaccggttgatctcagccgtccgttttggatggatcaatctcggccgttcgtttccgtgtgccgccaccgtgcgcccgatgccgcgctacaagcctgagtacttgtttggtgttgagggatttgtccaggagttgcgtacgatgtcctttgccataggatttgggactgctcctttttatgctcagattcctcatgatcgtcatgaagagaagtgccgagaggtggcaaggatcgccataggagagctccgcgatcgctatagtgatcagttggccgacactgagtatcgctaccatcctcgccaaccccagggaagtgaccgtggcagctacctagagactgaaggaattgagaatgatgctaccacaaggcatttggttgagatgctgtgggctgtggatgaaacccgtgcggagactgtattagcagctcaagatcgtgaagaccggaatcgtggaaagatttgcaagctagaggacaaggtggatcgtttggagaaggaattagccgcattgaagggagaagcaccaccgcagaaggccaggattcgtcttaccgcaaggaagagagctctttttgtccctcgctaccaattggcgccaaaggtccgtgtggtggaaaaagaagttaccccagttctagtagatcctccggtcatcaacgtaagtgatgatgaaggagaagaatcgaagcacactcattccaagattgagtggagagcaactcaagatgatgaagacgagccgaacgagccttcaatcaactccgatgcccggaagaactag

SEQ ID NO: 81525 - DNA, 6375 bp, Oryza sativa
  Clone ID: PAT_MRT4530_81042C.1
tttttttttttttttttttttttttttaaagatctacaacatctcaaatattcttaactcatactcatgtgaatctagttcccaggatatacactagattcacactttcatcttaagcatggacatacatagcagacacatttaagaagaaaaggacttaaagacttacatcaacttgaagaaaagaacttaaagacttaaagtcaacttaatagttacataggccgaccggccaaatagatatataagagaacaagggaagcttatctacccaaaccacaagcacaccaactaggggtttacccccattaagttccaagtcctagaagaagcagtcgattacccgcatcactcaaagactaaatctaaaaccttgaatcaggaaaagtgtcagcatctaaatcacttcttcaccgtttaagcaatcatcgagattctagacaaggctagggatgtctgcagagccacagcgacggcgaagctccatggcggcatggcacaactccaggaatgacgtcggctgctcgatctgtaaggggagtcacggagagaatggaatcgatgatggaagcgattgaatggagttggagaacacgatgtcgatctccaagatcgctgcgccattggatgggttttcttggggtatcttgaagaggacgtcgaggtgatcctggtggcgcaagggttcggcttggggtggttcggttcggtcggaacgacgatgagaacccgatgacggcgtccagtgcgcgctccagagcatcgtcggcgagctctgcgttcccgtggatcatgtcaccatgtgcctcaataccaccacggtacctcggaaaggagttgtgacaataccccttatacaacacaatccactgcagcgcaccttcctggatcataatcacccccttataacaaggcatggactccccagcgacccccgtgggcttatctccgccacttctcagtctggtgccccgcaatgaaccacgggcggacggccttgatgacgtcagcggtgacgtcaccgacggcagcggcggctcggcggggcggacggctcgagcggcgcacgctcgccggcgaacggcggcgcgaggacacaaatggaaagcaccaagacaaagcgggcggcacggcgaactcaccggcgaccaaaacggcgacggaagatcaacggacggcgacggcgacgaggaggaaacggcgaagcttttcgggtcgacgacggcgatgacgctccggcggtcttcggcggcggcgaaggggcggacgaggacggcgacgacttggcgatcacgacggtggccttcccgagcgacggcgacggattcttctgaccacttgtacttcacatctttctgaagcaatcgtgtcatgggcttagcaatcttggaaaaattctctataaacctccggtaatatcctgcgaggcctaggaaactgcgaatctctgaaactgtctttggttgtttccaattggttacggattccacattactaggatcgacggcaactcctcctgctgagatgacgtgaccaaggaatttcacttcagacaaccaaaattcacacttgctaaacttagcatacagttgatgttctcgtagcttctccaatgcaaggcgaagatgttcttcatgctcttctttggttcgagagtagataagaatgtcatcaataaagaccaccacaaacttatctaggtattccataaacaccttattcatcaagttcatgtagaaagcaggggcattggtaagtccaaaagacataacagtacattcgaacaacccatacctagtggtaaaagctgtcttagggatatcttcctctttgattcttaactggtgataccctgagcgaagatctatcttggagaaaacggtggcacctttaagctgatcaaacaaatcatcaattctgggtagcgggtacttattcttgatagtcacatcgtttagtgcacgatagtccacacacatcctttgggtatggtctttcttttccacaaatataaccggagctccccatggtgatgaactcggtctgatgtatcctttctgaagcaaatcatctacttgcctcttaacttctgccaactcattggcaggtaaatcatctgggaacacatcagaatactcccggaccaaaatcacatctggagcatcttgagcctctgcagctgcaacatgattgacacgggcctttgatactggtgcggtagagttgctctgagcaggaacaaccttcacgcgacggggcttcggacacttgtcagcataatgtcctgggtctccacagttgaaacacaccacgggcttgctaccttgctccctcttagcaggctgttgctgtgttggagctacaacagggcgtggaacttgattgcggatgttgttgccagcattgttgttgaagaactgacgctgcggacgaacaaccgacgaagaacctcccggtggcatggactgaggtcctaaagtaagacgcggcttctgattattcccctgttgcgtcttgaattgagcaatccggcgtttcttctgctccatgcgattgtatttgtcctcctgatgaatagccttatccaccaacttctggaaatcagaataatctccagtcatgagtgggtaagaaagctcatcattaagtccttccaagaacttctcctgacgctcttcatcattgtgcacatcttccggagcataacgagctagacgattgaactcgtgcagatactccgtaacagagcgagatccctgggtaagcgacctgaactccttcttcttgagagacaccactcccgatggtatatgcgtcttccggaaagcagtggtgaattcaagccaagtgataggttcagcagtagtcctattcaggcggaagtgatcccaccattcagaggcagggccatgcaactgatgtgatgcaaatgagaccttctcctgatcagtgcattgaagcaaatccaacttcttctctatggcatgcagccaatcaccagtttcgacaggattagtggtactagagaaaacaggcggcctcacacgaagaaattctgctaacttgttctggggagttgcatggttatttccttggttctgctgattctgaagttgttgcatcatcatgtgcataagctgagtctgttgagcaagaacttgagcaagagtggggttctctccattgttgttattggggttgttgggaccattcccgttgtctagttcttccgagcatcggaggtcgattgaaggttcgttcggctcttcttcatcatcctgagttgctacccactcaatcttggaatgagtgtgcttgggttcttcttcatcatcactcacgttgacgaccggaggatctgctggggcaacttctttctccaccacacggacctttggcgccaattgataacgagggacaaataaagctctcttccttgcggtaagacgaatcctggccttctgcggcggtgcttctcccttcaacgcagctagttccttctccaaacgatccaccttgtcttctagcttacaaatcttaccacgattccaatcttcacgatcttgagccgctaacacagtttccgcacgactttcatccatagcccacagcatctcaaccaaatgtcttgtggtaacatcattctcaattccttcagtctcaaggtaactgctacggtcactcccctgtggttgacgaggatggtaacgatactcagtgtcggccaactgatcactgtagcgatcacggagctctcctatggcgatccttgccacctcctgacatgcatggatgtagtttcttcctccagcttcgaacatcaccgatggaatatcttcactattactgttcaaggtgactttgactcggcacctctcttcatgacgatcatgacgaatctgggcataaaaaggggcagtcccaaatccaatgacaaaggacattgtacgcaactcctggacaaaaccctcaacaccaaacaagtactcaggcttgtagcgcggcatggcggacggctttgatgacgtcagcggtgacgtcaccgacggcggcggcggctcggcggggcggacggctcgggcggcgcacgctcgccggcgaacggcggcgcgaggacacaaacggaaagcaccaagacaaagcgggcggcacggcgaactcaccggcgaccaaaacggcgacggaagatcaacggacggcgacggcgacgaggaggaaacggcgaagcttttcgggtcgacgacggcgatgacgctccggcggtcttcggcggcggcgaaggggcggacgacgacggtgacgacttggcgatcacgacggtggccttcccgagcgacggcgacggctggaacgacggcggcgcacggctggagcggcggcggcggcggcaaagctagggcacacgacgctagggcgattccgacgacgagaggcgaaggcgagggtggcggcgggtagaggagacaccggggagccttttaaaggggctaggaggcggcggcgaaggcccacggcggccggtgacgagaaggaaacttcgtggcttgaaggaaagaggccgatccgaatcgaactcgattccacgattcaattcatcttctcgttcccaagttgattcttcttccgagtgattactccattgaactttacaaaaatggataactcgattcctggttcttctctcatctgtttccaagatacggattggtttctcaacataggtcagatcctcttggacttctatctgttcaagattagcttcttcggtaggtacccttaaacactttttcaattgcgacacatggaacacattatggactcctgccaaagattgaggtaactccaactgataagcaacctctcctcttctactgacgatcttataaggtcccacaaaacgcggtgccaattttcctttggtgtgaaaacgatgaacccctcgaagaggcgtgacacgaagatacacataatctccttcttcaaaactcaaatctctgcggtgattgtcggcataactcttatgtcgggactgggccactcgcaatctttcttgaatgacctttaccttttcttctgcttccctcaggatatcagtcccgaaaacctgacgttctcccgtttgatcccacaaaagcggagtgcggcacttccgaccatacagtgcttcgtaaggagccatctgaagactagcttgataactgttgttgtacgaaaattctgcataaggtagattcttatcccaacttccaccgaaatctaaagcacaagctctcaacatatcttccaaaatctgattcaccctttcggtttgtccgtctgtctgcggatgataagcagtactaaagttcagcttagaacccatctcttcctgaagcttcttccaaaaatttgaagtaaactgactgcctcgatcagacactatcttcttagggacgccatgcaaacacacaatcctggccatatacaattccgccaaccgacttccagaataagttgtctttaccggaatgaaatgagccactttggtaagtctgtcgactatcacccaaatagagtcatggcctgatgacgttctgggtaaaccagtgataaaatccatacctatttcttcccatttccattcaggaatcttcaaaggctgcaataaaccggtgggtttctgatgttctgccttgacgcgctgacaaacatcacatactgctacgtattctgcgatttcacgcttcatacttgcccaccaaaatcgttccttgagatcctggtacattttggtactaccagggtgaatggagtataaagtatcatgagcttctttcagaattgcatcttttaaatctttgttgtcggggacgcaaattctctcacctaaccatacagttccttgctcatcttccaagaaaccgatagcttttcctcttctcatattcttcttgatctcttgaatatcaggatcattaatttgagcttctctaacttgatcaattagagtgggcttcgtttttaaggctgcaacaaaacctctactgacaattcccaaatttaatctttcaaattcctctgtacgagtaccaaaaagataatgacgccaaatcttcaatgcatgaaccactgcagctaactcaatatcatgagtagggtagttcttctcatgcggatgtaactgacgagatgcataggcaaccaccttcccatcttgcatcagaacacaacctaacccaagtttggatgcatcgcaatacacttggaaacccttctttggatcaggtaaaatcaaaataggagctgatatcaagcgattcttcaactcttgaaaactctgctcacattcttccgaccacttgtacttcacatctttctgaagcagtcgtgtcatgg

SEQ ID NO: 81526 - DNA, 362 bp, Oryza sativa
  unsure (1)..(362): unsure at all n locations
  Clone ID: PAT_MRT4530_81043C.1
gctcctcacgtccagcttcctttttccatttctcccctattttctttcttatacactacaattatccattcatttggaggtagaccttatatagatattactatgtttgcttcttcttttttttccctttcatttggaggctgtacgtgtttgattattattattattttgcctgtatacgctgtaagtgcatcgatctcacaagatcgatcatcatcaacttatccatccggattgaaatatggtctatatctttcatttccaaaaaaaaaaaaaaaaaaaaaaaaaaaaaaaaaaaaaaaaaaaaaaaaaaaanaaaaaaaaaaaaaaaaaaaaaaaaaaaaaaaaaaaaaaaaaaaaaa

SEQ ID NO: 81527 - DNA, 467 bp, Oryza sativa
  Clone ID: PAT_MRT4530_81044C.1
acctgtgcctgctcggaagccgtcgtctctcccgtccgcccgatccgggtccggagccgccgaaccggcggaggcggggagccggcggtcgtctcctgcgtcctggatgggtagctctcataggcgcccgacgacgtgagatccgtttagaccgtctacacgtagggtggttacagatgaatcagatctgaagttaacggattgttatgggctggattgcatcaaacagatgggggtgacgaattgtatgcaactgaatgtctaatagtgaaccacggttcttcacatgaaacaaacaagttggatgcagtaatgtgagcttcaacaatgcacagtggtcataacaatgctaatgcatgcgtagatgattaccaacatacagagatgatggcaggaattcaacctatggagggagttgggttttgctgtacgcaaccctttgagctgcaatcacaagggatagtacc

SEQ ID NO: 81528 - DNA, 1143 bp, Oryza sativa
  Clone ID: PAT_MRT4530_81045C.1
atggcgccgtcgtacgtggccgtgggttcacgcgactacgcaaggaggggcggcgggcggcggccgcgcattgaggtgaggggcggtgccgccgtggccgtggagctccggtccgccgccgtcgtcgccccggcccgcctcccacctcgccgccgcctccttcggcttcgccgcatcctcgccgacctcgtccacctctccgtttcggtcgccgaccgccggagcgccgccgaccccgtcgacccgagccgcgacaccgcctccctccgcttcggccgcctccctcatcgccgccgtcgccccgaggtgagccgtggaccgtcgcctcctttcccccttccctcccctctctcggccgccgctccgccgcgccggtggtcgccggcggcgaccatcggggcgcggggcgccgcctcccgccgtccgcgccggcttggccgcccttgggtgcgccgagtggctgccgcgtggggcccggccgtcagccgcccgcgccctcgggtgcggctgacgtgtggggcccacggcgccgatcggtgtgagcccgggtgcacccggtccaccgtggaccgtgaggctgccgcgtgggccccactcccgtggacccggctgggctcggggtgcatggttttgatagtagcacctcagccatataaggaccggtcttcaggcctctgttgcaaagcactaccgtacttccacatgtctagtggggcaaatgaaggctacacgagctgcggcccggtagtcgagatgtcatggcacagggccggtgtcctactgctacgggttcagtcctgcctacctgtcccgggggttctggccctaggtggggttgggtcgcactcgccctaccgctaccaccctcgtcgtggaggagcccgcgactgcgccaccttcagggatgctagctcggaggatgacgctaccatcatgcacctggcacgcatggtggaggcatacgacgcggcccgtatcgacttccatcatatgctgaagaaggacctagacgcagtggaggcgcagctgtgtcagctcaagatcgcccagggagaggtctgtcgccccaagcgccgccgcgtctgccgtagcctgaagatcaccacccacaagagtacctctaggcccaagcttgttcgctag

SEQ ID NO: 81529 - DNA, 852 bp, Oryza sativa
  Clone ID: PAT_MRT4530_81046C.1
atgggtgaatctccaccgtccatctttgatcggacggtcagaaaccatccccagctgacgatgggcttttttctcggcccattgggcttgcaattgggcccatttgtttgtatgtggctaaagcccaccagaagagagctgtgtcctcgtctcgtctcgtcgccggcgaagctcaccgacgacgcgacgccaccccagccgccgccgcagccgcagcccggcgaccggcggcgccgcccccggctccctgacccgccgcggccgcacgggggtaaggcggttcccctgtcggggctctcgccgcaggatacctgcaaggctgttgctgatccctacatcgagtgcgagttcatgataatcttgattgatctgattctacacaagacaagagcatatcgtcatcttctatttaataagttgaggatttattcatcacttgacaaggttctgggcgatgcattgttagggaacatcgtatttatgaccatgttattcctggaagtgcaatttatcctaaaactatcttttgatattagaaggtatagggaggttctgttagccgtcatcatttcaagctacttcaagttatttctcatggcaatgatggtttgggagtttccgtcatctgttatattctttgttgaaatttctgttctctcttcaaatactgtagcactgagagttgtgacggagttttcaaaggcccattgcttcggagtctgctttggagcgcacgcagcaagatacctgactgagcgatggcttctcggggcgccatgaacccaaccgccgtgcttcctgcatccatcaagctccctgtagctcgtggtgccccccaaattcatcaggatt

SEQ ID NO: 81530 - DNA, 2460 bp, Oryza sativa
  Clone ID: PAT_MRT4530_81047C.1
atggtgaacactcgcagcaacgggaatggtcctaacctcaacaaccccaataacaacaacaatggagagaatccaacccttgctcaagttcttgctcaacagactcagttaatgcacatgatgatgcagcaatttcagaatcagcaaaaccaagggaataatcatgcacctccacagaacaagttagcagaatttcttcgtgtgaggccgcctgttttctctagtaccactaatcctgttgaagctagtgattggctgcatgccatagagaagaagttggatttacttcagtgtactgatcaggagaaggtctcatttgcatcacatcagttgcatggccctgcctctgaatggtgggatcacttccgccttaacaggactactgctgaacctatcacttggcttgaattcaccgctgcttttcggaagacgcatataccatcgggagtagtgtctctcaagaagaaggagttcaggtcgcttactcagggatctcgctctgttacggagtatctgcacgagttcaatcgtcttgctcgttatgctccggaagatgtgcgcaatgatgaagaacgccaggagaagtttttgggaggacttaatgatgagctttcttacccacttatggttggagattatcctgatttccagaaattagtggataaggctattcgtcaggaggacaagtacaatcgcatggagcagaagaaacgtcggattgctcaattcaagacacaacagggaaataatcagaagccgcgccttactttaggaccccagtccatgccacagggatgttcttcgtctgttgttcgtccgcaacgtcagttcttcaacaacaatgctggcaacaatatccgtaatcaagctccacgtcctgttgcagttccagcacagcaacaacctgccaagagggagcaaggcaacaagcccgtggtgtgtttcaactgtggagatccaggacattatgctgacaagtgtccgaagccccgacgcgtgaaggttgtccctgcccagaataactctgctgtaccagcatccaaggctcgtgtaaatcatgtcgcggctgcagaagctcaagatgctccagatgtgattttggtccgggagtatcctgatgtgttcccagatgatttacctgccaatgagttggcagaagttaagaggcaagtagatgatttgctacagaaaggatacatcagaccgagttcatcaccatggggagctccggttatttttgtggaaaagaaagaccatacccagagaatgtgtgtggattatcgtgcactaaacgatgtgacaatcaagaataagtatccgctgcccagaattgatgatttgtttgatcagcttaaaggagccactgttttctccaagatagatcttcgatcagggtatcatcagttgagaatcaaagaggaagatatacctaagacagcttttaccactaggtatgggttgttcgaatgtactgttatgtcttttggacttaccaatgcccctgctttcttcatgaacttgatgaataaggtgtttatggaatacttagacaagttcgtggtggtctttattgatgatattcttatctactctcgaaccaaagaagagcatgaggaacatcttcgccttgcattggagaagctacgagaacatcaactgtatgctaagtttagcaagtgtgaattttggttgtccgaagtgaaactccttggtcacgtcatctcagccggaggagttgccgtcgatcctagtaacgtggaatccgtaaccaattggaagcaaccaaagacagtttcagagattcgcagtttcctaggccttgcaggatattatcggaggtttatagagaatttttccaagattgctaagcccatgacacgactgcttcagaaagatgtgaagtacaagtggtcggaagaatccttagaagcgaagcccactctaattgatcaggttagagaagcccaaattaatgatcctgatattcaagagatcaagaagaatatgagaagaggaaaagctattggtttcttggaggatgagcacggaactgtatggttgggtgagagaatctgtgtccccgacaacaaagatttaaaggatgcaattctgaaagaagctcatgatactttatactccattcaccctggtagtactaagatgtaccaggatcttaaggaaagattttggtggccgtcgccgtcgctcgggaaggtcgccgtcgtcgtcgccaagtcgtcgccgtcctcgtccgctctttcgctgccgtcggagaccgccggagcatcgtcgccgtcgtcaagccgaagaccgccgccgtttcaacctcgtcgccgtcgccgtccgttggtcgtccgccgtcgctttggtcgtcggccgtccgccgtgaaccgccgtggacccgatcaatctcggccgtccgatttggatcggatcaatctcggccgtccgttcgcgtga

SEQ ID NO: 81531 - DNA, 2106 bp, Oryza sativa
  Clone ID: PAT_MRT4530_81048C.1
atgtccggctccggcgtccccgccggccgcggctcccgcagcttcgacttcggcgccgacgacgtgctctgctcctatccggcgtccccgccggccgcggctcccgcagcttcgacttcggcgccgacgacgtgctctgctcctacgacgacttcgccgccccctccgagcccaagcgccccgatccggccgacaaggcagactttcacgacagtagattggggagaccatttggaaaagcttatgaacaagagagttacggcaaggaggatgtactttttgctgttgagaagtgcatgaagaaatatgctgataatttgctgcgatcgcttgagggaattactaatcgtctttcacaactggagatctattgctataagcttgagagatccatgggtgaacttcgaagtgatgtgctccgtgatgagactgatcaaagattgaagtctcttgagaaacatcttcatgaagtgcacagatctattcaaaatccttagggacaagcaagagttagctgaaactcagaaggaaattagccaaatttcaacttacacatgacacatctaaaaagaaggaagatatgccaacaccatctttcctgagcaaaagacgcttgaagaaaaggcagatgcacctggtcagcagctggcgattgttttgcctcatcaggtgaactcatcccttgcacctagagcttctcaaccagtccaacagtacaaagatcagacagtgcagcagccacctagctcttctgtaccacagcaggaccgttatgttcttagccaagccattgtttactacccacagcgtcaagctccaggcattcaggatacacaggggcagcaagtacaaccagaggtgcagtacttgccagtaaggccttcagcaacgcaagatgttcctgtccatgcttcatctcaacagtctcaggcagcaaatcaaacccaccctcagtctttccctccttaccagcagcagtggccccagcaatcttcccagccggctcctgcaccagtggcccagccacagccgactttctcgcagccatttcctccacctgtgcagcagccccaattatctaacactcagcagtttcctccacaaccaatgcagcagccccaactatctaacactcagcagtttgctcctcaaccagtgcagcagcctaatgctcaacagtttcctccgccaccagtgcaaccgcagcaatctaacactcagcttcctcctcaggcaatgcaaccacaacagcatcctcctgtacaaaatcagatgaggcctcaaactccaccaaactaccctcattatcaaccccaccagtccttgaaccctccccctgaaactctacctggcagcatggctatgcaaggaccatacaacacggttgctccggcagcggggagccgttctgaagtgccatattcatacggaggacctggcatgccaccaccgcagcacaacatgcaaaggcagcagctacctcctccaagccagggctctttcggacctccaagtaaggggggctatgccggcccgccacaatatgcgccgcagggcagctcacatggctacaacactgcatatggctaccccccaagtggtccttcagcagcccaggcacctcagatgcctccagctccaggtaatgttggtatgagtcacccaggttcgcatcagatgatgcgcggccatccttatggggaaatgattgagaaggcaatcaccatgggatatcccagggagcaggtgatgaatgttattcagaggatgaccgagagtggccagccgatggatttcaacacattgctggaccggttgaacgaagcagggtccggagcaccccctcgtgcgtggtgatttcgtcctgggttgggtttggacctctctccatcccggcacggcgctcatacgtgtgcaaagagtggtactatcgtgtagtagttgaataaataagatttgaagtgatgccatctgttgactgttgcgtatttgtacgatgtacatattatacattgatcttaatcttcatgtacttcctgcacgtgtaccaccaacttctttgcaattggaccatttcagcagatctgtgctaatccagattattgc

SEQ ID NO: 81532 - DNA, 683 bp, Oryza sativa
  Clone ID: PAT_MRT4530_81049C.1
atggcggcgcacgtcgacggcgagtgcccggcgcgcggcggcaccgcggcggcgtccgcgcgagccgcgccgccctcctccagccgccgccgccgccgctactgcaacggcgtctacctgggtttcttggtgttcatcgtgctgttcggcttcatcatgggcgctctggtggcggaatcgatggggaatcgtcgcgggaaggtggtggtgatggtgctgtgccctctgacccccgcgccgggtgccaagttccgccggaacgtaaaacaaaagtagaagtaaaaagggtggcgatgcgccgaattgtattgatcgtgaagatagattacatagaccccgggtgtacatatttatacccatgggttgatacaagtccttgtcggacaagaaagaaactttcctaaagataaaaggaaaagataaagtccttataggacactaaacacactttcctaaagataaaaggaaactaacaaactattcctaattaatagataacttgccatgccgcattctctttgaactcggtctcttctggataagcttcctttagtagatcaatttccttaaccgaatatagcaagaatccgacaactgacgacttgataactttcatcggctaatctcaggacttcgaaaccgatgctgactctaagccgatagactactctgggcttaccaaa

SEQ ID NO: 81533 - DNA, 2008 bp, Oryza sativa
  Clone ID: PAT_MRT4530_8104C.1
tttgtttgttgtttttgtttttcatcgatcatcgaacgatatccatggaccaccattatccaacccaacacacacacacgaaaaagtgaagagagattttgctacacgatcatctcatccctcccatggcctttgctttatccgaggattacaggagagatcgatcgatcgaccattgcatccacacacacggcgacgaaaagaaaccaaggacacatcagccaccatcagcagtagtacgtgtcaagcacctgctgctgtgatggtgcccatggccatgtacatgtcctcctccgcctcctgcttccacagcttggcgttgagcccgcccctcggcaccgggaacgggctgtactccacctcgtcgctcgccccgacgatctcccacctgtaggcggtgacgaggcggtggacgaggacgagcatctccagcttggccagctcgttgcccgggcacgcgtgcacgccgctcccgaacggcaggaacgtgcttggacgcggcgccaccttgaatctagaaggatcaaacttttgtggatcctggaagtagtccgggttgtgatggatgttcctgaacagaggcatcaccttccacccctttggaatcaggaaacctttgtactccacgtcggcgactgcctctctgaacgtgaaggagattatgctcgccatcctcaagctctccagtataacctgatgcgtgagtgtcatgctcctcgtctgcgtccacgtcagcggccgcttcccgccctcgttggccacgtagatcgccatctgctccgccttgacggcttcgagaagcttcggcgagtcgtggaggtacttgaggatccaggtgaggacgctggcggtggtgtcctgcgccgcgaacagcacgccgacgacgttgtcggcgatctggtcgtcggtgagcagcgccaccgcgccggcggtgccgtcgtcgcgcgaccgcatgaggccgccgaggaggtcgtcgccgccgccgccgccgccgccgccgcgcgcccgccgctccgccacgatctcgctcaggatcgcgcgcagccgcttcctcgcctggatcgccttgtggtagagcgtccccgggaagcggttggggaagcagttgtagcctctctccacgacggagtagttcgtcctcagctcctccctgtgccggcggccgagccggccgccgaagatggtcacgacgccgacgtcgaacgagagcttcttcatggcgtggaaggtgctggcgacgtggccgccggaccaggcggcgagcgtggcggcgacggcggcgtcgacgtccgggacaagggcgcggagggagtccggggcgagggcggcctggacgaggcggcggaggcggaggtggtactcgccctggtggaagaagagcgccgacggcccgatcatccgctccttgctcggcgggtacgtcggcttgaacagcctcgcctgcgacaccagcacgaacctcgccgcctccgggctcgccagcatcacgcacgggcaccccagcagattcgtcttgaatatctcgccgtacctcttctgcttggaggcgaagaagacgttggggtcctgggagtagagctggagcgtctcgccgacgtacggccagcccatggatcccggaggaagcctgagcttcttcttcttctgccaatctcgccctccaccctgtccaacatctctcctcctctgcacgctcgtgcagagcagcaagaacgccgggacgacgaagcacagcactgcagctgtcacaaagacaaagaagagcaagaaagccatgtgtgtgtctccttgtccaaacaactctgtaaaactctctaccgatgatactcttcagatcagcacggatggctaatcgatatatatatatatatgcttgtgtgcagtgtataatccgtgccctctctctctctctgtacttatctttcgtatctgagtgtgatttgtgtctgtggcgcagtgttgttgggagagagggacacgaggggatcgagcaatcttggggaggaat

SEQ ID NO: 81534 - DNA, 186 bp, Oryza sativa
  Clone ID: PAT_MRT4530_81050C.1
atggacgctttggctccgctcacgtccttggagataggggctcaacaaggttgcactgccaccgagctccacgcccagttgcccgtcgccaatcgtgccacgctgccccaaattaaatctgagcgacaagcgaggaaggaggtggctacgcttcgtgcggcattggagtggggagaagatgatgga

SEQ ID NO: 81535 - DNA, 388 bp, Oryza sativa
  unsure (1)..(388): unsure at all n locations
  Clone ID: PAT_MRT4530_81051C.1
aaaacgcactaataagaaaaacacaaaaaaaacaaacaaacaaaaactagaaaccttataaaacncaccttttttttttttttttttttttaaaatttttttttttttaaaaaaaaaacaattccaatcaaccaaaagtaaaccaaaccaaccaagaaccaatcgtccaccaaacaataagcaaattaacccaaaaccaaaaacacctccaaatccaaaaaaaaactaaaattgttcgcaaatcctacgtaaaaaaaaacactaggttgaaaacaacatgaaaaaaaaccaacctacttgggggaattaaacaaatgttgtttattggaaacgcgactcaagaaaaaagcaaaaacaatttaaaaaataatgaaaaaaacgtatatta

SEQ ID NO: 81536 - DNA, 1494 bp, Oryza sativa
  Clone ID: PAT_MRT4530_81052C.1
atggcgtcgccgacccggccggggccgtacatgccgcgcccaccggcggtgccggagtggctgaacaccggggacaacgggtggcagctcgcggcggcgacgttcgtcgggctccagtcgatgcctgggctggtggtgctgtacggcagcatcgtgaagaagaagtgggccgtcaactcggccttcatggcgctgtacgcgtacgcgtccacgctcatcgtgtgggtgctggtcggcttccgcatggcgttcggcgaccggctgctcccgttctgggggaaggccggcgcggcgctgacggaggggttcctcgtggcgcgcgcgtcggtcccggccacggcgcactacgggaaggacggcgccctggagtcgccgcgcaccgagccgttctacccggaggcgtccatggtgctgttccagttcgagctcgccgccatcacgctggtgctgctcgccgggtcgctcctcgggaggatgaacatcaaggcgtggatggcgttcactccgctctggctcctcttctcctacaccgtctgcgccttcagcctctggggcggcggcttcctctaccagtggggcgtcatcgactactccggcggatacgtcatccacctctcctccggcatcgccggcttcaccgccgcctactgggtggggccgaggctgaagagcgacagggagcggttctcgccgaacaacatcctcctcatgatcgccggcggcgggctgctgtggctgggctgggccgggttcaacggcggcgcgccgtacgccccaaacatcaccgcgtccatcgccgtgctcaacaccaacgtcagcgccgcggcgagcctcctcacctggacctgcctcgacgtcatcttcttcggcaagccctccgtcatcggcgccgtgcagggcatgatgaccggtctcgtctgcatcacccccggcgcaggtctggtgcacacgtgggcggccatactgatgggcatctgtggcggcagcttgccgtggttctccatgatgatcctccacaagagatcggcgctgctccagaaggtggacgacaccctcgccgtcttccacacccacgccgtcgcgggcctcctcggcggcttcctcacgggcctgttcgccttgccggacctcaccgccgtccacacccacatccctggcgcgcgcggcgcgttctacggcggcggcatcgcccaggtggggaagcagatcgccggcgcgctcttcgtcgtcgtgtggaacgtcgtggccaccaccgtcatcctgctcggcgtcggcctcgtcgtcccgctccgcatgcccgacgagcagctcaagatcggcgacgacgcggcgcacggggaggaggcctacgcgctatggggagacggcgagaggttcgacgtgacgcgccatgagggggcgaggggcggcgcgtggggcgccgcggtcgtggacgaggcgatggatcaccggctggccggaatgggagcgagaggagtcacgattcagctgtag

SEQ ID NO: 81537 - DNA, 397 bp, Oryza sativa
  Clone ID: PAT_MRT4530_81053C.1
tctgtttgttgagtggaagcagatcaagaagatgctggagaagctgtgggacgacgtggtggccggttctcgaccggagaccgggctctagaagctacctaaggacgctacaacccgcccccttgttatcaacaaagaaggcgacggacaggcgagcggagtggtacacaagcggacacagacgatgccgacgaccccgacgacgccggtgacaccgttgtattggttcccgacgacggctactacgacgacccctcggggcagaaacgtgtggaggaagactttacaccccgggagaaacctcgccaccaagagtccttgtacccaacctaatcagaccgcccccagctcaacttcccccacccactacgaatggctgtgcagggaccagaccagg

SEQ ID NO: 81538 - DNA, 1125 bp, Oryza sativa
  Clone ID: PAT_MRT4530_81054C.1
atgccacgtcaacacctttctatttcccctctcctcctctcccttctctgcttctctttctctgtgcaggcaagccgaccggaggggaggaggtcggtggggcgcgcccgccgcacgctccacgaggtgggccgcggcggcggcgtcgtcgtcgccggccgcgccgtctccgcccagttcgccaccgctggcgcagacctgtcctctggcgccgcggcggcggcgtcggcggcggggaggcggtgtacgtcaccaacgtcgcaccgggcgcgagcgcggagcggctgcgcgccttcttcgccgggttcggggagctcgagggcggccgttcagcttcgacgcgtctcccgcgggtgcgcgctctttgtgtaccgcgcggcggagggcgccagctcgacgccgactccgccggaagagcaaaccacgcgcgcggccgccgctgccgtggcgtcaccgctgccggcgctaaacctcacaaatagaggattaattgggcagatgtctcctcttggaaacctaacattcctcaaatttctctttgtacctgcaaattcattcaccggagagatccctcaatcctttggtaatatgcatcacctgcaaatcatatacttgagcaataacacattgcaaagaaggatgcctaatcttgcaaactgttccaacctcaaggtgctatggctgaatggaaacaatctggtaggacaaatccctgcagatttgcctcaacgctttcaaagcttgcaactttcagttaacagtcttactggacccatccctgtttctgttgccaaaattacaacgctgaaaaggtttagttgtctgtataataacatcgatggcagcataccaaatgattttgcaaagttgcctggtttagtatacttgcatctgggtgcaaaaataattggcaggcaatgtgccaaattcttttggaaaccattccactcaacggcagtacatacactgatacacatgggattaaatcagttcttaggatcaattccttctggtatagcaaacattcccaacttgattgctttagaattgggtggtaatctgtttacaaatgtgattccacgcagcggcggcggcatgcgtggtttgctcttccaggcggggtag

SEQ ID NO: 81539 - DNA, 3075 bp, Oryza sativa
  Clone ID: PAT_MRT4530_81055C.1
atgaagtttaccacaatccggcagtatctgttggtgcttatggctagcagtataatcaaaatcatgtgcagctcattatatgggaacgagacagatcgactctcactacttgagttcaagaaggcaatcagtatggatccacagcaagccctgatgtcctggaatgacagtaattacttttgcagctgggaaggtgtctcctgcagggtgaaaactccacatcgcgttatctctctaaacctcacaaatagaggattaattgggcagatgtctccttctcttggaaacctaacattcctcaaatttctctttctacctgcaaattcatttactggagagatccctcagtcccttggcaatatgcatcacctgcaaattatctacttgagcaacaacacattgcaaggaaagatacctaatcttgcaaactgttccaacctcaaggtgctatggctgaatggaaacaatctggtaggacaaatccctgcagatttgcctcaacgctttcaaagcttgcaactctcaatcaacagtcttactggacccatccctgtttatgttgccaatatcacaacgctgaaaaggtttagttgtctgtataataacatcgatggcaacataccagatgattttgcaaagttacctgtgttagtatacttgcatctgggtgcaaataaattggcaggtcagtttccacaagctatcctgaatctttctactcttgttgaacttacccttgcttccaatcatctgagcggagagttgccgtccaatattggtgactctgtaccaaatctccaaaagttccaattgggcggcaacttcttttatgggcatatcccaaattcattgacaaatgcttccaagttaaatctgatcgatatatcaatcaatagtttcactggggttgtgcctagatccattggcaaacttaccaaactgtcttggttaaatcttgagctgaataaattccatgcacatagccagaaagatctggagtttatgaacagcttagccaactgcactgagctacaaatgttctccatatatggtaatcgctttgaaggcaatgtgccaaattcttttggaaaccattccactcaactgcagtacatacacatgggattaaatcagttctcaggattaattccttctggtatagcaaacattcccaacttgattgctttagaattgggtggtaatctgtttacaactgtgattccagattggcttggaggtctcaaaagcttgcagaccctaagtttatttaacaatttattcactggacccattccaccatctctgtccaatttatctaatttggtagaacttggtctaagcacaaaccagctcgatgggtacataccaccaagcttgggatacctccaagtgcttgaggaatttactatttcccataacaatattaatggttgggtaccaaacgaaatcttcggtattccaacaatatcattaatttggctatcattcaactatttagagggagaacttccttctgaagtaggcaatgccaagcagctcatgtacttgcaccttacatctaataaactgtctggagatattccaagtactttgggtaactgcgaaagtttggtagacatcaagttggaccagaatgtttttactggaaacattcccataacattaggcaacataagtagcctaagagggcttaacttgtctcacaataacttaagtgggacaataccagtgtctcttggtgacctagaacttcttcaacaactagatttgtctttcaaccatcttacaggtcatgtcccaacaaaaggagtgttcaagaatacgactgccatacaaattgatgggaatcaggggctttgtggtggtataccagagttacacctgcttgaatgtcctgtcatgcctttgaattcaaccaagcacaagcattctgttggactgaaagtagtgatcccattagccacaacagtgtcacttgctgtaacaatagtatttgccttgtttttctggagagaaaaacagaagaggaaatctgtatctttgccctcatttgatagcagctttcccaaagtctcttaccacgatcttgctagagcaacagatggattctcggcatctaatttaattggcaggggaagatacggttctgtatataaagcacaactgtttcagggtagaaatgttgttgctgtcaaagtcttcagtctagagacaaagggagcacaaaagagcttcattgcagaatgtaatgctttgagaaatgtgcggcatcgcaatctagttcctatccttactgcgtgctcaactattgattccaggggaaatgatttcaaagccttagtgtataagttcatgacacgtggtgacttgtatgagttactatactcaactggtgatgatgagaacacttcaacttcaaatcatattacactggctcagaggttaagcattatagtggatgtagcagatgcattggagtacctccatcacaataaccaaggaactattgtccattgtgatcttaagcctagcaatattctcttggatgataatatgacagctcatgttggggattttgggcttgcaagattgaaaattgattcaacagcatcaacttctgctgattcaacttcttcaattgcaataaagggcacaattggatacattgctccagagtgtgcatcaggtggtggtcaagtttcaactgttgcagatgtttatagctttgggattattcttcttgaaatatttctacggaagagaccaacagataatatgttcaaggatggtctggacatcgcaaaatatgttgagatgaactctccagatagaacactaaatattgttgatccagaattactagacgacaaacaattgcaagaaattcctgtaaccatgaaggaaaaatgcattgagtgtttagtttcagtgctaaacacaggactttgctgcgttaagatatcccctaatgagcgcatggcaatgcaagaagtggctgcaaggttacatgtcattaaggaggcatatgccaaagcaatctctgattcgcaggcagttatcagcgacaaaacttag

SEQ ID NO: 81540 - DNA, 1582 bp, Oryza sativa
  Clone ID: PAT_MRT4530_81056C.1
atcctaaaccgcctcaaacgcctcaccaagcctccctttcgtacacggatccgtccccccataccggccttcggagagatctgcccacaaaaacccccgcgcaccccctaaaaattgcatcacttcgaccaccctcgccctctctgccacttccgctcgttccccaccgatatacccatccacccccgtatctgtcaccacagccaggccccagcaaccccggccccggcgcgttgtaacacctgctcccggccccagttcccaggcataatcccgtttccggacccctcaaacccaagccagcaccttaaggccccatccaaccaccctccccatgcagcccatctcctccctctcggcgcccccatctctccctcgcgatccccaacaaatattgcacttcccatccccacgcggcccctctccttcctgtcgcccctcctctcaacacccctattctcccttgcgcccgctccctccaccttcaacaccgccgaggaggccgccgtcgcctacgacctctccgccatctccatctccggcgccgccgccgcgcgcaccaacttcctctaccccgacatgcaccaccaccacccttcgccgccgcagcacgcgctgtctccggcagtgccaccgccgccaccgccgccgccgccgtcgccgccacctccccagcccggccgcctgccctcccgtctccggcgcgcactggccgccgccgcccttgctcgctcctcccgccgccgccatctccgtctccgccgtgacgacatgtccgccatcgacctgctcttcgccgtgcaggccgccgccgactccgccattgccgccgccgccttccccgccgccgccgccgcggcctcccctcagagctgccgggcggccgccggccgattgcctccgccgcctcgccgccgccgcctgcagattctcggtcaccggcgctgccgcaccctccaccattgccgccggcgccctccgccggcgagcctggcctctgcggcgcggagtcggcgacggcgtggatcacgccgccgcgtccgccgcggccttctctaggtccggcgccaccgggcggcccggaatgcccgccgccgccgccagcatcaccggcggctccaccaccttaaccgctcaacagatgccgccgccgtcgcggtctccctcctcctcctatcccgccgcctcggcctcctccaccattgccgccggcgccctccgccggcgcgcctggcctctgcggcgcggagtcggcgacggcgtggatcactccgccgcgtccgccgctgccttctctaggtccggcgccaccgggcggctgcccgccgccgccgccaacatcaccggcggctcgtccctcgccaccgcatggacgaccaccactccgccgcgcccttctctcggaccggccggcggcgccggcctccggggagctcccccacctcctcctccacctcctggctccggctctccccaccccagtagtacacttgctttggcgccgccacctctcgccgccggccttgttgccatcttctcttatctgtttaatatgaagtaattttccttaagtattccttaa

SEQ ID NO: 81541 - DNA, 275 bp, Oryza sativa
  Clone ID: PAT_MRT4530_81057C.1
atggcttttgcggtttctgcggcggcgacggcgcggcttatctcggaggctgagtcagttgaggatgtctcagttagttgggaatttcagatggtgagaaaccggaagcaaacgctgaagctcgcgaggtggtcggccatggcggcgcctgttggttgctttgcttccctgacgacgcggacgatcccattctcgttcagtggcatgatgcaaggccctcggatctggcctaggctggagaagcgttggcctagagtttttgacaatctaagggg

SEQ ID NO: 81542 - DNA, 1137 bp, Oryza sativa
  Clone ID: PAT_MRT4530_81058C.1
atggcggcggcggcggcgcacaaggaggaggtgatcgggaagctcaacgtccgcgtggtgcggggctccaacctcatcatcgccgacccgctcacccacaccagcgacccctacgtcgtcctctcctacggcccacaggaagttttcgatgaggataaattcacagcagatgacagcatgggcgtagctgagttcaacgtgactgacatctacgatgctgctaagctggatctaaagcatgtctctgacggggccaggatcaagacgatctacccagttggtgtgaactatcttggcgcagagagccacgtttcatggaaaaatggcaaggtcgtccaagacatcactctgaagctgagcaaggttgacagtggcctgatcgtgctgcagctggagtgggttcacgtcccagtccttcagtccttcgccagttcgcccgacgccgccaccaccatccacgccgtccttgctgtccacgtcggcgccgcaccgtcccctcccctcctccgcgtcgtccattccccgccatccgcaccggcgcagcgccatcccctctcctccgtccgcgtcggcaccgcgagtccgcgccatcccctctccggcgtccccgccgtccgcggggccgggccatgccgtcgtccgccctgtagccacgctgtgccgggtcctgcactcctgcgtccgtcgtccacaccgctctcctgctccacgtctccaccgatccggcgcgggcggtccacccttcagcccagcgaccagaaggacatgaagaagttcttcttcccgacgtctcttgcacttcgagttcttcctccactgttcctgcgctgcagaatccttccccgcgcttcaaacatgactgctcttgttcttcgcggctactgctgctgtattggcgccttcaccaagatgtcgacggagattggagacaagacgatgaacgacatcaacggaggcaatactgcctcaaaatccagcggtgggacgttctcaggggcactggccgacggcgggctaggtcaggtcgcggcgcgccagccattctcccgcagcgcctccttcttcacggggagggcggcgatggcggcctccatctcccccatcgtccttcggattgccggcggcggcggtggctag

SEQ ID NO: 81543 - DNA, 337 bp, Oryza sativa
  Clone ID: PAT_MRT4530_81059C.1
gttcattttatactagccaatgacacttcatgcaggtcggtccattatatacagcgacgatcgcgttcaccacctgctgctgatgccgacgcccataactgcgagcttccgaggttcagcgatgtcgtcgacccgagaaccgctgtgcactcccctcctcagaaagaactcagatagatggaaagaatctagcaactgacgtaagcataccggctggacataaaaactggcgcaccaacgataggatggcccgcacatgcatttgctctaggaccaaaaaacccaaatgtgtcaagactgagctccagaccgaccattaagaaccctgtgcctttat

SEQ ID NO: 81544 - DNA, 2064 bp, Oryza sativa
  Clone ID: PAT_MRT4530_8105C.1
atgcctcaccggacaagcaaaatgcgccgcctcccgaggacaagaagccgccgccggacggcactgcaccgtcgcccaccacccctgccaccggcaataataatccataaggatcctccgccgccgccgccgccgcgacagccggcggcggcgaagggcacgctggacgccttcggccgcgacctcaccgcggaggcggcgaacgccgaccccgtggtggggcgcgaggaggagatcgaccgcgtggtctgcatcctctcccgcaagtccaagaacagcgccgtgctcgtcggcgccgcgggcgtcgggaagacggcgatcgccgagggcctcgcgcagcgcatcgcccgtggcgaggtgtccggcgtcctggagggggcgcgcgtggtggagctcaacgtcgcggcgatgatctccggcacctcgtaccgcggcacgttcgaggagcgcatgacgggggtgatcgccgaggcggaggcggaggccgacgcggccgccgggaaggtggtgctgttcgtggacgagatccacatgctcctcggcgccggccgcgtctcgggcggctgcatcgacgcctccaacatgctgaagccggcgctggcgaggggccgcgtccggtgcctcggcgccaccacgcacgacgagtaccatcggtacatggtgagggacgccgcgttcgagcgccggttccagaaggacgccgccctcgtcgccgccgccaagctctccggtcgctacatcccagcgaggcacttcccggacaaggcgatcgacctggtcgacgaggcgtgcgcgacggcgaggctgctgatggatcgccggaagaagaagcaggcgcaggcggcggtggcgcccaaggacgaaaacgtcggccccgaccacatcgcacaggtacgacgcacgccggcgcgcgccaccgcatcgacgtcgcgcgccggcgagacactgaccgcggacgaggcggttggcgccgtcgccgaggcggtggtgcggtcgcggtcgggactcggcaacccgaaccagccgtcgggctccttcctcttcctcggcccgaccggcgtcagcaagacggagctcgccaaggccctcgccgagcagctgttcggcaacgccaagctgctcgtccgcatcgacatgtccgagtacgtcaacgccagctccgtcactcgcctcatcggctccgctccagggacgaacgggtacgacaagggcgggcagctgaccgagctggtgcggtgtcggccatacagcgtggtgctgttcgacgaggtggagaaggcggacgccgccgtgttcaacgtcttcctccagatcctcgacgatgggcggctcaccgacgggcagggccgcaccgtcgacttcaccaacaccatcatcatcatgacctccaacctcggcgcgcagcacctcgccgacgccgccgccgccgacgccagccacaaggacgacgccacggaggccgccgccgccgccgccaagcagcgcgtcctcgccgacgtgcagaggcacttccggccggagctcatcagccggctgacggagatggtggtgttccggccgctgtccggcgagcagctgcggaaggtggcgaggctgcagctccgtggcatggccgcgcgcctcgccgagaagggcatcggcctcgacgtcgccaacgcggcgctcgacgtcgtgctggcgcggtcgagcgaccaggtgcgggcgtacggggcgcggccgatcaagcggtgcctggagaaggacgtgatgacgaggatctccaagatggtggtgcaggaggaggcggacgacgactgctacgtcaccgtcgaggcagaccaggggaaggaggagctcgtgttcaccgtcgacaagcaggcagacgcagaagagaacgacgcggcggcggcgtcgtcttcgtcgtcggcggcggggaagaagaggaagcggaggccgccggcgaggagagatctcccaccgccgcgcgctgatctctttttcgcgcgaaaaattttgctagcgccgccgctaaagcctctcctccgcatgcgcgccgcctggatcagcgccctcctctccggctag

SEQ ID NO: 81545 - DNA, 897 bp, Oryza sativa
  Clone ID: PAT_MRT4530_81060C.1
aggaattcggcacgaggtactactcctcctcccctcccctctcgaaacgcggcttcgacatggcggcggcggcggcgcacaaggaggaggtgatcgggaagctcaacgtccgcgtggtgcggggctccaacctcatcatcgccgacccgctcacccacaccagcgacccctacgtcgtcctctcctacggcccacagaaagtgaagaccagtgtccagaagaagaattccaatcctgtctggaatgaagtactgcagctcgcagtcacaaatcctacaaagccagtaaaacttgaagttttcgatgaggataaattcacagcagatgacagcatgggcgtagctgagttcaacgtgactgacatctacgatgctgctaagctggatctaaagcatgtctctgacggggccaggatcaagacgatctacccagttggtgtgaactatcttggcgccgagagccacgtttcatggaaaaatggcaaggtcgttcaagacatcactctgaagctgagcaaggttgacagtggcctgatcgtgctgcagctggagtgggttcacgtcccaggtgttaccctctgagcagtgtccgatggtcgtcgatggagctgcaggtgcagctggtctctgaatgtgatattgtagactatgcgtgtggacgttgtttgcaatgtgtacctccgatatgtgtgctgttggtttgtagtttctgcggttatatttgtactccttagtgtcaagtgtttgtgtctatcagtgtgtcacaataagaatcgacctgctgaggtcatctggagcgagatgtaaattaagaattcaggtgttcattatgttgtagaattgtccgatttgttccaatagtaatgctttcgatgtctaaaaaaaaaaaaaaaaaaaa

SEQ ID NO: 81546 - DNA, 108 bp, Oryza sativa
  Clone ID: PAT_MRT4530_81061C.1
atgtctggtaaatccggctgcagcatagaccgcctcccggtccatccatactccatcacgcttacccttgccaatgctgacgggacctcggcgaccacttcaaaataa

SEQ ID NO: 81547 - DNA, 208 bp, Oryza sativa
  Clone ID: PAT_MRT4530_81062C.1
ggaacacactaagactcattcgtgcatgggattagatggaagcggacacgaaacgagctttcttattgcgatcaaaaacacagatgggcaaccacacaggcacacatactagagggcagcaccacacaaaactaacgatgataacgatcggatgatgatgaaggcagctcgatgagatagatagataactaggccatgaaggccacca

SEQ ID NO: 81548 - DNA, 324 bp, Oryza sativa
  Clone ID: PAT_MRT4530_81063C.1
atggcgatcgggatcaagtgggagcggaagacggaggagcggcgggcagcgggcgtcggtggcagcgggtggcggcgacgacagcaggacgacgagcggatggcgactggcggggacggcgcgcaggcggcgaaagggcagagctcgctcgtccgccaccgcggcgacacaagggcggcgactggcgaggatggcgcacgggcggggacagggcggcagcgcgtgggagacgcaagggcggggatagggccgccgacggcggatctggagctaaaaagtcagccaaacactttttcaatgggtatctactcccacaggagctag

SEQ ID NO: 81549 - DNA, 1799 bp, Oryza sativa
  Clone ID: PAT_MRT4530_81064C.1
atggcggtgctgctccgcaaggtgtggggctccgtgctggcccgcgcggcggcgggggcggcgccgccggaggccttcgccgccgccgcctccccgcgccgcccgcaggccgccggggagtacggctcgctgggcgcgctcgacgttctcccgatcgacgtgctcgcgcagatcctgcgcctgctcggccccgccgacgccgcgcggtccaccgccgtgtgccgcgcctggcgcctgctcgcctccgacaatggcctgtgggccttcttcctccgcctcggccccgatccgtgggagctcgtcgtcttcgccgagacccacctcggcgctggcccggccttgcaccccgggctgtactacgatagctcgccgcagctttcgttcaagcatgtttacacccgtcgagcggtggttcctggttcgattatagtcgatggtggatcgggatattgtaagtacggatggagcaagtatgctgctccatctgggcgttgtgcgacattcttggaatttggcaacatcgagtcacctatgtatgcaaggcttcgtcacttcttgtccacaatctacaccaggatgcaagtaaagccttctactcaaccaattattgttgttcttccactctgccactcggatgatactgagtctgctagggcttcaagaaagcaatacagggacacattatactcggttctgttcgatatgaatgttcctgctgtttgttctgttgatcaggcagttctagctttatatgctgctaaacgaacttctggtattgttgtcaacattggatttaatgccacatctattgttcctatatttcaaggtagggtaatgcatgagataggtgttgaaactgtggggcaaggtgccctcaaacttactggatttctgaaggaactaatgcagcagagaaatataacatttgagtcactgtacactgttcgaaccatcaaagagaaactttgttacgtcgcggctgattatgaagcagaaaaacgtaaagatacacaagcttcctgtgaagtagatggtgaaggatggtttactctgtctgaagaaaggttcaagactgcagaaatccttttccagccccagattggaggagtgcgtgctatgggcttgcataaagcagtatctctgtgtatggatcactgctacaattcagaagtgttcggtgatgacaactggtacaagacagtagttttatccggtggatcttcatgcttacctggtttatcagagagactggaaaaggagctccgtgaacttcttccagcacatatttcagaagggataagggttattcctcccccatttggcaccgattctgcctggtttggtgcaaaaatgattagcaacgtgagcactttcacggaggcatggtgcatcaagaagaagcagtttcgccagaagactcgtcgcaatggtccatcttttgtgaatgtgtggtaatagagccatataattgcaatacgattgcacgggaagagtccgtgatgaggggaaataaacatggggctgtctgttagcttttctccatatccagagtacggtacatagcaatatagcctagtcccaggtgtatagaacaaaagtgaagtccacattgtgtagaaatggactacaggtgaatacataatatactattgtttttattataggatgttgtagaaggaaatgctccaacacgatgtacggacgtgaattttgttgtcgattggcaaaagagacctgctgttgtttgttgtgaaagtatatcttatataaaaaaaaaaaaaaaagagcccacgcaacaa

SEQ ID NO: 81550 - DNA, 403 bp, Oryza sativa
  Clone ID: PAT_MRT4530_81065C.1
ctgacgcgtggcctgttcatatacctggaaggcctatttttccttcgtacccgcttccagctctgcggatggacgatgatgaaatctcttccaaagcaatcggaggttcaacaggagaaatccttgaatctaatgcccaagtactgagtcaaatttgaaccaacctgagtactatgcagatacaggataacatctgtctactgtgccaaactagacacaatatactcatggtctcgaacgagataaatgatgctgcacatgtcatgaagcagatgccaccggtacacgtgaagattaacgaggagctagtcaactcaatgctaggcacgccaactgtacctatacacaagtgaactagtgatagctaatgaacatatattctcagtagtctgaagagctcttt

SEQ ID NO: 81551 - DNA, 789 bp, Oryza sativa
  Clone ID: PAT_MRT4530_81066C.1
atggctgaaacccaaaacgaaggcatgggaaatttgccccagcagccggccggtgagatctacacgatcttcacggtcgatcccaatgacaggaaatactacgttgccgccgtcgacagcagcgacgaagtcatcgttaaggagaatacagaaggctcccgcgtcttcgatgatctccagcagcagcagccggacgcatcagccgcagactggagaacggcggcggtcgacgccggagacaggcacagtaaatctgcaggcaagcggccagctcgccgcgaagaagggccactgcaggtagtgctcgggaagcacggtgcagaaggagaacgctggacaacggatgggacgccggccacggccgacgccgacgatgaccggcgactgatcagcaggagatgctacatccagagggcgagcaacgccaatctcgtcttcaaagccgttaacaccggcggcagagacggctccataatcgagctgacagataagcccatggtgatcatggggagtgatcaagatcagttgttctgctgctggacgattgtcccggttgccggggaccacatcatcgcagatggaggtttgtcgttgagatccttaagaatggatcatccaagacttgtggcacaatcaggcctgctttccaatcaacatgacacaagatgtattacgccagacaagagcgcgtcactcagcactcagcctcgcctcgaagctacaggtgaaacactgaaagatggtaataagcaaggtgataataagaaaggaaagaagaattataattaa

SEQ ID NO: 81552 - DNA, 208 bp, Oryza sativa
  Clone ID: PAT_MRT4530_81067C.1
cggacgcgtgggcggacgcgtggggtctggcgccacacgccgtggatcggcgcccacactcacaagggccccgagcgcccgctccgccgcgtactgcaggggctcgatccgctgacaacggcgcggctgttcgcggaggcgctgcgcgtcagccagaagaaggtgaactgcgaagactgcttcattctaaagctggtggccgacccgc

SEQ ID NO: 81553 - DNA, 1050 bp, Oryza sativa
  unsure (1)..(1050): unsure at all n locations
  Clone ID: PAT_MRT4530_81068C.1
ttaattataattcttctttcctttcttattatcaccttgcttattaccatctttcagtgtttcacctgtagcttcgaggcgaggctgagtgctgagtgacgcgctcttgtctggcgtaatacatcttgtgtcatgttgattggaaagcaggcctgattgtgccacaagtcttggatgatccattcttaggggacaccaggaggggcccgcacctgcgatgatgtggtccccggcaaccgggacaatcgtccagcagcagaacaactgatcttgatcactccccatgatcaccatgggcttatctgtcagctcgattatggagccgtctctgccgccggtgttaacggctttgaagacgagattggcgttgctcgccctctggatgtagcatctcctgctgatcagtcgccggtcatcgtcggcgtcggccgtggccggcgtcccatccgttgtccagcgttctccttctgcaccgtgcttcccgagcactacctgcagtggcccttcttcgcggcgagctggccgcttgcctgcagatttactgctgcctgtctccggcgtcgaccgccgccgttctccagtctgcggctgatgcgtccggctgctgctgctgccggcgccggggacgatctgctcaggcttagtcgtcccctgcttgtctcctcctgctgcttctgctgcaggtttacatgcggtggcggcggtggcggcggcggcggacgtctgctgcttgtgttgctgctgcggctcgtcggccgtcaccatgtaccacagctggagatcatcgaagacgcgggagccttctgtattctccttaacgatgacttcgtcgctgctgtcgacggcggcaacgtagtatttcctgtcattgggatcgaccgtgaagatcgtgtagatctcaccggccggctgctggggcaaatttcccatgccttcgttttgggtttcagccatagttgacctatagcttcctgtagtttgtagctagagatcgatcgatcgagcagttagcacttagcaagcctatctagcgagatcgattatgnaatt

SEQ ID NO: 81554 - DNA, 6228 bp, Oryza sativa
  Clone ID: PAT_MRT4530_81069C.1
ttcacggaatctacagaagggaagaatcctactcgggcagaactgggtcattggcgtatcgtatggggtctgatacctccgagtcctacgtggagacctctcgatctacaatataaaagggacctcccggggagggtttaggacatcgaatctcagagccaacacaacctacacagcctatgaaatccttgtaccaacgtaccccaataccctctatatccggtctacgggtatcacccgtcgacagtggcgcgccaggtagggggccttggtactcaaggttctactactatgtcatccagtttcgtcgacaacaacgtcagcaccagcctcagccaagtactccctgcttcaacaatgctggtatggactcaagtcggcgaaatcgtcttcccggtttacaccacgacgccgatctcaaccggtcctccaatgaccggagacgagaacgcagtggctacgaaccaaggcgattccatgtcgaaaaatcctcccgtcgagacggagaacggaatatcgacgacatccaatctcgagaaggattctgatacggccaaaccttgtccttccgacatgaaccacgagttgacaaagataacttccgaagccacaaggtcttggtgtcctatccacaaaactaagaaacacactctgcaagattgctgggttttcctcaacgtctgtgctgaaattcgcgcctgcaaagaacgtggaattcagcgtacttctccaactcgggatgtctattgtcctattcacaagacaaagaatcacgacctctcgagctgcaaagtctttctcggcgccatgaaagctccgtctcctaagtcatatgtccccatcagggataacggcgaggaacaaggagcaactccaacttcagatcgattcgttggggtaatcgatatcgatcctcacgaaccatcggtcttacatctcctcgaggactatgggtcatcgacaacgagcgcgccgcgggaggtattggctatcgatgacgttggcacgtcagctgtcaccgccggcaacagtggcgttgccgccactgttccgcctccggccgcctctgccgcgtcccctgtgcgccggccaacgtcgccaccacctctcccggcaccggaactccatcctcttccccggccaagccacggcatcgcccgtatttcgccggaacgccgtcgcgcgcgccgcctctccctcggtctcgtcggcacccactccggcagcccctttcgccgtgccagtgcgccggccgacgtcgccgtctccacctccggcatcgcagcggcaaggtcgccctcggcctcgcctccccttcgaccgaacccctccgcggtccatcgttgtcgtctccgttcgttctcgtcgtcgacgtcccgtcggtcgcccggctcgtcgtctcgcggcgccgcctccgtcgtcggcatcgcagcggcgtgttccacgccatccttgtctttatgcagccgttgtaggctgcccacgtcgcctcctcgccggccccggtcgtcgtcgtcgtcgccctctcgtcgttcccggtcgtcgtggcgttcgtccctccgtcaagccgttctcgttcatcgtcctcgcttcgtcaagtgccgcagccccttcatcgtcttcgtcctcgcctccgcgtcgtcaagcctcgtgccggccgtgtcttgccttcgttcaaggatgtagatgcttcgctgattaattaggcaatattaggtggttttataactttagactttgggaattctcatatcatttggacactatggaatagttggcttatctgcggctcggtagtcgagatgtcatggcacagggctggtgtcctgctgctaggggctcaatcctgcctgcctatcccgggggttccggccgtaggtggggttgggtcggtactcttgtttatggctaggatgggttgggaactatgtcacgtcttccgtccgtataccgacgagctaggacctagggtcgggttgccagttcagtctgaatcatcgtaggccttgggttaaggcaggttcgtgagggttcacggccttgattaataacactgtgtaactctaggatcgtctttataaaatggctttgggcaactaagtgacttttaaatgctgttttctgcaaaacttaaccgttcgggaaaatgtatttttctcggtcgcgacatcagcgcacgccaatgcagaagcagggaatcaatcgactactccagcccagcacatcagggccgttcaagcgatactgagggaaactccttacgatcccgttttgaacattgacctcgagcgttggacagaacgactacgggaatcggtgactaacctcagcaacgcgtttgaagaagccgctaccgcagcacaccatggtgccccatacacaagacggacagacattctccagaagattggcttgttttcaaaaagttgctcgagaagcacatggcatttgaaaaaggcaagcgagtacgcgttgttgagacgaacgaagagacggctcctcacgaaccggactcaacgtatccagactctgacctccacgtctcacacatcttcggcggttccacaacgacgatatccgattgtggtcgaacccactattcggaacatcaaggtagtgcgagttctcattgacggtggcagctcaatcaatcttcttttcgccagcacttttgacgcgatgggaattccgcaaaacgagttgacaccaactgatcaacccttccatggaattactccccaatcatcgtccagacctttgggcaagattattttgcccgtgactttcggccaagccaacaacttccgaacagaacagatcacctttgatgttgctgaattcgatacagcttacaatgccatcatcgggagaactgcacttgcgaagttcatggccgcatctcattacgcatatcaagtgcttaagatgccggaccgaagggaacaatcaccattcaggggaacacaaagctggcggtgcaatgcaacaagcggagcctcgacatggtcgagcaaacgcccagcccacccgccacgactgagccacccaagaaagtgaccaagacaaacaagacgccgaaaccagacggtgccatcaagattgttccactctccagtgccaaccccgacaagaccgaactcgcgctcattaccttcctccgcgacaatgccgacgtgttcgcttggcagccgtccgacatgccgggggtccccagggaggtgattgagcacaaactcatggtgcgacccgatgctaagccagtaaaacaaagactgcggagatttgcaccagaccgaaaacaagccatacgagaagagctcgacaaacttctcaaagctggcttcatcagagaagtacttcatccaaagtggctagctaatccagtcatggtgcggaagggcaacggaaaatggagaatgtgtgtcaacttcaccgacctcaacaaggcgtgccccaaggatcactttccactccctcgaatagaccaactggtggattcaacagccggttgtgagctattaagcttcctcgacgcttactctggctaccaccaaatcagcatagcaaaagaggacgaagagaagacagcattcatcacgccgtttggggtattttgctatgttaagatgccgttcggactgataacagctgggaatactttccagtgcacggtccagggcgtacttagcaaccagcttggcaacaatgtcgaggcttacgtcgacgacatcgttgtcaaaaccaagacaggcgactcattgattgacgatctgcgggaaacgttcgacaacctccaacgatatcgcctcatgctcaatcctgagaagtgcacgttcggagtaccatcgggcaagctgctcagattccttgtctctggcagaggaatagaagcaaaccccgagaagatcaaggcaatcgagaacatgaagtcgcctacaagactcaaggaggtacaaaagctaaccggatgcatggcagcactaagcagattcgtcgctaggatgggagaacgaggacaacctttcttcgctctgttgaagaaacaagacaaatttgtatggacacaggaagccgaggaggcattcattgcactcaagcgctacctatctaacccccctgtacttgttgctccccaacctaatgaagaattattcctctatattgctgccacgccatattccgttagcactgtcattgttgtcgagagagagaaagtacagcgaccagcttattacgttagcgaagctctccacgacgcaaagacaagatacccacagatccaaaagctgctttacgcagtcatcatgacatcaaggaagctacgccactactttcaagcccatagagtcacagttgtctcctctttccctcttggcgaagttgtgagaaacaaagacattgtcggccgcattgcgaaatgggtagtcgagctgagccagtttgatgtccactttgtgccacgaacagccatcaagtcctaggtactcgctgacttcgttgccgattggactatgccagataacaaatcagacaaccaaggcgacaatgaaacatggacaatgtcgttcgatggcgcactcaacagccaaggagcaggggcaggatttatcttgacgtctccctccggagatcaattcaagcacgcaatccacctcaacttcagggcgaccaataacactgcagaatacgaaggactactcgccgggatacgagctgcagctacacttgaggccaagggactaatcgtcaaaggggactccgagctagtcgcgaaccaggagcacaaagattataaatgctctaactccgagttatccaagtatctcgcagaagtcaggaagctagagaaaaggttcgatgggatcaaggtccgacacgtctaccgcaaggacaacgtcgagccagacgacctagcacgacgtgcgtccagatgagaatcgctcgagcccggcacttttctcgacatcctgacgaagccatcggtgaaagaggttagcggcgaagtcagcccgaacacccccgacattagctcggaggtcaccgaggcagaacgcgccgttgccgacatcgaaacgacagacgactggcgcatcccactaatcaaattcatcagcaacgaggagttgcccgaggacgatacagaggccgagaaaataacccgtaaatcaaagatctactgtatggtcggcaacaatctatacaagaaagcgccaaacggggtacttctcaaatgcgtctcgaccgatgacggcagacacctcctcctcgacatacatgaaggcatatgtgggtcacacgccgctggtcggacattggtcggcaaagcttttcgacaaggctttttttggccaaccgcccttaaagatgcatgcgacatgtaaacacacaaagctacccgcgcaggcgctccagactatccctctgacttggccattcttgtgctgggggctagatttacttgggccattcccacaaggacaaggcggctacagattcctattcgtggcgatcgacaaattcaccaaatggatcgaagcagtacccacgggggaaatcaaggccgacaatgccatcaaattcatcaaagggatattttgcacgtacggactaccacaccgcatcataactgataacggctcccagttcatcagcgccgatttctagaactactgcatcgggctgggggtcaaaatatgcttcgcctcggtctctcaccctcaaagcaacggacaagtcgagagggcaaacggcatagtactacaagggatgaaaaccctactatgggccgtacgcaccacaccgacaacgtctaataaggaaacacccttcttcttcgtgtacggctctgaggccatgctcccaggcgagctacaacatcagagtacatgagtacagaagtactccaacgagaaccaggatgagcagcgagatatcgatgtaaatcttctcgaggagcatcgggaacgagttgccgtccgagcaaccaactatcaacagaccctccgccgttatcacgagaagcgcatccgtgcacgcatactttcgatcggcgactatgtcctccgacgagttcaaagccaagcagggcgaaacaaactctcacctaaatgggaaggaccttacacgatcacacaagtcttgcggccaggcgcattcaaaatcacagacggcaacagtcgcgaattagcaaattcttggaacattgaccaactacgtaaattctatgta

SEQ ID NO: 81555 - DNA, 205 bp, Oryza sativa
  Clone ID: PAT_MRT4530_8106C.1
tctttatgattatgttgatcccatgcgcatgagtggtcagcgacctaatgaagatctttactcgaacagaagagtataagttcagcaccggagaagcatctgattctgaattcggtttgctgctgcctggggagaggaaggttaggttcctggctcctcctgactgacttaatttcctttcgttgtctttctccaccaggggtgg

SEQ ID NO: 81556 - DNA, 369 bp, Oryza sativa
  unsure (1)..(369): unsure at all n locations
  Clone ID: PAT_MRT4530_81070C.1
gnnnnnggggnnnnnnnnggnngnnggnggnggnnnnnnnnnnntttttttttttttttttcctcccgggggggtaactttttcccgaaattccgggttctttaccagtttcctttttttgacccccttttttttgggccaaattttttgttaaacttggggttttaaatttttccccccccggtttattacccctttccccattggattgggggccccccgccaagccgttttgctttttaactattttggcggccaaaaactttgttttctgggaccccccatctccttgttcgcccatttttttcgcctacttaaatctttgccttatttttgggggctttctttttagcctttttaaacggttcc

SEQ ID NO: 81557 - DNA, 4338 bp, Oryza sativa
  Clone ID: PAT_MRT4530_81071C.1
atgtcgtattacgtagatcctcgtaccagcgtaccccaataccctctatatccggtctacaggtatcccccgtcgacagtggcgcgccaggtaggggcacttggtgctcaaggttctactactatgacatctagcttcgtcgacaacagcgtcaacaccaactgcaaccaaggagttctcacttcaacaacgctggtgtggactcaagtcggcgaaatcgtctttctggtttacaccacagtgccgatctcagctggtccgccaatggccggaaacgagaacgcagtggctacaacccaggacgactccatgtcgaaggatcctcccgccgaagcggagatcggaacgtcgacgacatccgagcccgagaaggatcctagtgaggccaagtcttgtctttccgacaagaatcacgagccgacgaggatgacttccgaggtgacaagacatccgcgaagggcgtacaatcgccgacaacccaccgcccccagcgctaggtgtagagctttcggtcgttcacttcgagatgtccgatggcctaaaagattccggtctggagcaatagagaaatacgatgggagcaccgacccagaagaattccttcaggtttactccacggtactctatgctgccggagcggacgacaacgcattggcaaattacttgccaacggcattgaaaggctctgcacgttcatggctgatgcatctgcccccgtactcgatttctttgtgggcagacctgtggcagcagttcgtcgccaacttccaaggaacttacaagcgccacgcgatcgaagatgacctacatgcgtcgacacagaacccaggtgaatccttgagggattatgttcggcgctttaacgagtgcagaaatacaatccctgaaatcaccgatgcttctgtaatttgcgccttcaagtccggtgtcagagatcgctatactactcaggagttggcaacgaggcgcgtcacaactactcggagattgttcgaaattgtcgatcgatgcgctcatgcggacgacgcagtgagacgcaagaatgacaaaccgaagaccggaggagagaagaaaccagccaaggacgcacctaaatcaagcaagaagaagaatcgcaaaagtgggaaaaggaaagctcaagcaaaagttctcgcaacagaatacgcggaccccccccccaagcgcccagacccacaaggcagcgacgtgaagaaaatatggtgccttatacacaagtcagacagacactctctagaagattgcctcgttttcaaaaagtcgctcgcaaaacacatggcattggaaaaaggcaagcgaatacgtgtggttgagaaggacgctgaggcagttactcaggaatcagactcggcatatccagactccgatctccatgtctcgcacatcttcggaggttccacggcatactcctcaaagcgagaatacaagaaggtggaacggcgatatccgatcgtggtcgaacccactattcggaatatcaacgtcgcacgagttctgatcgacggcggcagctcaatgaaccttctctttgccagcgccttggacgcgatggggatcccacgaagcgagttgacacccaccgatcaacccttccatggaatcactcctctgtcatcgtccaaaccattgggcaaaattacgttgcctgtgactttccgccaagcaaataactttcgaacggaacagatcacctttgatgtcgctgaattcgttatagcatacaatgccatcattgggagaactgcactcgcgaagttcaaggccgcatctcactacacgtatcaaatgcttaagatgctgggaccgaagggaacaatcactattcaagggaatgctaagctgacagtgcaatgcgacaagcggagcctcgacatggtcaagcacacgctcagcccacccgcaatagctgagccacccaagaaaccgtccgacatgctgggggtacccaaggaggtgattgagcacaaactcatggtgcgacccgatgccaagccagtaaagcaaaaactgcggagatttgcaccagatcgaaaacaagccatacgagaagaactcgacaagcttcccaaagccggtttcatcagagaggtactccatccagagtggctagccaacccagtcatggtgcggaaggccaacgggaaatggagaatgtgcatcgatttcaccgacctcaacaaggcgtgtcccaaggatcatttccctcttcctcgaatagaccaactggtggaatcaacagccggttgtgagttgttaagctttcttgacgcttactccggctaccaccaaatcagcatggcgaaagaggatgaggagaagacagcattcatcacgccgttcggggtatgctgctacgttaagatgccgttcagactaataactgcaggaaacactttccagcgcacggtccaaggtgcacttagcaaccaattaggaaacaatgtcgaggcctacgtcaatgacattgttgtcaagacaaagacaagcaactcattgattgacgatctgagggaaacgttcgacaacctccgacgatatcgcctcatgctcaatccagagaagtgcacatttggagtaccatcgggcaagctgctcagtttcctcgtctctgaaagaggaatagaagcaaatcccgagaagatcaaggcaatcgagaacatgaagtcgcctacaagactcaaggaagtacagaagttaaccggatgcgtggtggcactaaacaggttcgtcgctaggatgggagagcgaggacaacctttcttcgccttgctaaagaagcaggacaaatttgtatggacacaggaagccgaagaggcattcattgcactcaagcgctacctatcaaatcctcctatacttgttgccccccaacctaatgaagaattatttctctatattgccgccacgccatattccgttagcactgtcattgttgtcgagagagagaaggtgcaacgaccagtctactacgtcagcgaagctctccacgacgcaaagacgagatatccacagatccaaaaactgctttacgcggtaatcatgacattaagaaagctacgccactacttccaagcccacagggtcacagttgtatccttcatccctctcggtgaagtagtgagaaacaaagacgttgtcggctgcatcgcgaaatggatagtcgagctaagccaatttgatgtccgctttgtgccacgaacagccatcatgtcccaggtacttgccgatttcgtagccgattggactatacctgataacaggtcaaacaaccaagtcgacaaagaaacgtggacaatggcattcgacgacgcgctcaacagccaaggagcaggggcaggattcatcttgacatcaccttcgggagatcaattcaagcatgcaattcacctcaacttcagggcgaccaataacacagccgagtacgaaggactactcgccgggataagagctgcagctgcacttggagttaggcgactaatcgtgaaaggggattccgaactaatcgcgaaccaggtccgacatgtataccgcaaagacaacatcgaaccggacgatctagcacggcatgcatccagacgagagccacttgaaccgggtacccttctggacgtcctgaccagaccatctatgacagaggcaagcgacgaagatagcccggtcgcccccaacatcagctcgggggctacagaggcagaacgcgccgttgccgacatcgagacctcaaatggctggcgcaccccactcattaaattcataggcagcgaagagttgcccgaggatgacgcagaagctgagaaaatatcccgtaaagcaaaagtctactgtatgatcggcaacgatctatacaagaaggcaccaaacggggtactcttaaaatgcgtctcgtccgacgacggcagacacctcctcctcgacatacatgaagggatctgtgggtcacacgccgccggttgcacattagtcagaaaagcttttcgacaagggttcttctggccaaccgccctcaaagatgcctgcgacatggtccagcggtgtgaagcctgtcaatttcacagtaaacacataaggttacaagcgcaagcactccagactatccctctcacttggccgttctcgtgctgggggctagatatactcgggccattcccacgaggacagggcggttacaggttcctattcgtagcgatcgacaaattcactaagtggattgaagcgacacccacgggggaaatcaaggctgacaacgctatcaaattcatcaaagggatattctgcagattcggattgccccaccgtatcataacggacaacggctcctag

SEQ ID NO: 81558 - DNA, 1463 bp, Oryza sativa
  Clone ID: PAT_MRT4530_81072C.1
gcacgaggggttgattcttctgatatgataatagaacattcgggtgatatcgaaattgaaaaatgatgggaaaaaaaaacaattctccaccaatagaaattctagtgaaagtaagctactaagcttggattatcactggtgcatggccgccgccgccacccgcgccgtccgccgcctcctcatcgcctcgcggagtctccacgcaatctcttccgagggagcggcgagggaggcggccacgagcttcgtccaccccgccgccgtcgtccaccccgacgccgtcgtcggacagggtgtctcgataggcccattttgcaccgtgggagcttcagcgaggattggtgacgcttgtcagttacacgctgggagccatgtcatgggagataccgagctaggggagagatgtgttgttctcactggcgctatccttggttcagacattcctgggcaaaccattatcggtgaaaacaatgtcattggacaccacgctgtagttggtgttaagtgccaagatctcaagtataaggttattggtgacaataatcttataatgggttcatgccatatagcacatgattgcaggattggcaacaataacatatttgctaacaatactctatttgctggccatgttgttgttgaagattgcacccatactgcaggggctgttgttgtccatcaattttgtcatattgggtcattttcatttctaggtggaggctctgtgttcaatttgaatcagatcgcacaagatgtgccaagatacatgatggttgcaggtgatagagcagagcttcgtgggctgaatcttgaaggtcttaagcgcaatggtttctcagaccaagaggtacggatgttgaggaaagcttatcaacaagtatttatgccatctattaatagtcagagtagctttgatgagagacttgctgaataggaagcatcgctcattctttggactgggcatgtttcacatcgtgttcttgaaagaagtcgcccattctttgactgttaaagcaagagtttctcgttgatattctaatacctgaacacaggaatacatcatacagatgttgaatgccccttcactccagatttgaccaaatactgtcgcatctggatataggacacttggaagttgcgtgtcgtttctttttcttttttattttctcttgagatgagatgagaagtggtgttcgtggatgcacaaatgctccttagtcgttgtacatatatttggcgttgcctcggttttgttcatcctgtacagtgtatgtatgtcgcctcctggatctcaggctcgaatttgtattgtctgaacgatgttactgctagtgctgagatggtccaaaatttgcatttggtgttcttcggacgacatacagtttgactattaatgctgaatctgcttgcttcagaaaaactaccatatatatctatcatattttccttttttttctcttttt

SEQ ID NO: 81559 - DNA, 597 bp, Oryza sativa
  Clone ID: PAT_MRT4530_81073C.1
atggccagatgtctcgagcacgcagctcatttagatactaaaaggaaaagagggttgctgacgtcatcaaaggggaggggcggcgccggcaagcgggccccaccggtcagcggcacaagggcgccggtccaccgtggaccgggaccaccgaggcagtccaccaccggtccacgggaaccgacggtccggatcggcccaagccgatcgggcggccaggggcggcgcggctggggcacagcacggcacaaagccggcctagctgagccatggcgcggcggtagcgcggtctccggcgacggcgaccgacgggcggcgcgggagaggtggcacgcatgggcggcggcggcgcacgagatcgacgcgccaccggcgcggcagcgcgcacgggagacagaggagggaggcaaggagggagaggaggagctcaccaaggacgcggcgacgaggggcggggaaaggcagggagctcggcgtcggcgctcctcgggacgagggcggaacggcggcccggcggcgttccgcgagcgggaaccggcggacggcggctggaaggaccggcgcgaggggaaccgtgtcccggcgggatcctggccgtga

SEQ ID NO: 81560 - DNA, 1743 bp, Oryza sativa
  Clone ID: PAT_MRT4530_81074C.1
atggctgacaatgagaaaggcaataaggtcagaagtcaggacattggtacctcaagctcccgagtgaatgaagcaccagacaccagttgtgtggcagtggtccaacacctgattaaccagaacaaattgcttatagagatactacagcagcatcggatgccaattttgaacccgagtcagatgcaacctcaagtacagttggaggcagtccaagcactcacaccacaagtcagcgcaccgccaacatcccagaaggcccctcatgccatgccacatgttgacccaaaagaagcaagtatcatctgttttatgtgtgatgagcaagggcactacgcaaggaactgtcctcagcagaaaagaaaagcaccaatgcgaaccgaagatgaagtccgtaagatgatcattaccagcacggaatggcctccaccaggaatgacaaaacatcagagaagaaattccttccgaggtgcacaacagttgacagagcatcttttagctaatggaggtagagtgtctgatagtgaagattcagatcaagtctcctcagatgatgaagatgaagtagaacttaaggcatgccctcgttgtggagaaatcggtcatgttgccagctcgtgtgcctctacatgcgttcattgtgaggaagaccatctacccgacaggtgtccaacgagcaggatcacttgtttcttttgtgaaggaactgatcatgtaccaaaagattgtcaattcagttttctgctgacaaagaagatggccaaccaacccgccagttccaacggagagaagcatcaaggcaacacaaatccccgccaagatcaccgtttcagcctaactccagtgccaggacagaggaatcgaaatgagaaaagaaaatgccgagtccgggaagacatctgttgcttcaattgtcaaggaatgggtcatttcgccgacaagtgcccaaaaccgagaaacatagctgccggcacgtcagtccacgcaactccctgcaatcagaagcttgctcctcaacgaattgtcatccatgcatcccgaagcagtcctatagcccgcgttgcaacagctccaattccaatgaatgcactaccacaaggtgtcaatgctcaatttcagccccagccaccagctgacaagacaggggccagtatctgcgttgtacctttggaagttccaatacagcagctgagaaatcaagtacaagatgaagaacccgagttgaagaagggcattattccaaaaactgtccccaaccaaggcaaaatcgacctccacattaccgccaatttacacgaagcagacattccaatcgtattgtggtcactggagcaaacgccgtacccgtttcaccgaaaggcagcaagccaaaggacctcatcgtccccagaagcgtccgcaatccacattaaagaataccacctgttagacataagccgaaagaagattgataaaaagagattggcaaagatgttctctagcatgaaagaagtgggccgaaaggttgactccgaagatatgaatcatgagaagttctggaacggaagcatcactgcactaccgcaacctagtctgagtcagccaaaaggtgcaccctggtccaagtcaggtgaagagaagattccatccgcaacaggaggtcaagccaagcagttccgagtggtaaagttttgctggaagttcgtcaagacgcaacggaagaagtcagacaagaagagaagaccgcccaacctatcttcttgctag

SEQ ID NO: 81561 - DNA, 754 bp, Oryza sativa
  Clone ID: PAT_MRT4530_81075C.1
atggcgccctgcaaacccgctccggctgcgataactggccctgagcctaaccagattagcgaagagcttacgtgctttcttggggcttcaatcttcaaggaggaggatttggcgaagctcgtgacttccagagctgtgaccgacgggcagaccggcgtatcctcgcccctacgacaatcagaccggtgtattcacggccttcatcgacgcaaggcttcggttcccctgcgacaacctactcccggaggtgctttggcggtaacaggtggagctacctcaactcagaccttcgtctttggtgcgacttgccattttcgactgggcatgcgggtcggcagggtttgttgaaacggcggcggtcttcggctcgacgacggcgacgatgctccggcggtctccgatggtggcgaagcggcggacgaggacggcgacgacttggcgaccacgacgacggtcttcccgagcgacggcgacgtctggaacggcggcggcgcacggctggagtgacggcggcgacggcggcgctagggcacacggcgctagagcgctacgggcgacgagaggcgaaggcgaaggtggcggcgggtagaggagacaccgggggtccttttaaaggggctaggaggcggcggcgaaggcccacggcgaccggcgacgagaaggaaagtagaggagatcgagaagatcatttcccctctattgattcggccggaaacggaaaggaacggctggatttggaaggaaacggcggcgg

SEQ ID NO: 81562 - DNA, 219 bp, Oryza sativa
  Clone ID: PAT_MRT4530_81076C.1
atgctggaggcagggcgtgtgctgttcaagaacctcgccaccgacttcgaggaccgcctctactcggtccccctcgatgatgtgcgtaggccattggcgccgaggtggcggcactacaccctccatcggggaggtgaaggcggcagcggcgaagtgagggggaggctgcagtgcggtggcactactccacccgtcgttgcctcattggcgaaaagataa

SEQ ID NO: 81563 - DNA, 1965 bp, Oryza sativa
  Clone ID: PAT_MRT4530_81077C.1
atgccgggggtccccagggaggtgatcgagcacaaactcatggtgcgacccgatgccaagccagtaaagcaaagactgcggagatttgcaccagaccgaagacaagccatacgagaagagctcgacaaacttctcaaagctggctttatcagagaggtacttcatccagagtggctagccaacccagtcatagtgcggaaggccaacgggaaatggagaatgtgtgtcgacttcaccgacctcaacaaggcgtgccccaaggatcacttccctcttcctcgaatagaccaactggtggactcaacagccggctgtgagctgttgagtttcctcgacgcttactccggctaccaccaaatcagcatggcgatagaggacgaagagaagacatcattcatcacgccgttcggggtattttgctacgttaagatgccattcggacttataaccactgggaacacgttccagcgtacggtccagggcgcacttagcgaccagctcggcaacaacgtcgaggcatacgtcgacgacattgttgtcaagaccaagaaaagcgactcattgattgacgacctacgggaaacgttcgacaatctccgacgatatcgcctcatgctcaatccagagaagtgcaccttcggagtaccatcgggcaagctgctcggcttcctcatctctggcagaggaatagaagcgaatcctgagaagatcaaggcaatcgagaacatgaggtcgcccacaagactcaaggaagtacagaagctaaccggatgcatggccgcactaagcagattcgtcgctaggatgggagaacgaggacaacccttctttactctgctgaagaagcaagataaatttgtatggacacaggaagccgaagatgcatttattgcactcaagcgctacctaccaaatccccctgtactcgttgctccccaacctaatgaagaattattcctttatattgccgccacgccatactccgttagcactgcaatagtcgtcgagagagagaaagttcaacgaccgcggtgtgaagcctgtcaattccacagcaagcacacaaagctacctgcacaagcgctccagaccatccctcttacttggccgttctcgtgctgggggctagatatactcaggccattcccacgaggacagggcggctacaagttcctattcgtggcgatcgacaaattcactaaatggatcgaagcagtacccacgggggaaatcaaggccgccaacaccatcaagttcatcaaggggatattttgcagatacggactaccgcatcgcatcattaccgacaacggctcccagttcatcagcgctgacttccaggattactgcatcgggctgggagtcaaaatatgcttcgcttcggtttcccatcctcaaagcaacggacaagtcgagagggcaaacggcatagtactacaagggatcaagactcgtgtctacgacaggctcatgtcacatgacaacaaatgggttgaagaactcccatcagtactatgggccatacgcaccacaccgacaacgtccaacaaggaaacacccttcttcctcgtgtacggctctgaggccatgctccccagcgagctacgacatcagagtacacgagcacagaagcattccgacgaggaacaggaggagcagcgaaacgacgatgtgaatctactcgaggaacatcgtgaacgagttgccgttcgagcagccgcctaccaacaagccctccgccgctaccacgagaagcgcatccgagcacgcatactttcgatcggcgactacgtcctccgaagggttcaaagccaagcagggcgaaacaagctctcacccaaatgggaaggaccatacacgatcacacaagtcttgcgaccaggcgcattcaaaattgcagacggcgatggccgcgagttggcaaactcatggaacattgaccaactacgtaaattctatgtatga

SEQ ID NO: 81564 - DNA, 996 bp, Oryza sativa
  Clone ID: PAT_MRT4530_81078C.1
tggatccccgggctgcaggctgcactctgcaggcaggcaggcacccaggcctgcagctcgatggcgccgccgccgccgtcgccgccgcgatctctcacctccgtctccctccggactcctctgagccctctcctcttcctacggccagcttcttgcaatccatcggcggtctccggctcctgcagcagcggagcatgccgcggcgtgcgctgctcggcggcgaacaagccttctccttccaccgctccgggcaccgaggtaagctcgacctccatggcaaagataaggagtgaggtgctgtccccgttccgctccgtgcggatgttcttctacctcgcgttcatggccagcgccgggctcggggccctcatcgcgctcacgcagctcatcccggcgctgtccagcccggcgagggcggccgccgcgggggagacgctcaatggcctgcgcatcgacgtcgcggcggtctccgtcttcgcgttcctctactggcgcgagagcaaggccaaggacgcgcagggccgcccgcccgtcccgctcggcgagctgaggggcaccgcgcggctcgtcatcgtcgccggccccgcggcgttcgtcaccgagtcgttccgccggagcaagccgttcttgaaggacctcatggagcgcggcgtgcttgtcgtgcccttctcgacggacggcaacgcgccggacctgcagttcgacgaggccgacgaggaggaggaggaggcggcggcggcggctgggaagatgaagcggaggctctggcagctcactccggtttacacttctgaatgggccaaatggctagatgagcagaagaagctagccaacgtgtcacctgattcccccgtgtatctctcgctccggctggacggccgcgtccgtggcagcggcgtcgggtacccgccgtggcaagcgttcgtggcgcagctgccgccggtgaaggggatgtggtccggcctccttgatgggatggacgggagggtgctttga

SEQ ID NO: 81565 - DNA, 2850 bp, Oryza sativa
  Clone ID: PAT_MRT4530_81079C.1
atggagtctatagatggaaggagtcctactcggatagaactgggttgtcattgtatcgtgtcgggtccgatgtctccgagtcctacttggagaccagttgacctacgatcctcataccagcgtaccccaataccctctatatccggtctcaacgtccatgctgaaattcgtgactgcaaagagcgtggaattcagcgtacatctccaactcgtgatgtctattgtcctattcacaagacaaagaatcacgacctctcgagctgcaaggtctttctcagcgccatgaagacgccacctcctaaggtccagcagtcacgcatccccatcatggataaggacaaggagcaaggagcgacgccgatttcagatcgatttgttggggtaatcgacatcgatccccacgaaccatcagtcctgcacctgctcgaagactatggatcatcgacaacgagtacgccgtgtgagatcgaggaggccgttcaagcgaagaccgagaccgtgataaccgccacaaccgccactatcacgatgatcacgaacggcgggtgctgggcgatactggtcgaggacgtcgccacaatgacgacgatgatggagatcggcgccgagacaacaacgggagacgacgacaggattctcgagaacccggccgacgtcctcgtaatcaacccgggcgaatccttgagggattatgtttggcgctttaacgagtgcagaaacacaatccctgagatcaccgatgcttctataattcacgctttcaaatccggtgtcagagattgctatactactcaggagttggcaacgaggcgcatcacgactacttggagattattcgaaattgtcgaccgatgcgctcatgcggatgacgcactgagacgcaagaacgacaaaccgaagaccggaggagagaagaaaccagccaaggacgcacctgagtcaagcaagaagaaaaatcacaagagtgggaaaaggaaagctcaatcagaacgccttggacgcgatggggatcccacgaagcgagttgacacccaccgatcagcccttccatggaatcactcctcagtcatcgtccaaactattgggcaaaattacgttgcctgcgactttcggccaacatacaatgccatcattggaagaactgcactcgcgaagttcatggctgcatctcactatgcatatcaagtgctcaagatgccaggaccgaagggaacaatcactattcaaggaaacgctaagctggcagtacaatgcgacaagcggagcctcgacatggtcgagcacacgcccagcctgcctgccatagcacagccacccaagaaaatgccgttcggactaataaccgcaggaaacactttccagcacacggtccagggcacacttagcaaccaactcggaaacaatgtcgaggcctacgtcgacgacattgttgtcaagaccaagacaagcgactcattgattgacgatctgcgggaaacgttcgacaacctccgacgatatcgcctcatgctcaatccagagaagtgcacgttcggagtaccatcgggcaagctactcggctttctcgtctctggcagaggaatagaagcgaatcccgagaagatcaacgcaatccagaacatgaagtcgcctacaagactcaaggaaatccaaaaactgctctacgcagtaatcatgacatcaagaaaactacgctactacttccaagcccacagggtaacaattgtctcctccttccctctcggcgaagtcgtgagaaacaaagacgttgttggccgcattgcgaaatgggtagttgagctaagccaatttgatatccacttcgtgccacgaatagccatcaagtcccaggtactcgccgatttcgtagctgattggaccacgcttgataacagccgaatcgaaggactactcgccgagataagagctgcagctgcactcagagtcaggcggctaatcgtgaaaggggattccgaactagtcgcgaaccaggtgcataaagattacaagtgctctagccccgagttatccaagtatctcgcagaagtcaggaagctggaaaaaagcaacgatctatacaagaaggcaccaaacggggtactcctaaaatgcgtctcgtccgacgacagcagacacctcctcctcgacatacatgaagggatctgtgggtcacatgccgccagtcggacattagtcggaaaagctttccgacaagggtttttctggccaaccgccctcaaagatgcttgcgacatggttcagcggtgtgaagcctgtcaattccacagtaaacacacaaagctgccagcgcaagcactacggactatccctcttagttggccgttctcgtgctgggggctagatatactcgggccattcccacgaggacagggcggctacaggttcctattcgtggcgatcgacaaattcaccaagtggagtgaagcgacacccatagtggaaatcaaggccgacaacgccatcaaattcatcaaagggatattatgcagattcggattgccccatcgctgggagtcaagatctgtttctcaccctcagagcaatggacaagtcgagcgggcaaacggcatagtactacaaggaatcaagacccgcgtctacgacaggctcatgtcacacgacaagaagtgggtcgatgaacttccatcaatactatgggctgtgcgtaccacaccgacaacgtccaacaaggagacacccttcttcctcgtgtacggctcagaggccatgctccccaccgagctacgacatcaaagcacacgagtacagaagtattccgatgaggatcaggaggagcagcgatacgacgatgtgaatctactcgagtaa

SEQ ID NO: 81566 - DNA, 347 bp, Oryza sativa
  Clone ID: PAT_MRT4530_8107C.1
atgtcgtcatggggcccgcggtcagagaggatgtcgtcatggcaccagcggcggccgtacggcggagcgggcgggccagcggtggagcgggggcccacaccccccttacctgcgcggcgacggggaagggcgccggcccagggtggggcccacgaggcagcggctcctcgaggagtcgtggcctcgtgggaggttgggggttgggaaaatttgggagtcgggggattttgaatccgtttcgtagcagagatggccgtgtcgacaccatggcgcgacgggacgtgaagggcgtggaccacgcgatggaacgtgagcgcatggagatagtagaccgaccgagaccgtga

SEQ ID NO: 81567 - DNA, 807 bp, Oryza sativa
  Clone ID: PAT_MRT4530_81080C.1
tcatgcaccagcagaaccaccagctggcgatcccgggcggtggctcgggagtcgggacacataagatctcgtgtcgctctccacatgggcaacacgagaggtgacgccaccgccaactccctcctcccccttcttccttctctgcctcgccgccgcctgagcgggcgtaggcaaagccgcgtggccgcaaggacggcggcggcggggctgcgcccagcgtgcgtccggtggtcggggcaattgctcggggcggcggtggtggcaaccgtccagatccgcgccattctggccggatctcgtggggtggaggctggcggttgggctgagtggtggcagcggcggcggcagagcaccccgaccagatccgcgctgcgccggtcggatctggcggggatggcggctggcgatggcagccgggcttgagtggttttggtggcggcgaccagtggtgctggcggcagcgacggtggcggcaatggggaagaaggagagcgacggccgcatgcgggcatggtgggttgtgggcgacagcgacggcgtgagcagtttgatggctgcggagcaaggccggaggctgacacggcgcgaggaggcgcggacgatggcgatggaggccgacacggcgcgaggagatgccaccggtggcaacggaggccggcgcagcacgtcgaggcgcggtcggcaggtggtggaggccttcttgagggcgttgtcgtgccgccccttcacctccagtggggctatcgggtgaaaacccagtcttggccctcttgaggccttgacggacaacggcggcggtgtatccat

SEQ ID NO: 81568 - DNA, 162 bp, Oryza sativa
  Clone ID: PAT_MRT4530_81081C.1
ctaggaagaaggtataacctttagggccgggttttctaaattatcggggtcatcgtagtaatagtcataagggtcctcctcttgacccaaatctagatggattccgacagcttgccatcctttggcaaggcgcggagaatagttgctgataggcatctccat

SEQ ID NO: 81569 - DNA, 699 bp, Oryza sativa
  Clone ID: PAT_MRT4530_81082C.1
atggcttctcagctgtacacgagaaagaagggtgtctccttgttggacgttgtcggtgtgtactatgccgtttgtcctctcgaactgtccgttgctctgagggtgagaaaccgaggcgaagcagatcttgacttccagtccgatgcagtaatcttggaaatcggcgctaatgaactgggagccgttatccgttatgatgcggtgaggcaatccatatctacaaaatatccttttaatgaatttgatggcattgtcggccttgatttcccccgtgggtattgcctcaatccatttggtgaatttgtcgatcgccacgaacaggaatttgtagccggcctgtcctcgtgggaatggaccaagtatgttgagccccagcacgagaacggccaaaaccttgagcaccaaggccccctacctggcgcgccactgtcgacggtgggtacccgtagaccggatatagagggtattgaggactactctcacttgagcatgaagaagtattacctcgcgcgcattttgccttttccagcttcttcccagatggtctcaccaaaggatcagagtgcatcagggggaggagcggtggcaaggcagggtatccgcctagaggtagtgagcgggccaacaatttgggccacaaagggggaggagcagtggaaggaggcgctggcagggcagacacctggaggtagtgggtga

SEQ ID NO: 81570 - DNA, 885 bp, Oryza sativa
  Clone ID: PAT_MRT4530_81083C.1
atgtggaaggtggacaagccgcacccgcgggcgcgggcggctgacggccgggcccacttggcagccgcgagggcgcgcccgaaggcggccctcgccggcacggccgacgggagggggacgcgcccgcgccccgatggtcaccgccggcgaccaccggcgcggcggagcggcacccgagagagaggagggaagggggaagcgaatggagcggtcttcggctcaccccggtcgacggcgacgacgggaacggcagccgaaacggaggaaggcggcggcgcggttcgggacggcgagggcgacggtgctccggcggtcggcgggcgaaacgaaggagcggacgaggtcgacgacgacgcggcgaagccgatggaggtgacgccgagtggggaggaggtccggagcgacgacggcggcgaaccggagctcggcggcgacggcggagagaaggaggacggcgcgagcacgaatccgacggcgagagcgagcggcgagcggcggaaacggaagagcgaaggggggggacgattatatagcaccgggagggggagagcgcggccggagagggaggaaacgggcgcggagatctcggctccattgaagacgccggcgacgattgcgggattcaaatcggacgaatccgaggcggatgacggtcttctgcttggtatcgccctccggaggttgatggcccttggctcggcctggagtagatcggggagagacacaatttcttccatcgacgacaattctttgctgaggctgtcggtgcagagaatggttggtgctaaaggtattattgctatgattgattgcagagtcaggtgcggcaggaggagcattggtgctgtggatgatatcgtcgatgttgctgttggagctgactag

SEQ ID NO: 81571 - DNA, 1221 bp, Oryza sativa
  Clone ID: PAT_MRT4530_81084C.1
ttgacgcgcggtcacgcccccacgtcgcctgtctccggtggagtggaggtaggtacgtcccattacatcggagcgtcatccggagtccatccaagcccccctctcctccatcatcgctagattcttgtcgccttccacttatttggaccagttggattcgccatgcccaactgccatcgccgttcgattttttcttgccatcctccaccaccacctccactactccctcctcctcctcctctcccctccattccttctcctccctgctgctctcgaatcactatcctccttggaaatggtctgtttctagaattcttctgaacagctacatgaaataatattgtgctaaaaacctcatctctccctctttacatggtcatatatattgtgatcatccagtggtggattggctagtggtgaagaggggtacaacaagaactgggaaggccaggtgctgttcccaactacaccagctgcagctgctgcagaagctgatcatgggagcaacagctacaacaacaaccacaacgccttgcagcagcaagcttcctcccctaggtcttcttgcatcacctctaccacctcccttggaagcaacggcgtgctggagttctcaaacaacacttcaccacttaagatagggagccatgttgataattaattagttatgtatgaaagttttgtaactttgctctccatccttttgtgtttctcctagtgcatcagcacagcatctggagcagctttcaagaaggccaggacccaagaaccctctccggctcaagctacagttaaggtgaggaaggagaagctaggtgatagaataactgcccttcaccagcttgtctccccatttgggaagactgacactgcgtctgtactccttgaagccattgggtacatcagattcctacacggtcaaattgaggctctgagctcgccgtaccttggcaatggcggcagcagcagcaatggtggaggtggtgaggtgcaaggagaaaggaacagcatatttccagaagaccctggccagctcctacatgacaatgccgtgaaaaagagaggacagcctgatcaagtgagtcctgatgaaagctgtgaggaagcgaagacgatggatctgaggagcaggggcctgtgcctggttccggtgagctgcacggtggacgtcggcgtcgacgccggcccggcggactactgggcggcgccgccggctttcgg

SEQ ID NO: 81572 - DNA, 574 bp, Oryza sativa
  Clone ID: PAT_MRT4530_81085C.1
cggacagccacgatgacgcagcgatgacgtcaccaccggcggcggcggctcggcggctcgggcttgctgctcgccggcgaacgacggcacggcggcgcgaacggaaggcaccaacggtagcggacggcacggcgaactcaccggcgaccaaagcgacggcggaagggaacggacggcgacggcgacgaagaagaagcggcgacgctcttcggctgacgacggcgacggtgctccggcggtctacagcgacagcgaaggggcggcgaggacggcgacgacttggcgaccacgacggcggtcttcccgagcgacgcgacgtctggaacggcggcggcgcacggctggagcgacggcgacgacgcggcgctagggcacacggcgctagggcgtttccgacgacgagaggcgaagcgaaggtggcggcggaaggagaaaaggtagaggagatctcgaggatctttctcctctattgattcggccggagaaggaaaggatcggccgaattggaagcggcggcggcggcgcggcgcttgggtttcggccggaggaagacgacacctgacaggcgggcccc

SEQ ID NO: 81573 - DNA, 802 bp, Oryza sativa
  Clone ID: PAT_MRT4530_81086C.1
atttgaggcccccctttgttgagcagcttacaatccggcttctcttttcttgccatcctccaccaccacctccactactccctcctcctcctcctctcccctccattccttctcctccctgctgctctcgaatcactatcctcttccttctactgcgacgacaagcaccgccgccgcgccttggcacgacaccggcagccgccacggccaacatctccaggactcatggaaccatatcttacttggtggattggctagtggtgaagaggggtacaacaagaactgggaaggccaggtgctgttcccaactacaccagctgcagctgctgcagaagctgatcatgggagcaacagctacaacaacatctacagcaccaccacgactagccatgggagcagcacgagtgatgatgcttcccaattggcagtggctgcaaggccgtcgtcttctccatggggtggcatccatggccatcacccccaccacaacgccttgcagcagcaagcttcctcccctaggtcttcttgcatcacctctaccacctcccttggaagcaacggcgtgctggagttctcaaacaacactttaccacgtgagcacagcatctggagcagctttcaagaaggccaggacccaagaaccctctccggctcaagctacagtgaggaaggagaagctaggtgatagaataactgcccttcaccagcttgtctccccatttgggaaggagggggcctaccgcgaaggaaggcttataaagaggctcccttttcacagagggggattccctcccccttacgg

SEQ ID NO: 81574 - DNA, 287 bp, Oryza sativa
  Clone ID: PAT_MRT4530_81087C.1
ccgacgcgtgcgctaactcgtacacgaaactggatgagtgaacgataaacatcatcactctttacaaacttttaatagtgcatcatgggttgtcgcacttctccaagctttgacaaaaggcgcgtatcaccatacacatgaccgctgtgtagcccatgtgtttgtgcatgctggcctgcacacagatccagagcctaccgaatcttctacctggcgccgatctacattgattgcacatgctacactctgcggatagtgcacgaaccattacagatgtaactcctgaa

SEQ ID NO: 81575 - DNA, 320 bp, Oryza sativa
  Clone ID: PAT_MRT4530_81088C.1
gggaacgggaatttcacaaaacaaaaaggcccaacagggggtttacaacataatcttcataaaacaggaataccgatctaacccaaggaacgaaaaaaacccccccccaaaaggcgggaagggctcaaacaggccccctattttttttttttccaaaaacccacaggtctaaatttttttttcttttaaaaaacccgctatttggttggaaaaaaaccatttttggggggatcccccccaaaaagggcatggccaggggccggggccctcctccccgccaaacttggggctggggggcaaggggttgcccccgcaccccc

SEQ ID NO: 81576 - DNA, 183 bp, Oryza sativa
  Clone ID: PAT_MRT4530_81089C.1
atggcgccgcggaataacgacgagcgcgcgggccggtcgcacgtgtcatcaagatacgacgactacgactccttcctcaagtccatggtcttgggccgctcgagcccatgtggagcccatcatggtcaaacaaccagggcaatatgtcagcaatatgctgaaccttcggacaacggcatctaa

SEQ ID NO: 81577 - DNA, 816 bp, Oryza sativa
  Clone ID: PAT_MRT4530_8108C.1
gtagggtcggaaacgccatgcggcaatacagacaaactcttgttcactacggccacaacattaacaatagggagtggcgccaaagctaaattctgggagtctgcctggctccagggggtgaggcttaaagacctagcaccgttggtcttctcgacctctagaaaaaaatagaacattgcagcaggctattcaatcagatcaatggctactcaaccttaacctgccggctgaaatagcctggacaacgaaactaatagactagctcgttaatgtcttgagtgtcatccaaagtataaacctcatagataacgaggagctaggacaaaatcatgtagagtacacagcttcattggcctacaggctacaaggctcaactcctaggcacaacaacttcaaactttaatgtgctgatctagaagccctaggcgcctaggaagtgtaagacctttgcctagctgatgatcaaaaacagagtctagacttcatataggctagcaagccaagggtagccgtctggctcaagagacagccctgcatctcctcgtgggttgcggatatacaagaagaatctggagggaattggctgtttgaatgtcatataacatgttgagccctacctaatgggaactggccacgatagtacatgaatggtgagaggcaaccggaaacataagaggagtgccaaagcaagcaattcacaccttaatgctactggtctcctgggagaattggaaagaatggaatcaaaggaccttccaacacagagagctctcgacgcctagcctactatccaagatcacagagaaagcaaaaaac

SEQ ID NO: 81578 - DNA, 684 bp, Oryza sativa
  unsure (1)..(684): unsure at all n locations
  Clone ID: PAT_MRT4530_81090C.1
ccggccgggaaacaacatcataccaactcagttctcaaaatcccacaaacatctgctactacaatgtctgacgaaacgggtatgtctactcaaaatcgccttttgtggttttatgcccctctgactgcattgtgctctagccaccaaatttgaaaccgtctccgatcttccaccgtctctggccgctgccgcctctcagatggtgcagtacgccggaacctgcgtcgaactcgagacagatgaagtaaccaagcaagacaaacgccgattcgactggccatctttcaagaaatgcttcgatgattatggaggcatcgacctcgctatgctggattacaaagaattcaccatctctcgtagcgaaatcgatctcagcatgatggtccagaggatcgtggagtccttcgtcagggagttccatatcatcggatatgaaaatgttaccacgttgctccggactaccattgagaagacatttaccaacctggaagaaaaatcctcgaatgagtgtttgtatttcagcaagtctgctggcgggcaaggttcattnttgggaatatggtgtttcatatagcggtcccctaatcccgagttcggccaattcccttccacagttttatcactaccanntcaatggaggcagatgtgtctgacagaatgnatttggtgnggtctgacaggctc

SEQ ID NO: 81579 - DNA, 204 bp, Oryza sativa
  Clone ID: PAT_MRT4530_81091C.1
atgctcgtcgcctccacggaggagagccccgtcacaccgctctgcctatggctagcgcgctcgctgaagagagaagagagaagagaaggagaagaaaagagaagaaaaaaatgtgcagctgacatgtgggccccacgatgccatgtcagcaaaaccgggcaaaaatactgccgagggacctccggtgaatggtttgagagtgtt

SEQ ID NO: 81580 - DNA, 1141 bp, Oryza sativa
  Clone ID: PAT_MRT4530_81092C.1
atggagcatgtgaatcccatcttcaatgagtctggtgctctccacaagtatgagttctcactgcacactgcaacgagggttagttatgcagagccatcaatttttgcccttggcgagctgcgggattacatatatagtaaggcttttgtgtttactgatactttcacagggggatgcattgtggttctgatccacgagccagctggtcaaatttcatttgcaagggttggggatgataagtggacatggcatccatcacactctcactattctgactgcatctacattgatggtctactgtatgcactgactgcacagggagaaatccatacacttgatctcagtggccccacgatcacgatgaagatgataattggaagtttgtcttacagtaggtacattgtgcaagctccatggggtggtcttctgctagtttggagggaaattaaaatatatagtgttgatactatggggaaaaaacatgtagagatcaataacctggatggtcatgatgcctgggctaatttggagaagccttgtggaagcatgttttttagtatcttgaaggacaccatgtacttcatattttacaactacagggatagaagattgagagctggagctggaaaacattcaggaaatgatagcatccttctgaagcttgatgagataattgcaaaaataaaggtgtttgactatgctcctaagggcagaacagaacaagctgggcgggtgtgccctatcatctccaactccaaaattctgaacaagcagaacaagcagggcgtggcggggaagacgcagaagacgtggaagacgcagtggcatccttctttcgtcgaacagattggagcatccaggcttggttgcatgttcgacccgttctggcgcccttgcctgcgacctcgccatgggctgctcgggtggtctccggcgagcgctcgcggcgctggtccgggctcgcgcgctgccgcctccttctgcccatggttcctctccggtcggcgagctgacgacggcggtgggcggcgcgatttcttggctcgtcgcccagcgcacgcgttcttgcctcgccgacaagggaaacacgggtggtggtggtcggcggcggagcgtggcggaattcccggcggcagaggcg

SEQ ID NO: 81581 - DNA, 455 bp, Oryza sativa
  unsure (1)..(455): unsure at all n locations
  Clone ID: PAT_MRT4530_81093C.1
aaaaanttggtggcnttntgnaacccncnngagattaaaacaaggttgcnctatgcatgcanaaangtggcattggattacagagcanaacttcatgaattnaaggagtcataatggaagactggaggnattatatgtttatgccaccnagcttaaaaagatttggggcattgtcatggggggtaccacaaaattgcaggtttgatgctaccntggaatttgagtttcacatgcttcttttcccccnaaatgttgtgcgagaagtacaactggtattcatgtcctgatttttctttctcctgaatcctgatgatgtgtctgataatttggtttcttatgcagtctttcattgcttaaccagtgagacatgcttttgggggtgcaaactgtataaaactgtagaaaatgtcaatttctgagcataattgtcagaaagagaaaaaaaaaaaaaaaaa

SEQ ID NO: 81582 - DNA, 354 bp, Oryza sativa
  Clone ID: PAT_MRT4530_81094C.1
cccacagagatgatcaaaccttagaaaattgagtaattgcttcttaccctctaaatgcaagcagaggatcccaattgggagaaacaatggtgcatagcagatgagcaaactccagatgatgtactgcaacaagctctcagctgggcatgtggtcctggtggtgcaaactgcacgatgattcaaccaaataaatattgttattttcccaataatgtcaaagaccacgcatcctatgccttcaacagctactggcaaaaattcaagaaacaaggtggttcctgctacttcaatgcagctgcaatggtcactgacctggatccaagtcatgattcgtgtcattttgaagtggttccc

SEQ ID NO: 81583 - DNA, 185 bp, Oryza sativa
  Clone ID: PAT_MRT4530_81095C.1
tttttttggggtgcttaattaattatactgctggatcatgtgggtttgtagcacagtaaactctgaacactattgggtttgtagcacatgtgggtttcataacttttttcactaagataagctacgtttaattgctgcactagaaaataattaaaaggatcacatcccatggtttgataaaaaaa

SEQ ID NO: 81584 - DNA, 240 bp, Oryza sativa
  Clone ID: PAT_MRT4530_81096C.1
atgggacgggacatacctgcctccaccccgctgggtacaggggcaaacgtgggggcacggctgcccgtccgatcggacgtgaccggcgacaggccagtcacagtctggtcacgcctgattgacctgcctgagggcctcggggcgaggcagcgcgagggtccgaggggtgtgatgtggcaccccgaggccccctggctgcctttgcgtcttccgaggcgcggggggagggccaggctgtag

SEQ ID NO: 81585 - DNA, 403 bp, Oryza sativa
  Clone ID: PAT_MRT4530_81097C.1
atgtactacaaactagtggaatgtgggagcccatatgcgtagcgacagctaacagatcagaagcggccccgcccagcccaacaacacaatccacacgccgcctgtcgaaaaaacccagcccacgtgggcgtctgcgaacccacgccgcggtctcatggtcccccccgcccccgacgagaaaatcccaatagatcaggccaaaactcatcgtcgagcgtcaatcaaaacgatcggaaatgcagatgctgcacacacgcacgcacgcacctcagctagcaataactctcgacatgttcaatgcgatcgcctgcctaattctttctccgagagcgacccggttttaattactggttacttgcacaggttgcgcaaggatgtcatcgccttaattatggggatgaaa

SEQ ID NO: 81586 - DNA, 375 bp, Oryza sativa
  Clone ID: PAT_MRT4530_81098C.1
atgctgtactcctacaatcctacatttcctggtgtcactttcccaattgagtgcagatatttcaaactacaaggccagacgtttcttcagcaagcagctgagcactttgatatccatcagaaaatatcacatcccttcaaaatcccttatattacatggagtaaccagaaagagtctctccgttgctcgtccgctgtggtagtacgagagctcgtgcgaatgagtttagcaggagagaagagaaacgcgtcgctgcaggtgagagtaaagcgccgccgtggtactccagttatctacagattgtcggaccacgtcgcaacaagggagagagaacgagagatccacatgcgcaaaaacaccgcagtactgatcgaa

SEQ ID NO: 81587 - DNA, 316 bp, Oryza sativa
  Clone ID: PAT_MRT4530_81099C.1
cccacgcgtccgcgcctctgcctccgcccccggcgatggctaccctctccctccctctcccgcatctcacccaggccatccccgcgcgagcgcgtccgcgaccgcgaccgctccgtgggatccccgcgcggctcctctcctgccgcgccgcgatggcggtggcgcccgacaaggaggaggcggcggcggttgctctggacaaggcggtgaaggtggcggtggcagctcccgacagggcggcggtggccgcggtgggcgtcggggaggagctccccgaggggtacgaccagatgatgccggccgtggaggaggcgcg

SEQ ID NO: 81588 - DNA, 225 bp, Oryza sativa
  Clone ID: PAT_MRT4530_8109C.1
atggcccaagcaaatccaaggagagagatacaaaagcaaacaacatcagctcttccaggaggatcgaacatttcaaccggcagcgacggcgacggcgacggcaacctgggcggccgcatgatgcgtgttgccaacaccgtcgtcacacacccagaggaggaggcgacacatgaagccatgagcggagaggccagtgccgccgcccaccgcgaggtgtcagattag

SEQ ID NO: 81589 - DNA, 1740 bp, Oryza sativa
  Clone ID: PAT_MRT4530_810C.1
ttgtatgcccgcaaccccccacaaaaccctaccaacctcccgccgccgccgccgcccatggccgccgcgtccgccggagcggccggccgccgcagggcgtggcgtgtgatcccgcgccccgtcctcgagacggtcctccacaaccacgcgctccgcccgcgcgtcccgcagccgctcatcctccacgggccccgcggcgtcggcaagtccaccctcctcctccgccgcctcctcccgcagtggtctgagcccccgcacgccgccgccttcgtcgacttcctccgccccggccccgacgcgccgtggtcgctcctcctccccgccgccgagggcgcggcgccgtcgctccccgacctccgcctccgcctcgagtccgcgctcgagggcctcgcgcgcgacgccgtgctccgcggcgccgtcgggtccaaggacgtgctcgccgcgctctcccgctcccacggcctccacaccgcgctgacacgcctcgcgggaccagccgcccgccgcggcggtcgtggcggcggcggttacccagtcccgacgctgtgggcgagggccgtcctcgccgcgtcctcctcggcgcgtggcgacgactctaccttctgcattggtgagggggaggcgaccaactgctccatggaggagaaggcgtacatgcaggaggcaatggcggcgctgcgtgtggccaaggaggtgctccggatgcaagaggggtggaggaaggaggcggtgcgggagatgaataggactggccggttctcgaggccactggccaattccgcaaccgactggccatgcctgttgctggatgtgctctcgggtgcggctgaggtggatttctttcagccaaagctggtgctgaacaatgtggatgtgctgaggaaggcgacttgcaaggatgatacgatggtgcctgcggcaatgtatcatgatagcttgatttggagggtgatcgcactcggtgccaacgaacagtgcttgccggtcattatgtctacctcagatggctactattcttcacaagcatttgttgattttggttttcctaatatattcatttctcgtgagacatttggttggacaccacaggaagctaagttgcatatggtccctgaattcttcagtgagaaggaggtatggaaagttgtggatgaggttcttgggacaaacccacggcaattatctgagatttacatgttgaagcagaatgcagatagcacaggggttttgcatgatcaaaatatcgaggaaattatcgacatatacctggcacacttgcaagtttctgttgtgaatcctgcaatggaggcagcattaggaatggtacagaagttcgcatctgatgtccgtgagggaaaagtaccagaaaatagattgtctttcggtgcaccatggagacatccgcctcaggggggtaaccctgatgcatcctataagtgggcaaagattcaactaatggatttcgtgcaatcttttgtaaacactgagttcggggtgaattatctagcagatgacagcctggaaatatttgatgatcctgctgcactcgccatgtcagaggcttgttcagcagaggttacaattgagctttcaagaatcaatagcattcttatggcaacgtgcgatacgtgggcgaagctatcgacacttgatgaaagaagtcggctacaagtagagatttcaatggagcaggacaggagccctttatcaattttggcattgcatatgcaactgacatga

SEQ ID NO: 81590 - DNA, 417 bp, Oryza sativa
  Clone ID: PAT_MRT4530_81100C.1
tcgtacactcgtactgattgtctgactgaacatttatggttgaaagggttcgctccttctcggccgagctgatggcgttcattgtggctatctccggcccgcaccgtagcgagtcggacatgaagctcagggacaggcattgccagccggaggtgcatgacagcccgttggacgcgtgccggctggtgctcgaccggcagctcaccggccgggagaggttccagtcgatgtttccgcagccgggcgcgcttggactgaggattcgaagatgccagcagctagaagacgcgagccgggagtgccgttgcacctccatacgccggatggtgaggagctacgaggagagcatgccggtgaccctggatcaaggctggtcaacttcgttgcagaatactacagaggcgaggggtcatcttc

SEQ ID NO: 81591 - DNA, 229 bp, Oryza sativa
  unsure (1)..(229): unsure at all n locations
  Clone ID: PAT_MRT4530_81101C.1
attntgcagtctgcgaggccctatggncagagggctgttctcaagtttgctcantacactngtgctcangccnttgctggtaggcacactcctngtacatttaccaaccagctgcagacctnattcantgagccangncttnttatcctgactnncccnnngactgatcatcagccaattaaggagtctgnacttngaaacattcctaccattgccttctgtgacactg

SEQ ID NO: 81592 - DNA, 393 bp, Oryza sativa
  Clone ID: PAT_MRT4530_81102C.1
atgccggggcgaagcaagggcggctcggcggtggtcaagggagatgcggcgggactccggcgaccattcgcactgcaccgatcacgaagcacccaagcacgaatcgacgtccaagcatgggcgattgggccaatcctcgcggcgccggctccgttaaaatcgcaggatgacgacaccagcatcatccagtggctagacgcacatccgcggcgctcggtgctgtacatctcatttgggtcgcagaacagcatcagcatccatcagatggcggagctggcgctggggctggagacgagcggacggccgttcctctgggccgtccagccgctggtggggttcgaccacaaggacggattcgatcccggctggctccccgtcggatttgaggactag

SEQ ID NO: 81593 - DNA, 2140 bp, Oryza sativa
  unsure (1)..(2140): unsure at all n locations
  Clone ID: PAT_MRT4530_81103C.1
tcttgtctgacctcttcagacgacagcgcggcggaacgctcgccagatcctcgcccccgctggatggaggagggcggagccggcacctcttcttctctttgcgaaggttggctacttggccagccattacgaaacaagttagtttggagaagaagcagagttgagactgcatttgcattgctctgtagccatgggcaagcaccatgtcaccctgtgttgtgtcgtttttgctgtgctctgcctggcgtccagcttagcacaagcccaagttctcttccaggggtttaactgggagtcgtggaggaagcaaggcgggtggtacaacttcatctacaagagatcgatcagtagtggttagcagcaactcactatcgaacacggtttcagcttacacagatatgaagaacaccagcagcttgtgtttgctgctcctcgtggtgctctgcagcttgacctgtaactcgggtcaagcacaggtcctcttccagggtttcaactgggagtcgtggaagcagcagggcgggtggtacaacttgttgaacggccaagtcgacgacatcgccaaggccggggtcacccacgtctggctgccgccgccgtcgcactccgtcgcgccgcagggttacatgccggggcgtctctacgacctggacgcgtccaagtacggcacggcggcggagctcaagtcgctgatcggggcgttccacgggaagggcgtccagtgcgtcgccgacttcgtgatcaaccaccgctgcgccgacaacaaggacgccaccgacctcggcttcgacggctggcgcctcgacttcgccaagggctactccgcgccgctggcgaggatctacgtcgacaacaccaacccgacgttcgtcgtcggcgagatctggagctcgctcatctacaacggcgacggcaagccgtcgaccaaccaggacgcggacaggcaggagctggtgaactgggtggagggcgtcggcaagccggcgatcgacttcgttcgacttcaccaccaagggcatcctccaggccgccgtgcagggcgagctgtggaggctccacgacggcaacggcaagggcgcccggcctcatggggtggatgcccgatcaggccggtaaccttcgtcgacaaccacgacaccggctcgacccagtcgctctggccgcgtcccctccgaccaaggtcatgcggggctacgcctacatcctcactcaccccatgcatactccttctatgcggcgaccagtgtgttcgtactggaacctgcaaacgcaagatcgcgacgctggctgaaatccggtcaaggaacgggatccatgcggagagcacgctggacatcctcaaggccgagggggacatctacgtcgccatgatcgacggcaaggtgatcaccaagctcgggccgaggtacgacgccggcgggatcatcccctccgacttccatgtcgtggcgcacggcaacgactactgcgtctgggagaaggaaggcctcagggttcctgccggtagaaagcactattagctttagctatagcgatcgagttgcatggtgctttggcaaccctaggataatatatatacgtacgtggctctagctatgaaatcatgcaattttggctgcgagatgtgtacgagcgagcttcgatcgatgtacgcttcgttataactagcgttcttcggaaataagtaagcggaatgtaccctgttaatcctgcagaaatgtaggatgaatggaattaactagctactgttcgtttcgaaaaccaaaaaaaaaaaaaacaaagaatttactgattcttatacttttgcagtcaattaaattatggtttttatatatgtaattttgtatccgattgtagcgttcgaataagtaggcaggctctctagcctctaggttaattgcggggcatatgtagcttgccagttaattgtgtttgtatcacgcagtttgtaaccgttggtgcaatatataatgtcaggttcaggatgcagtaaaaaatcatactgcaccgatcagtgagtttttatatactccttttaaaaaaaaaaaaaaaaaaaaaaaattttataaccaactgcttcatcatgttttctatcaactactctatgnataaanatctctctacanaaaaaaaaaaaaaa

SEQ ID NO: 81594 - DNA, 229 bp, Oryza sativa
  Clone ID: PAT_MRT4530_81104C.1
ggtctgtaggaacgtgctgaagacgagcgcgctgccgtacgtgaacaacgagccgcacctgaggaacatcatgcgtctgggtgctctccgacgacgccggcgagcgctactgacgactacgggggcacaacgtgctctacgtgtgtggaaccgacgagtacggaaccgccaccgagaccaaggccatggaggaaggctgctccccatggagatctgcgacaagtaccat

SEQ ID NO: 81595 - DNA, 3996 bp, Oryza sativa
  Clone ID: PAT_MRT4530_81105C.1
atggccgccgagaagcatgacgcgcacgagacaacgaaaatcgttcccgacatcgcgtctcttcacgacgtcgtgaaaacgaagagcgaggaggacacccgagcgaaaaccaagaccgtggtaaccgccacaaccgccacgatcgcgacgatcgcgaacagcggatgccgggcgatactggtcgaggacgctgccataacgatgatgatgatggagatcagcgccgggacaacaacggtgggcgacgataggattctcgagaacccggacgtcatcctcacagacatccatggaggacatacgatcaccaacaacccaccgcccccggcagcggatgtagagcttttagtcgtgccctacgagatgtccgatggcctgagagattccgaccgggagaatagagaagtacgatgggagaaccgaccgagaggagttccttcaggtctactccacagtactctatgctgccggtgcagacaacaatgcgttggcaaattatttgcggcggcgttgaaaggatctgcacgttcatggctagtccacctcccaccatactcgatttcttcatgggcagatctgtggcaacagttcgtcgctaacttccaaggaacatacaagtgccacgcgatcgaagacgacctacatgcgttgacacaaaatccgggcgaatcattgagggactacattcggcgcttcaatgagtgcagaaatacgatccccgagatcaccgatgcttccgtgatccacgcttttaaaactggtctattcgagattgtcgatcgatgcgctcacacggacgacgcactgagacgcaagaacgataagccaaagacggcgggagagaagaaaccagccaaggacgcacctgagtcaagcaagaagaagagtcgcaagagtgggaaaaggaaagctcaaacggaagtcatcgcagcagaatacgcggacccgcccaagcacctagacccacagagcaacgacacgaagaaaatatggtgccctatacacaagtcagacaggtactctctggaggattgcttcgtcttcaaaaagtcgctcgcaaagcaactggcattggagaagggcaagcgagtacgtgtagtcgagaaggccgctgaagcagctactcaggactcggactcagcatacccagattccgatctccatgtctcgcacatcttcggaggttccacggcgtactcctcgaagcgagagtacaagaaagtggagcgcgaagtttgttcgacatggcagggggctgcacccaagatgaagtggtctgagcagaagatcgagttctcagaagaagaccaccccaagactgctgtcaccccaggacgatatccgatcatggtcgagcccactattcggaatatcaagggtaacgcaaagctggcggtgcagtgcgacaagcggagcctcgacatggtcgagcacacacccaacccacccgccacagccgagccacccaagaaaaaacaagccatacgagaggagctcgacaagcttctcaaagctggcttcatcagagaagtactccatccagagtggctagccaatccagtcatggtgcggaaggccaacgggaagtggaggatgtgtgtccacttcaccgagcttaacaaggcgtgtcccaaggttcacttccctcttcctcgaatagaccaattggtggactcaacagctggttgtgagttgttaagctttcttgacgcctactccggctaccaccagatcaacatggcgaaagaggacgaggagaagacagcattcatcatgccgttcggtgtattctgttacattaagatgccgtttggactagtaactgcaggaaataccttccaacgcacggtccaaggggcacttaacgatcagcttggaaacaatgtcgaggcctacgtcgatgacattgtcgtcaagaccaagacaagcgactcattgattgacgatctccgggaaacgttcgacaacctccgacgatatcgcctcatactcaatctagagaagtgcacgtttggagtaccattgggcaagctgctcggtttcctcgtctccggaagagggatcgaagcaaatcccgagaagatcaaggcaatcgagaacatgaagtcgcttacaagactcaaggaagtccagaagctaactggatgcatggcggcattgagcagattcgtcgctaggatgggagaacgaggacaacatttcttcgctctgctgaagaagcaagacaaatttgtgtggacacaagaagcggaagatgcgttcatcgcactcaaatactatctgtcaaatccccctgtacttgttgctccccaacctaatgaagaattattcctctatattgccgccatgcgaatattttcaatcatgacatcaagaaagctatgccactacttccaatcccacagagtcacagttgtttcgtccttcccacttggtgaagtcatgagaaacaaggacgttgtcggtcgcatcgcgaaatgggtagtcgagctaagccagtttgatgttcactttgtgtcacgaacagccatcaagtcccaggtcctcgctgactttgtagctgactggactatgcctaacaacagggcagacagtcaggacgacaacgagacatggacaatggcatttgacggcgcactcaatagccaaggagcaggggcagggttcatcttgacatcaccttcgggacatcagttcaagcatgcaattcacctcaacttcagggtaaccaacaacacagccgagtacgaaggactactcaccgtgataagagcagctgctgcactaggggtcaagcgactaatcgtgacaggggattctgaactagtcgcgaaccaggtgcacaaagattacaagtgctctagccccgagttatctaagtacctcgcagaagtcgggaagctagaaaaaaggttgatgggatcgagacgagagccactcgaacccggcaccttcctggacgtcttgacaaagccatcggtgaaagaggcaaacgacgaaaatagcatagtcgcccccgacatcagctcgggggctacagaggtagaacgcgccgttgccaacattgagaccgcatacgactggcagaccccactcatcaagttcctaagtagtgacgagttacccgaggacgatgcagaagtcgagaaaataacccgtcaagccaaaatctactgtatgatcggcaacgatctatacaagaaggtgccaaacggggtacttctcaaatgcgtctcgtccgacgacggcaaacatctcctcctcgacatacacgaagggatctgtgggtcacacgccgccagtcgcacattggtcgaaaaagcttttcgacaagggtttttctggccgaccgcccttaaagacgcttgcgacatggggctcgacatacttggaccattccgacgaggacagggcggctacaggttcctattcgtggtgatcgacaaattcaccaagtggatcgaaacgacacccacgggggaaatcaaggccgacaacgccatcaaattcatcaaagggatattctgcagatatggattgcctcaccgcatcataacggacaacggctcccagttcatcagtgccgacttccaggactactgtattagattgggagtcaagatctgcttcgcctcggtttctcatcctcagagcaatgggcaggtcgagatggcaaacggcatagtactacaaggaatcaagacccgtgtctatgacagactgatgtcacatgacaagaagtgggttgaagaactcccctctgtactatgggccatgcgtaccacaccgacaacatccaacaaggagacacccttcttcctcgtgtacggctcagaggccatgctccccactgagctacaacatcagagtacacgagtacagaagtacttagacgaggaccaggaggagcagcgaaacgacgacgtgaatctactcgaggaacatcgagaaagagttgccgtcagaggagccagctaccaacaggcccttcgctga

SEQ ID NO: 81596 - DNA, 1688 bp, Oryza sativa
  Clone ID: PAT_MRT4530_81106C.1
atccatcatctacaagagatcgatcagtagtggttagcagcaactcactatcgaacacggtttcagcttacacagatatgaagaacaccagcagcttgtgtttgctgctcctcgtggtgctctgcagcttgacctgtaactcgggtcaagcacaggtcctcttccagggtttcaactgggagtcgtggaagcagcagggtggctggtacaacatgttgaaaggccaagtcgacgacatcgccaaggccggggtcacccacgtctggctgccgccgccgtcgcactccgtggcgccgcaggggtacatgccggggcgtctctacgacctggacgcgtccaagtacggcacggcggcggagctcaagtcgctgatcgcggcgttccacgggaagggcgtccagtgcgtcgccgacgtcgtgatcaaccaccggtgcgccgagaagaaggacgcccgcggcgtgtactgcgtgttcgagggcgggacgcccgacgaccgcctcgactggggccccggcatgatctgcagcgacgacacgcagtactccgacggcacgggccaccgcgacaccggcgaggggttcggcgcggcgcccgacatcgaccacctcaacccgcgcgtccagcgggagctcaccgactggctcaactggctcaagtccgacgtcggcttcgacggctggcgcctcgacttcgccaagggatactccacggacatcgctaagatgtacgtcgagagctgcaagccgggcttcgtcgtcgccgagatatggaactcgctgagctacaacggcgacggcaagccggcggccaaccaggaccagggccggcaggagctggtgaactgggtgaacgccgtcggcgggccggcgatgacgttcgacttcaccaccaagggcctcctgcaggcgggcgtccagggcgagctgtggcggctgcgcgacggcaacggcaaggcccccggcatgatcgggtggctgccagagaaggccgtcacgttcgtcgacaaccacgacaccggctcgacgcagaagctttggccgttcccctccgacaaggtcatgcagggctacgcctacatcctcacccaccccggagtcccctgcatcttctacgaccacatgttcgactggaacctgaagcaggagataaccgcgctggcggcgatcagggagaggaacggcatcaacgccgggagcaagctccggatcgtcgtcgccgacgccgacgcatacgtcgccgtcgtcgacgagaaggtcatggtgaagatcgggacgaggtacgacgtgggcaacgcggtgccgtcggatttccatcagacggtgcacggcaaggactacagcgtctgggagaaggggtccctccgcgtcccggcggggcggcacctatagcgggctcaagccctaaactgaacgggatagtcatgctcaaaccagtttctacacggcaagaatttactgattcttatactttttcagtcaattaaattatggtttttatatatgtaattttgtatccgattgtagcgttcgaataagtaggcaggctctctagcctctaggttaattgcgggcatatgtagcttgccagttaattgtgtttgtatcacgcagtttgtaaccgttggtgcatatatatgtcaggttcaggatgcagtaaaaaatcatactgcaccgatcagtgagttttta

SEQ ID NO: 81597 - DNA, 3273 bp, Oryza sativa
  Clone ID: PAT_MRT4530_81107C.1
atggcttctaagcttaaatcaatggaaatggaaatctctaaaggttttcttgtccatttcattatgtcatctctgccccaggagttttctccatttacgatcaattataatgcaatgaagatcaagtggggcattgatgaattaatagctatgtatgtacaagaagaggaaaggcttaaggcagaaagagttgaccatgcaaatctatttaaacactccaagaagaaaaagtataagaaatttaagaaggagtatttgaagcctaagcctagtcaatttaaagaaaaagggcaatcttcgaatcaatcccagcagaataaatctggaggaaatccctatacagaagaaaagggaaaagaaaaggatgggtgctacttttgtggaaagagtggacaccgccaaaaggactgtattgggtttatgagatggctcagtaagaaagatactgatgttatttcttttgttgatgaatccctaaatattgattatgccaccaattcttggtggattgactcaggagcgacaattcatgttgcaaattccttgcagggattcgctatgaggaggacactaagaagaggggaaagaagaattagagttgctaatggagaaagaatctccacccacggtgactgccaacgaggtcctctcggatgtaagcgggcctgtcctggggaaggcgggacattacagtattatagccctgccgttcctatagaaatccagggaatcccttttccctcggatttgattcttctggacaccaagaacttggatgtgatccttgggatgaattggttggctcaattccaaggagtagtggattgcgcaagacgcactgtcactctgtaccgagggctggaacaaccggttgttttctttgcacccccaacctctgtcggcagttccgaacttcatcagattggactgtcggaaacccccatcgtcagagagttcagagatgtgtttccggaagaactacccggtatgccgcccaagcgagagattgagttccggatagatcttgctccaggaaccactcctctgtacaagcgaccctaccgtatggcagcaaatgaactggccgaagtcaagaaacagttggaagagttgaaagaaaagggaggaagaccatcagcagcatctccgtctggtgttgggaaagttgcgggaacaccaactgtttgcaagctcagcaagtgtgagttctggttgtccgaagtcaagttcttagggcacgtgatatccactaaaggagttgctgtggaccccgaaacagtaaccgctgtcactgattggaagcaacccaagatagttactcaggttcgcagctttttgggtttggcaggatactaccggaggttcatcgagaacttctccaaaatcgctcgacccatgacacagttgttgaagaaagaagaaaaatttgtgtggagcccgcaatgcgagaaggcgttccaaactcttcatgaaaagctggtctcctcgccagtgttgatcttaccggatactcgcaaggactacctggtgtactgtgacgcttcgcgccaaggattggggtgcgtattaatgcaggaaggtcatgtggtagcctatgcctcacgccagctacggccccatgaaggcaactaccctacccatgatttggagttggccgctgtggttcatgctctaaagatctggcgacactatctcattgggaatcgctgtgaaatatatactgatcataagagtttgaaatacatcttcactcagtcggatctgaatcttcggcagaggagatggttagaactcatcaaggattatgatgtgggaattcgctatcatcctggtaaggcaaacgtggtcgctgacgctctaagtcgaaaaagccgttgcaacactcttggcgtccgtggcattccaccggaacttcatcaacagatggaagccctgaacctaagcatagttggtcgtggattcttggctatgctggaagccaagcctaccttgctcgatcaaatccgcgaggctcagaagaatgatccagatatgcatgggatcctcaagaatatgaaacagggtaaagccgctggtttcacagaggatgaacacggaaccctatggaacggaaatcggcgtgtcaaggcagagcaccaacgaccggccagacttctccaacctctccaagtaccagaatggaaatgggatgaaattgggatggatttcatcaccggacttccaaaaacccagggcggtcatgattctatatgggtagtcgtggaccgactaaccaaggtagctcggttcattcccgtgaagaccacctatggagggaacaaactagctgaactctacttcgctaggatcgtgagtctccatggcgttcctaagaaaattgtatctgataggggaagccaattcacctctcacttctggaagaagctccaagaagagttgggtacccgattaaatttcagcaccgcgtatcacccgcagacagatggacagaccgagcgtctaaatcagatcctagaagatatgctccgtgcctgtgttctagattttgagaagacctgggataagagtctcccctatgccgagttctcctacaataacagctaccaagccagcatacaaatggcaccctatgaagcgttgtatggccgcaaatgccggacaccgctattgtgggaccaagttggggaaagccaagtgttcgggactgatatcctgagagaagctgaagcgaaggtcagaaccatttgggataatctaaaggtggcacagtcccgacagaagagctatgcagataaccgacgccgtaacctggaatttgcagtggatgactttgtgtaccttagggtcacgccattgcggggtgtagacaggttccagacaaaagggaagctcgcacctcggtttgtgggtcctttccgtatcattgctcgacgcggagaagttgcttaccagttggagctgcccgcctccttgggcaacgtgcatgatgtgttccatgtgtcgcaactcaagaaatgtcttcgagtgccatccgagcaggccgattcagagcaaattgaagttcgcgaagacttgacctacgtggagaggctagtgaaaatcctggacaccatggagcgcaggaccaggaaccgggtaatccgtttttgcaaggtccaatggagcaacaacgccgaggaagaagctacttgggagcgtgaaagcgagctgaaggcagcccatcccgatctcttcgccagttcttccgaatctcggggtcgagattccgtttaa

SEQ ID NO: 81598 - DNA, 566 bp, Oryza sativa
  Clone ID: PAT_MRT4530_81108C.1
tccgctcaccctggcatcccatgcatcttctacgaccatgtgttcgactggaacctgcagcacgagatcgcgacgctggctgaaatccggtcaaggaacgggatccatgcggagagcacgctggacatcctcaaggccgagggggacatctacgtcgccatgatcgacggcaaggtgatcaccaagctcgggccgaggtacgacgccggcgggatcatcccctccgacttccatgtcgtggcgcacggcaacgactactgcgtctgggagaaggaaggcctcagggttcctgccggtagaaagcactattagctttagctatagcgatcgagttgcatggtgctttgcaaccctagataatatatatacgtacgtggctctagctatgaatcatgcaattttgctgcgagatgtgtcccagcgagcttcgatcgatgtacgcttcgttataactagcgttcttcggaaataagtaagcggaatgtaccctgttaatcctgcagaaatgtaggatgaatggaattaactagctactgttcgtttcgatcctcaaaaaaaacccaacc

SEQ ID NO: 81599 - DNA, 1188 bp, Oryza sativa
  Clone ID: PAT_MRT4530_81109C.1
atgtcaactgagatgattgcgaagtttgataagtattggaaggagatccaaggaccaatgggattggccaccatacttgatcctaagtttaaaacagactacctccttgggttcattgagtccattactagccaatcaagtgaggagtgtacagacaaacttgaagaggttaaaaacaatttgtatgacctcatgaaggagtatgaaatggaagaggatgaagataacacagaatcttcagctcattcacttgctaattcagagacttgcactagtttgagacatgaagagtcgaagacagtgccttctaagctaaccgacggcccagcacactcaaagacaacgaagaacagcggaagactagggcgacgaccacaggcacttgacggcaggcacgagctagacaccaaagccttcatcttccaggggctcctcttctgggtttgggaaaaattgagcaagactgagtacaaccaccaccgaactggcaacccgaccctgggtcccagctcgtcccaagccaacccaggccaaccattccacattttagttgttaagcagccgaggggagagggcgcgcggaccgggtccacgggagcggggcccacgcggcagcctcacggcccacggtggaccgggtgcacgcggctcacgccgaccggcgccgtgggccccaggcgtcagccgcacccgagggcgcgggcggctgacggccgagccccacgtggcagccgctcggtgcgcccgggggggcggccattgcggcgcggccggcgggaggcggcgcccgtgccccgatggtcaccgccggcgaccaccggcacggcggaacagcgaccgagagaggggagggaaagggggaaacgaagcggcggtccacggctcaccccgagtcgaaggcgacgacgaaaacggcggccggagcggaggaaggcggcggcgcggctcgggtcgacggggtcgacggcgttccggcggtcggtgagcgaagcggaggggcggacgaggtcggcgaggatgcggcgaagccgaaggaggcggcgccggggcgggagatggtccggggcgacggcggcggcggaccggagctcggcggcgacggcggagagagagtgcgacggcgcgggctcgattccgacggggaggaaaggcggcgagtggcggaaacggtggaggggaaggggatga

SEQ ID NO: 81600 - DNA, 480 bp, Oryza sativa
  Clone ID: PAT_MRT4530_8110C.1
atggggcggtgtcggtcgccggggcttgagctcgtcgcggcggaggagatggcaaggatggcggccggcagagtggagcagggcgtcggctgtggcggagcggagctggcggctgaagcaggcggagcggcgatgtcggccgagcgtgtggcaggcggagtagagcgccggcggcggggcggcggcggctacggcggtggcaatgagtggctcggcgtagacgttggggatgcggtgcgggagctacggctcgctcgcgtcgaccgacggcgggaggaagtgcaggggcagggggtgggggtggcgaggcagcggggagaaggagcggctgcagctgctccaccgtgcactgtagctggtaggccgccggagggccggggtgctgctgctgcttgccgctgcctccgccgccgtctgtgcgggcatggccggcggccggcgggaagcgacatgcgggcaggaagaggagaagagatatag

SEQ ID NO: 81601 - DNA, 368 bp, Oryza sativa
  Clone ID: PAT_MRT4530_81110C.1
ttttggggtttttatttttttttggggttttttttttttttttttttttattttttatgtttttttttggatggaaaaagggaaaacaaaaaaggggggatttggcacaaaggagcaataactttattatttccccaaagaagaaattggccattcccaaaagggggatgttggtgaaaaaaaaaaaatggggtaaacctgatggcaaaggtatttagaaagggggggaaaaaaaaggggggggaagaaaaagggagaggtagttacagaggtaagggggaaaggtataaaaggcacaaggtttgggtagaacttattgggccggcaaaaggggatctttaagtatttgggggggagttcatggaagg

SEQ ID NO: 81602 - DNA, 4050 bp, Oryza sativa
  Clone ID: PAT_MRT4530_81111C.1
atgtcgtactacgtagatcgtcgtaccagcgtaccccaataccctccatatccggtctatgggtatcccccgtcgacagtggcacgccaggtaggggcttttggtactcaaggttctactactatgtcgtcaagcttcatcgacaacagcgtcaacaccggcatcaaccaaggagtttctacttcaacaatgctggtgtggacccaagtcggcgaaattgttttctcgatttacaccagggtgctgatctcgactggtccaccaatgaccggaagcgagaacgtcatggttaaaaccctaggcgactccatgtcgaaggatcctcccatagaagtggagaacggaacatcgacgacatctgagcccgagcaagatcctagtatggccaaatcttgtccttccgacaagaatcacgagccgacaaggataacttccgaggcgacaagaaatacaatccccgaaatcaccgacacctctgtgatccacgctttcaagaccggtgttagagatagctatactacccaggagttggcaacaaggcggatcacgactgctcgaagactattcgagattgtcgatcgatacgctcacgcggacgacgcactgagacgcaagaatgacaagctgaagacagggggagagaagaaaccagccaaggacgcacctgaatcaagcaagaagaaaagtcacaagagtgagaaaaggaaagctcaagcggaagtccttgcggcagaatacgcggaccctcccaagcacccagacccacaaggtggtgacacgaacaaaatatggtgccctatacacaagtcggacagacactctctggaggattgcctcgtcttcaaaaagtcgctcacaaagcaactggcattggagaagggcaagcgagtacatgtagtcgagaaagccgcggaagcagctattcactactcggactcagcatacccagattccgacctccatgtctcgcacatcttcggaggttctacggcatactcttcgaagcaagagtacaagaaagtggagcatgaaatttgttcgacatggcggggggctgcacccaagatgaaatgctccatcaaccttctcttcgccagcaccttggacacgatgggaatcccacgaagcgagttgacgcccactgatcaacccttccatcgaattactcctcagtcatcgtccaaaccattgggcaagattacgttgcctgtgactttcggccaagcaaataacttccgaacagagcagattacctttgatgtcgctgaatttgatacagcatacaatgccatcatcgggagaactgcactcgcgaagttcatggccgcatctcactacgcgtatcaagtgctcaagatgcccgggccgaagggaacaatcactattcaagggaacgcaaagctgacggtacaatgcgacaagcggagcctcgacatggtcgagcagacgcccagcccacccgccacagctgagccacccaagaaaccgtttgacatgccgggggtccccaaggaggtgactgagcataaactcatggtgcgacccgatgccaaaccagtaaaacaaaaactgcggagatttgcaccagatcgaaaacaggccatacgagaagagctcgacaagcttctcaaagctggcttcatcagagaggtactccatccagagtggctagccaacccagttatggtgcggaaggccaacgggaagtggaggatgtgcgtcgacttcaccgacctcaacaaggcgtctcccaaggatcacttccctcttcctcgaatagaccatctggtggactcaacagctggttgtgagttgttaagttttcttgacgcttactccggctaccatcaaatcagcatggcgaaagaggacgaggagaagacatcattcatcacgccgttcggtgtattctgctacgttaagatgccgtttggactgataaccacaggaaacaccttccaacgaacggtccaaggggcacttaatgatcagcttgggaacaatgtcgaggcctacgtcgatgacattgttgtcaagaccaagacaagcgactcattgattgacgatctctgggaaacgttcgacaacctccgacgatatcgcctcatgctcaatccggagaagtgcatcggagtaccgtcgggaaagctactcgggttgctcgtctctggaagagggatcgaagcaaatcccgagaagatcaaggcaatcgagaacatgaagtcgccgacaagactcaaggaagtacagaagctaactggatgcatggcggcactaaacaggttcatcgctaggatgggagaacgaggacaacctttcttcgctctgctaaagaaacaacacaaatttgtatggacacaggaagccgaagaggcattcatcgcactcaagcgctacctgtcaaatccccctgtacttgttgctccccaacctaatgaagaattattcctctatattgccgccacgccatattctgtgattactgtcattgttgtcgagagagagaaggtgcaaagactagtctactacgtcagcgaagctctccacgacgcgaagacaagatacccactgatccgaaaactgctctatgcagtaatcatgacgtcaagaaagctacgccactacttccaagcccaaagggtcacagttgtttcctacttccttcttggtgaagtcgtgagaaacaaagacattgtcggccgcattgcgaaatgggtagtcgagctaagccaatttgatgttcactttgtgccacgaacagccatcaagtaccaggttctcgccgacttcgtagccgattggactatgcctgaaaacaggtcagacaatcaaaccgacaacgaaacgtggacaatggtgtttgacggcgcactcaacagccaaggagcaggggcagggttcatcttgacatcaccttcgagagatcagttcaagcacgcatttcacctcaacttcagggcgaccaacaacactgccgaatacgaaggactactcgctgggataagagtagcaaccgcacttggagtcaagcgactaatcgtaaaaggggattccgaactagtcgcaaaccaggtgcacaaagactacaagtgctctagccccgagttatccaagtacctcgcagaagtcaggaagctggaaaaaatatttgatggaatcgaggtccgacacgtataccgcaaggacaacatcgaaccgaacgatcttgcacggcgtgcgtccagacgggagccactcgaatccagcacctttctggacatccggacaaagccattggtgaaagaggcaaacgacgaagatagcacactcgcccccgacatcagctcggtggctacagaggcagaacgcgttgttgccgacatcgagaccacagatgactggtggatcccactcattaaattcataagtagcgacgagttgcccaaggacgatgcaaaagccgagaaaataacccgccatgtcaaaatctactatatgatcagcaacgatctatacaagaaggcgccaaacggggtacttctcaaatgcgtctcgtccgacgacggtaaacatctcgtcaacatacatgaagggatctgtgggatctcgtcacatgctgccggctgcacattggatggaaaagcttttcgacaaggatttttctggccgactgccctcaaagacgcttgcaacatggtacagcggtgtgaagcttgtcaatttcatagtaaacacacaaagctaccaacgcaagcgctccaaactatccctctcatttggccgttctcgtgctgggggctcaacatactcggatcatttccacgaggacaaggtggctacaagttcctattcgtggcgatcgacaagttcaccaagtggatcgaagcaacacctacaggggaaatcaaggccgacaacgccatcaaattcattaaagggatattttgcaaatatggattgcctcactgcatcataatggacaacggctcccagttcatcagtgccgacttccaggattactgcattgggctgggagtcaagatctgcttcgcttcggtttctcacccttag

SEQ ID NO: 81603 - DNA, 1233 bp, Oryza sativa
  Clone ID: PAT_MRT4530_81112C.1
atggacatctctaggacaaatgaaggcttcacaagctgcggcccggtagtcgagatgtcatggcacagggctggtgtcctgctgctaggggctcaatcctgcctacctgtcccggaggttccggccgtaggtggggttgggtcggtactcttgtctatggctaggatgggttggaaactatgtcacgtcttccgtccgtataccgtggtggtggatgagcttccaatgccagaagaggatgtccccttttgtcacgattgtagagagcaaggacactatgccctgaattgtccatgggtatatgccaaagaagctccttcctttggtttagcagggcaggcatcgctaaaccagcctcctcgcaccaagtcaagcttgcagcctagtgtgcaaagtagagagcccaatggagagaatccattgaatcccgagaattgctttcctcctatcctttcgtaccacgtggggtcacgtactaagcaagccaaaggcaagaagagtaagaatcagaagagaaaagcaccgatgcgaactgaagaagaagtacgtaagatgactattaccagcaccgaatggcctccagcaaggataactattcctagacgtcaaagaggaaataccttccgaggtgcacgacagttgacccagcacctcctaagccatggtggcagagtatctgatagtgaagggtcagatcaagtctcctcggatgatgaagatgagtctccccgacatctcggcgaggaagaaatggaatcaaaggcatgcacccgttgtggagaaattggacacgttgctagcatgtgtctcacactctgccctcattgtgaggaagaccatccaccaggtgaatgtcccacccgcaaggtgacatgttttctgtgcgaaggtacaaaccatgtgctcaaggattgccaactcagtgtgttgttgaccaagaccgcagaaatccaacgaacaaccctacggttgtctcatcagctagtcagctccaatagcaacatcgacaatatcatccacaacaccaatgctcctcctgctccacctgactctgcaataaatcatagcaataataccttcagcaccaaccattctctgcaccgacagcctcagcaaagaattgttgtcgatggaagaagttgtgtctctccccgacctactccaggccgagcaaagggcaatcaatctcaggagggcgataccaagcagaagaccgttctctgcttcaaatag

SEQ ID NO: 81604 - DNA, 7869 bp, Oryza sativa
  Clone ID: PAT_MRT4530_81113C.1
atggtgcttactcgcagcaatgggaacggccccaacaacaacaacaacaatggagagaatcccacgcttgcccaagtcctggctcaacaggcacagctcatgaacatgatgatgcagcaactccagaaccagcaaaaccaggggaacaatcatgcacctccccagaacaagttagcagaatttcttcgtgtgaggccgcccactttttccagcactaccaatcccgttgaggctggtgattggctgcatgccatagaaaagaagttggacctgcttcagtgcaatgatcaagaaaaagtctcctttgcttcacatcagcttcatggccctgcctctgagtggtgggatcacttccgtctcaacaggaccactacggaaccaatcacttggcttgagttcactgctactttccggaagactcacataccctcgggagtggtgtctctcaagaagaaggagttcagggcactcactcagggatctcgctgtgtcactgaatatctgcatgaatttaatcgtctggcctgttatgctccagaggatgtacgtacagatgaagagcgtcaagagaagttcttggaaggactgaatgatgagctttcttacccactaatgactggggattattctgatttccagaagttggtggataaggccattcgccaggaggataagtacaaccgaatggaacagaagaaacgcaggattgctcacttcaaagctcaagtcagttctacaacaacaatgctggcaacaacaaccgcaaccaagctccacgtcctgttgcaactccagcccagcaccagcctgccaagagggagtaaggaaacaagccaggagtgtgctttaactgtggggaaccagatagaagatcttagatgtcctttgatggttagtaccccgagtaaccaagcactctcatcacaacgtagcccctctgtcagaatagagattcaaggagtaccatttctggctaaccttattctattagaatccaaagaccttgatgtcatcctagggatggactggttagcccgatataaaggtgtgatagactatgccaatagaaaagtaactctcaccagcaatgatggtcaagttgtaactgttcatgcattgccttctgagcctttaaggtcaagtctgaaccaagtaactttggaagagattcccatagtacgggactacccagatgtgttcccggatgatttacctggcatgtcgcctaaaagagatatagaattcagaatagatctggtaccaggaacaactccaatccataagagaccttatagaatggcagccaatgaattagcagaggtcaagaggcaagtagatgatttgcttcaaaaaggatacattagaccaagttcgtctccatggggagctccagtcatttttgtggagaagaaagaccatacccagaggatgtgtgtggattactgtgcactaaatgatgtgactatcaagaataagtacccactgcctagaattgatgatttgttcgatcaactcaaaggtgccaccgttttctccaagatcgatcttcgatcagggtatcatcagttaaggatcaaagaggaagatatacctaagacggcttttaccactcgatatgggttgtttgaatgtactgttatatcttttggacttaccaatgcccccgctttcttcatgaacttgatgaataagaaagatgtgaagtacaagtggtcagaagaatgcgagcagagttttcaagagttgaaaagtcgcttaatatcagcacccattttcattttgcctgatccaaagaagggtttccaagtgtattgcgatgcatctaagcttgggttaggttgtgttctgatgcaagatgggaaggtggttgcctatgcatctcgtcagttacgtccgcatgagaagaactaccctactcatgatcttgagttagccgcagtggttcatgcgttgaagatttggcgtcactacctctttggtactcgtacggaggtgtacacggattacaagagtttgaagtatatcttcacccagccagatctgaacatgaggcagcgaagatggttggaactgattaaggattatgacatgggaattcattatcacccaggaaaggctaatgttgtagcagatgctctcagcagaaaaggctattgcaatgctacggaaggacgacagttgccgtgggaattatgcaaggaatttgaaagattgaatttgggaattgtcagtagaggtttcgttgcaggattagaagcgaagcccactctcatcgaccaggttagagaagctcaaatcaatgatcctaatattcaagagattaagaagaacatgagaagaggaaaggctattgggtatttggaagatgagcaaggaaccgtatggttgggcgagagaatttgtgtcccagagaacaaggagttgaaagatgcaatcttgaaggaagctcatgacactttatactccattcaccctggtagtaccaagatgtaccaagatctcaaggagaaattttggtgggcaagtatgaagcgtgagatagcggagtatgtagctaagaagcttcaggaagaggtgggttccaagctgaactttagtaccgcttatcatccacaaacagacggacaaactgaaagggtaaatcagattttggaagacatattgagagcttgtgctttagacttcggtggaagttgggataagaatctgccttacgcggaattctcatacaacaacagttatcaagctagtctccaaatggctccttatgaagcactgtatggtcggaagtgccgcactccgctgttgtgggatcaaacgggagaacgtcaggttttcgggaccgatatcctgagggaagcagaagagaaggtaaagatcattcaagaaagattgcgtatagctcagtctcgtcataagagttatgctgataatcgtcgtagggatttaagtttcgaggaaggagatcatgtgtaccttcatgtcacgcctcttcggggtgttcatcgttttcacaccaaaggaaaattggcaccgcgttttgtgggatcttataagattgtcagtagaagaggtgagatccttgtaccaacgtaccccaataccctctatatccggtctacgggtaccactcgtcgacagtggcgcgccagcttcgtcgacaacagcgtcaacaccaacctcagccaagtactccctgcttcaacgatgctggtgtggactcaagtcagtgaaatcgtcttcctggtttacaccacaatgccgatctcaaccggtcccccaatgaccggacacgagaacacagtggctacaagccaaggcgactccatgtcgaaaaattgtcccgccgagacggagaatggagcatcgacaacatccgagctcgagaaggattctgatacggccaaacattgtccttccgacatgaaccgcgagctgacgaagatgacttccgaagccacaaggtcctggtgtcctatccacaaaaccaggaaacacactctgcaagcctgctgggttttcctcaacgtccgcgctgaaattcgcgcctgcaaagaacgtggaattcagcgtacttctccaactcgtgatgtctattgtcctattcacaagacaaagaatcacgacctctcaagctgcaaggtctttctcggcaccatgaaagctccgtctcctaaattatacgtccccatcagggataacggcatggaacaaggagcgactccaacttcagatcgattcgttggggtaatcgatatcgatcctcacgaaccattagtcttacaccttctcgaagactatgggtcatcgacaacgagcgcgccgcgggaggtattggccatcgatgacgttggcatgtcagcgcacgccaacgcagaagcggggaatcaatcgactactccagcccagcacattagggccgttcaagctatactgagggaaactccctacgatcccgttctgaacgatgacctcgagcgttggacagaacgactacgggaatcagtgaccaacctcagcaatgcattcgaagaagccgctaccgcagcgcacccggagcagccaccaattggcgatgccaatggcagacatccacgaaggacacacgaccgccgacaacccaccgcccctaacgctgggtgtagggctttctgtcgtttcctgcgagatgtcctatggcctgagagattccgacctggagcaatagaaaagtactctacgctgttgaatgatgggagcaccgacccagaggagttccttcaagtctactccacagtactctacgctgccggagcagacgacaacgcgtttgcgaattatttaccaacagtgttgaaaggttctgcacgttcatggctgatgcatcttcctccctactcaatctcttcatgggcagacctgtggcagcagttcgtcgccaatttccaaggaacatacaagcaccacgcgatcaaagatgacctacacgcgttgacacagaactcgggtgaatcattgagggaatacgttcggcgcttcaacgagtgcagaaatacaatccccaaaatcactgatgcttctgtaattcgcgccttcaaatccgatgatgcgctaagacgcaagaacgataagccgaagaccgggggagagaagaaaccagccacggacgcatctgagtcaagcaagaagaagaatcgcaaaaatgggaaaaggaaagctcaagcggaagtcctcgcagcagaatacgcgaaccctcccaagcgcccagacccacaaagtagcgacataaagaaagcatggtgccccatacacaagacgaacatacattctctggaagattgccctgttttcaaaaaatcgctcgagaaacacatcacatttgaaaaaggcaagcaagtacgcgtgatcgagaagaacgaggaggcggttcctcacgaatcggattcagcgtatccagactccgacctccacgtttcacacatcttcagcggttccacaacatactcctcaaagcggaaatacaagaaagtggaacgtgaagtctgttcgacatggcagggggctgcacccaagatgaagtggtctgaacagaggatagagttctcggaagaagatcaccccaagaccgccgtcatcccaggacgatatccgatcgtggtcgaacccactattcggaacatcaagatcacctttgatgtagctgaattcgatacaacttacaacgccatcatcgggagaactgcacttgcgaagttcatggccgcatctcactacgcgtatcaagtgctcaagatgccgggaccgaagggaacaatcactattcaagggaacgcaaagctggaggtacagtgcgacaagcggagcctcgacatggtcgagcaaacgcccagcccacccgccacgactgagccacccaagaaaccgtccgacatgccgggggtccccagggaggtgattgagcacaaactcatgatgcgacccgatgccaagccagtaaagcaaagactgcggagatttgcaccagaccgaaaacaagccatacgagaagagctcgacaaacttctcaaagccggcttcatcagagaagtacttcatccagagtggctagccaatccagtcatggtgcggaaggccaacggaaaatggagaatgtgcgtcgacttcaccgacctcaataaggcgtgccccaaggatcacttccctctccctcgaatagatcaactggtggattcaacagccggctgcgagctgttgagcttcctcgacgcttactctggctaccaccaaatcagcatggcaaaagaggatgaagagaagacaacattcatcacgccgttcggggtattttgctatgttaagatgtcgttcggactgataaccgcagggaataccttccagcgcatggtccagggcgcacttagggaccagctcggcaacaatgtcgaggcatacgtcgacgacatcgttgtcaaaaccaagacaggcgactcattgattgacgatctgcggcaaacgttcgacaacctccgacgatatcgcctcatgctcaatccagagaagtgcacgttcggagtaccgtcgggcaagctgctcggattccttgtttctggcagaggaatagaagcaaacctcgagaagatcaaggcaatcgagaacatgaagtcgcccacaagactcaaggaggaagccgaagaggcattcgttgcactcaagcgctacctatcaaaccgccctgtacttgttgctccccaacctaatgaagaattattcctctatatcgctgccacgccatattccgttagcaccgtcattgttgtcgagagagagaaagtacaacgaccagtctattacgtcagcgaagctctccacgacgcaaagacaagatacccacagatccaaaagctgctttacgcggtcatcatgacatcaaggaagctacgccactactttcaagcccacagagtcacagtcgtctcctccttccctctcggcgaagttgtgagaaacaaagacgttgtcggctgcattgcgaaatgggtagtcgagctgagccagtttgatgtccactttgtgccacgaacagccatcaagtcccaggtactcgccgatttcattgccgattggactatgccagataacaaatcagacaaccaagtcgacaacgaaacatggacaatggcgttcgatggcgcactcaacagccaaggagcaggggcaggatttatcttgacatctccctctggagatcaattcaagcacgcaattcacctcaacttcagggcgaccaataacatagtagaatacgaaggactactcgccgggataagagctgcagctgcacttggggtcaagcgactaatcgtcaaaggggacttcgagctagtcgcgaaccaggtgcacaaagattataaatgctctaaccccgagttatccaagtatctcgcagaagtcagtaagctagagaaaatgtttgatgggatcgaggtccgacacatctaccgcaaggacaacatcgagcaagacgacctagcacgacgtgcgtccagacgagaaccgctcaagcccggcacttttctcgacatccggacgaagccatcagtgaaagaggttagcggcgaagttagcccggacacccccgacattagctcggaggtcaccaaggcagaacgcgccgttgccgatatcgagaccacagacaactggcacatcccactaatcaaattcatcaacagcgaggagttgccagaggacgatatagaggctgagaaaataacccgtaaagcaaagatctactgtatggtcggcaatgatctatacaagaaagcgtcaaacgggggcggctacagattcctattcgtggcgatcgacaagttcaccaaatggatcgaagcagtacccacgggggaaatcaaggccgacaacgccatcaaattcatcaaagggatattttgcagatacgggctaccgcaccgcatcataactgacaacggctcccagttcatcagcgccgatttccaggattactgcatcgggctgggggtcaaaatatgcttcgcctcggactctcaccctcaaagcaacagacaagtcgagagggcaaacagcatagtactacaagggataaaaacccgcgtctacgacagactcatgtcacacgacaaaaaatgggttgaagaactcccatcagtactatgggccgtacgcaccacaccgacaacgtctaacaaggaaacacccttctttctcgtgtatggctctgaggctatgctccccgacgagctacgacatcagagtacacgagtacagaagcactccgacgaggaccaggaggaacagtgggacatcgatgtaaatcttctcgaggagcatcgtgaacgagttgccatttga

SEQ ID NO: 81605 - DNA, 530 bp, Oryza sativa
  Clone ID: PAT_MRT4530_81114C.1
ttgaacatatcaaccaattcttggctcagtgcggagatatctataggtgaacatatcaaccaattcttggctcagtgcggagaagtatcggtcaaggatggtttgaatgttagattatttcccttattattatctggatcggcttttacatggttttcaccattaccttcaaattctaccaagagatggaccgatctagaaaactagtttcataagtatttctttactggaatcaatgagatgaaattcacaaatttaacatcggttaagcaacgagtagatgaatcggttccagaatatattcaaagatttcttgatgttcgtagctaatgctataatttgagcttaagtgataggcgattagcagaattggcatctcaaggtttgttaagctctataaaggaaagatttttctctcaagagttcgagagtttagctcatctgatgcataaaatattggctcatgaaagctgattacaagaggcaaaggaggaacaaattttgctaaatgctatatgtatatttgctta

SEQ ID NO: 81606 - DNA, 2644 bp, Oryza sativa
  Clone ID: PAT_MRT4530_81115C.1
cggcgtcgcctccgtttcacgcggagaccaccggagacgcgtccccgctggcaaccagtggcattggtgccactgtactccctccagccggctgctgtccctcgtcggagcgtcggccgacgtcgccgtctccttcgtcggtgccgtggcatcgtctccttccccggccacacctcggtttcgccggaacaccgccgtgtcgccaccaaccctccacccggctcggcggagtcctccggccgcccgttcctcctcgcttgtttaccggtcagccctccgcggtccatcgtcgttgtctccgttcgttctcgtcgtcgacgtcccgtcagtcgccggctcgtcgtctcgcggcgccgcctccgtcgtcggcatcgcagcggcgtgttccacgccatcctcgcctccgtgcagccgctgccggctgccctcgtcgcctcctcgccggccccggtcgtcgtcgtcgtcgtcctctcgtcgctcccggtcgtcgtggcgttcgtccctccgtcgagccgttctcgtccgccgcccgcgtttccccaagtgtgcagcagccccgtcgaagtcttcgtcctcggctccgcgtcgtcaagcctcgtgccggccgcgtctcgcccgtgtaccggtgtcggtagtcgttcgcttgtgcgtgtggtgaccgtgtttgtgtgcccgctcggtagccgcgtggtttctacgtgtgcagcccgtgtggtgtctagtggagtccgtttgtcggccactcgcctcggttgacacacgggatctgcttccgtcgatccgtggaccgtctctgtgtactcggttttctttttatgtattgttattgcttctttataggcttgtagctttgcttgtgtgcttcgcgtagcttctgtcgttccggaggttcccgaagcgtggttcgcggtcgtcgccgaaggttcggaaggccgttctctacgtccccctctattcaaaaccctcaaaatggttttaggctgggctcggggtgcatggttttgatagtagcacctcggccatataaggaccggtcttcgggcctctgttgcaaagcactaccgtacttccacatgtctagtgggtaaggcttagtttgtggctcagtctggttataaacaaaagtacacggatggagatggacgaagttgggggtcgatggacatctcccggcttttcctgggacggggattaatacactagcgttcgggaaaaggcaattttcccggtcgcgacagcgtttgggtgggttcgcgtattctgctgcgagaacttctgcttgagccttccttttcccactcttgcgatttttcttcttgcttgactcaggtgcgtccgtggctggtttcttttctcccccggtcttcggcttgtcgttcttgcgtctcaacgcatcgtcaacgtgggcacatcgctcaacaatttcgaataatctccgagtagttcttatgcgtcttgtcgccaactcctgggtagtatagtgatctcggacaccggacttgaaggcgcgaattacagaagcatcggtgatttcggggattgtatttctgcactcgttaaagcgccaaacatattccctcaaggattcacccgagttctgtgtcaacgcatgtagatcgtcttcgatcgcgtggcgcttgtaagttcgaggtcgtcggctgggttctcgagaatcctgtcgtcgccctccgttgttgtcccggcgccgatctctgtcgtcctcgtcgttatagcggcatcctcgaccagtatcgccttgcgtccgcctctcgcaatcatcatgatcgtggcgattgtggcgattagtacggtctcggtcttcattatcgcgatgtcgtgaagagacgcgatgtcgggagcgattcccatcgtctcgtgtgcgtcgtgcctctcggcgaccattgaggtggtcacagagatcgccggtgccgcgaggtggaggggtagctcgagggggtgactcccgctgttcgggatttttgccattgacgccgccagttggtggctgttcctggtgcgtagcagcagcggcctcttcaaacgcgtggctgaggttggttactgattcccgtagccgttcctgccaccgcgcgagatcatcgttcagaacgggatcgtaaggagtctccctcagtattgtgttaagggtcctgatgtgttgggccggtgtagtcacttgattttccgcttccgcattagcgtgtgctgacttgctggtcccgttgatagctaatagctcgcttgacgtactcattggtgatgagccgtagtcctcgagtagatgtagaactgatggtacgtgggaatcgatgtcgataacgccaacgaaccgatctgagaccagcgttccttgttccttgtcttcatctctaagggatatgcctgactgctggaccttaggagatgacgtctttgtggtgctgagaaagaccttgcagcttgtcgcgtcggaagttattctcgtcggctcgtggttcttgtcggaaagacaaggttcggccgcattagaatccttctcgagctcggatgttgtcaacgttccgttctccgcttcggcgggaggatctttcgacacggagtcgtcctgggttgtagctactgtgttctcgtttccggtcattgatggaccagctgagatcggcat

SEQ ID NO: 81607 - DNA, 2678 bp, Oryza sativa
  Clone ID: PAT_MRT4530_81116C.1
gcagcaccacccggtgaccacaccaaaccaccccaaacaccaccacccccacctccctccctcctcacacttgtccgctctcttcttcttcttcttctctcctcacttcgctcgctccctcggtcgctcggccgccatgtcgtcgcaaggagcaggaggaggggtaggggacccggagctgttcgcggagctgtggcgggcctgcgcggggccgctggtggaggtgccgcagcgggacgagcgggtgttctacttcctccagggccacctcgagcagctgcaagagccgacggacccggcgctgctggcggagcaaatcaagatgttccaggtgccgtacaagatcctctgcaaggtcgtcaacgtcgagctcaaggccgagacggaaaccgacgaggtgttcgcgcagattaccctgcagcctgacccggatcaagagaatctgccaacattacctgacccgcccctgccggagcagccgaggcctgtggtgcactccttctgcaagatcctgaccccatccgacaccagcacccatggcgggttctccgtgctccgacggcatgccaacgagtgcctcccgccactggatatgtccatggcgacaccaacccaagagctcatcacaaaggaccttcatggatctgagtggaggtttaagcacatctacaggggccaaccccgtaggcatcttctgactactggatggagcacgtttgtgacatcgaagaagctgatttctggcgacgcgtttgtctacttgaggagtgagacaggagagcagcgtgtcggagtgaggcgtcttgtgcagaaacagagcacaatgccggcatctgttatatcaagccaaagcatgcatcttggtgtgcttgcaagtgcatctcatgctatcaagactaattcaattttcctagtgtactacaggccaaggttaagccaaagccaatatattgttagtgtgaataagtaccttgcggctagtaaggttggatttaatgtgggcatgaggttcaagatgagttttgaaggggaagacgtcccggttaaaaagttttctggaactatagttggtgaaggtgatctttctctgcagtggtcaggttctgaatggaagtccttgaaggtccaatgggatgaagtcacaaatgttaatggccctgagagggtttccccttgggaaattgaaacatgtgatggcactgcacctgccatcaatgtacccctgcagtcagcaacgaaaaacaagcggcctagggagccaagtgaaactattgaccttcaatcactggaaccagctcaagagttttggctatctggaatgccacaacagcatgagaagacaggtattggttccagtgaacctaattgtatctctggacatcaagttgtttggccaggcgagcatccaggatatggtgccgtgagtagttcagtttgtcagaatccgctagtacttgaaagttggttgaaggatttcaactcttcaaacaagggtgtctcccctaccttgtcagagatttctcagaaaatttttcaggttaccagcaatgaagcaagaattgctacatggcctgcacgttctgcttaccaagctgaggagcccacttccaagttgtcttcgaacaccgctgcctgtggttaccgaactgaagaagttgctccaaatgcgtccaaggttgttgaaggaaaaaaggaacctgccatgtttcgtctgtttggtgtggatttgatgaaatgtaccagcatatctactaccactgatgacaagtcaagtgtgggagcaggagaagcttcagccaaaggtactggttctcacgaagactctggtcagctgtcagcattctcaaaagtgacaaaagagcatattgctgcggatgaaagcccccaagagatccaaagccatcagaattacaccgctagaactcgcataaaggttcaaatgcatggaaatgctgtgggcagagctgtggatctagctaatctagacggatatgagcaactgatgaatgagctggaagagatgttcaatataaaggacctcaaacaaaaatggaaggtggctttcactgatgatgagggtgacacaatggaagttggagatgatccttggctggaattttgccagatggtcagaaagattgtgctctatcccattgaagacgagaagaagatcgagcctcacccgaagttactgtcttcagctaatccagagcaggatcagaagactgggttttaggagggaggctagggctgaaaggtggattttttagcctttcaccattgaagcgttggtggctatcgttttgtcgttggagatggtcgtagctgaaaaaatggtggctactggctagttcatcgtattgatgcaacagatttgttgctggtgtcaaaactgtttcttcacaagcattttgaagaacaaattgatgtaacataggtttcaagaaaaaaaaagatttgacaatgtctctttagtagtttgctcaagtttagtcaaaaccttaatggtgcttaaggaataacgtgaagctataaaactggtgtgtaagttctgtaaatattataagggagattataattttgtgatattagctttcaccctttaatttattggtatatattgaaaaaaaaaaaaaaaaaaaaaacctgcagcccggggatccactagtttagagcgc

SEQ ID NO: 81608 - DNA, 351 bp, Oryza sativa
  Clone ID: PAT_MRT4530_81117C.1
ctcacccatatagaactagaacagattattaatcaaaaattaaatagttatgctattaaagactttgtcccaaatggtttacaagtagaaggtaaaaccaacattcaacgcattattaccggtgtgactgcttcattgccgttaattgaacaagcaattgctaagaaagcggatgcaatattagtgcatcatggctatttttggaaaaatgaatcgccttgtattcgtggaatgaaaagcaagcggataaagcagttattattgaatgatattaatttatttagctatcatttgccgttagatgttcatcctgaattaggtaataatgctcaactagctgagaaattgggt

SEQ ID NO: 81609 - DNA, 3027 bp, Oryza sativa
  Clone ID: PAT_MRT4530_81118C.1
atgccgcgttacaagcctgagtacctgtttggtgttgagggttttgtccaggagttgcgtacgatgtcctttgtcattggatttgggactgcccctttttatgcccagattcctcatgatcgtcatgaagagaagtgccgagtcaaagtcaccttcaacagtaatagtgaagatatcccctcagtgatgtttgaagctggaggaagaaactacatccatgtatgtcaggaggtggcaaggatcgccataggagagctccgtgatcgctacagtgatcaattggccgacactgagtatcgctaccatcctcgccaaccccagggaagtgaccgtggcagttaccttgagactgaaggaattgagaatgatgctaccacgaagcatttggttgagatgttgtgggctatggatgaaagtcgtgcggagactgtgttagccgctcaagatcgtgaagaccggaatcgtggtaagatttgcaagttagaagacaaggtggatcgtttggagaaggaattagccgcattgaagggagaagcaccgccgcagaaggccaggattcgtcttaccgcaaggaagagagctctatttgtccctcgctatcaactggcgccaaaggttcgtgtggtggagaaagaagttgccccagctcaagcggatcctccggtcatcatcataagtagtgatgaagaagaagaatccaagcgcatcaattccaagattgagtgggtagcaactcaagatgataaagacaagccttcaatcgacctccgatgcttggaagaactagatactactaatcctgttgaagctagtgattggctgcatgccatagagaagaagttggatttacttcagtgtactgatcaggagaaggtctcatttgcatcacatcagttgcatggccctgcctctgaatggtgggatcacttccgccttaacaggactactgctgaacctatcacttggcttgaattcaccgctgctttccggaagacgcatataccatcaggagtagtgtctctcaagaagaaggagttcaggtcgcttacccagggatctcgctctgttacggagtatctgcacgagttcaatcgtcttgctcgttatgctccggaagatgtgcgcaatgatgaagagcgccaggagaagtttttgggaggacttaatgatgagctttcttacccactcatggttggagattatcctgatttccagaaattagtggataaggctattcgtcaggaggacaagtacaatcgcatggagcagaagaaacgtcggattgctcaattcaagacacaacagggaaataatcagaaaccgcgtcttactttaggaccccagcccatgccacagggaggttcttcgtctgttgttcgtccgcagtgtcagttcttcaacaacaatgctggcaacaacatccgtaatcaagctccacgtcctgttgcagctctagcacagcaacaacctgccaagagggagcaaggcagcaagcccgtggtgtgtttcaactgtggagatccaggacattatgctgacaagtgtccgaagccccgacgcgtgaaggttgtccctgcccagaataactctgctgtaccagcatctaaggctcgtgtaaatcatgtcgctgctgcagaagctcaagatgctccagatgtgattttggtccgggagtatcctgatgtgttcccagatgatttacctgccttagaagcgaagcccactctaattgatcaagttagagaagcccaaattaatgatcctgatattcaagagatcaagaagaatatgagaagaggaaaagctattggtttcttggaggatgagcaaggaactgtatggttgggtgagagaatctgtgtccccgacaacaaagatctaaaagatgcacttctgaaagaagctcatgatactttatactccattcaccctggtagtactaagatgtaccaagatctcaaggaaagattttggtgggcaaccgtcgccgtcgctcgggaagaccaccgtcgtgctcgccaagtcgtcgccgtcctcgtccgccccttcgccgtcgccggagatcgccggagcttcgtcgccgtcgacaacccgaaggtttccgccgtttcctcctcgtcgtcgtcgtcgtccgttgtttttccgccgccgttttggtcaccggtgtgttcgccgcgtcgtcctctacgtgctggtgccctccgtttgcgtcctggtgccgccgttcgccggcaagcgtgcgccgcccgagccgtccgctccgccgagccgccgccgctgtcggtgacgtcaccgttgacgtcatcggggtcgtccgccggcatccccgcgccgacgccgccgccgtatctcgccgtcgtctcgcgctcgtcgtcgtcgccgccgtctccgcctcctccgccgccgccgcatctctggggtgaacaagggcaggcgatgatggaaagaaacaaagaaaatgccgccaagaagaaataccatcactacttggggtcaggcggctatagcgtcgcgatgccgaagtgggaggagatggaggctagcttgcttgagaggggtatcgaaccggccaccgctaattggccggaacgatcgaagttctggtactatgctcaaggtggaacgctcaacccagctgatggctcactggtcttcggcgatcagatacgagaggctgcgcatcgactaacagacgcaatggaagcctcttctcagggcacgttccgaccggacagagagagggtcgagctgtcactcgccctgcagactccagagcatcaaggacgaacacgagggaaaggggtgattccttggaagattgggttcaaggaggacatccacacgtacaggagtcggatgaggagcaagagagataccttggcgaagattgcagatctagagttcagggtatcgagctacgagcgcatcatacaagtggaggtggcaaggaaggttgatgaacgcatggccgcacatcagtcccatgatccccagccgaccattcctcctgcaatggtgagcccgtaa

SEQ ID NO: 81610 - DNA, 4110 bp, Oryza sativa
  Clone ID: PAT_MRT4530_81119C.1
atggttcgcccgagcttccctgcactgcacggcggcagcggcagcccactcctcccggctttagtggcgaatgcccagcagttctggaatgagtgggagatccagtgccttgtgcttgcgagctttagcttgcaagtgttccttcacttcttctctagcattcgcaagggtaacacctcccggttattaagctcgctgctttggctggcatacttgttagccgactacgttgcaacattcacgctgggtcgcctgacgctccacgttgatgatccacgccatcagcttgtgctcttctggacaccgctcctgctgctgcatcttggtagccaagagacaatttcggccttctccattgaggatgcaatgctgtggaagcgtcacctccttggcctcgtctcccaggtggccctggcaatttatatcgtagcaaagtcatggcgtccggacaagcaacttttggggcccttggtgcttatgttcatttctggaacaatcaagtatgcggagagaacatgggcacttatgactgccagcagctcaatgtcgccagggagcgattccatggcagatcatgtgctgggggtacaagacgatgttatcttagacgctaaatcctattttgatgagttgcatagtattttccctgggaagaatgtgctggacattgaaggtcacaatggaggaagaagaacagatgacgatggctatgagggtctggtgatggctgctggcaagggcttccggttatgccttgattttctgacagacatgacccctttcctggtatggtctaacacagacactataattgatagtgccattaagaagctccgtacttcaaatcctgaaacacaagtgcagatggcttataaactggtggagatccagctctcacttatctatgattacttatacaccaagtatggggcacttcagttccgccttggccttgtcagcagcggaatcgagcggctcattacatttttctcaactttggcagccctaggcttgtttgtgggtgccaatctcaaggggccattcaactacagcagagaagatgtcatggtgtcctacgttctgctagccggtgcaatcacactggacatatcctccatcttcatgcttatctcgtcatattggctgcagttacaccggagaggtggcttgtttggctgttctttcagtcttgccaagtgtgttcatgcagggagcaaaccactgtggtcagagaagatagcgcagtataacttgattgatgcatgcatccaagaagaacgtggtggcataatatgcggttgggtgatgaggaggacaggcattgtgtctgacatcaatatgagtaatacagtctctcctgaactgaagaaattggtactggacaaactgttcgaggtagcaagcacccggagtgtaagtgattactgggactgggatttcagcaagtaccgtggcatgtggttgcagtggtggctgcaggaggggagaatccaagctgacatagctcaaggaatactaactgatggcataaccgacactgacttgtattttccaatgacagtcattgtttggcacatcgcgacggagatgtgctggttcgccgacgaggatgactattccccatgcagggccccgagcatggagctgtcaaggtatgtcatgtacctcgttgcaaaacgggatgtgatgagtggcagcaatggacactttgagcttggcaaggcacgccgccaggtgaagcgcatccttgaaggacggggtatcagtgatgagagggggctcctgaagtatgcacgacaggcaaccggccaggtgaccgaaccatgcttcggtcgtggccgggcaatctctgagcaccttctcaaaataagcaacagagctctgcgctgggagctaatctccatgctgtggatcgagatgttgtgctatcttggacccaattgcggggctcagttccatgccaagcatttgagcactggtggtgagtttgtcacgcatgtcaggatcctactggttgttcttggcattccttttctcagttcaaatcttgtgttccttatgctaaagctgctttcctcctgtctgatacgtcttagaagctcactggcacgtgccctgcaactctggaacgagtgggagatccagtgcctggtactagcgagcttcagcttgcaagtcttcctccacttgttctcaagcactcgcaaggctaacacctcccgtgttctaagctttcttctctggctggcctacttgtcagccgactacattgcgaccttcacactagggcgtctggcgctctacgttggcgatccacaccatcatcagctcgtgctcctctggacgcctctcctgctgctgcaccttggtagccaggagacgatctctgccttctccattgaggatgcaatgctgtggaagcgtcacctcctcggtctcgtcacccaagtggccctagcgatctacatcatggtcaagtcatggcacccggacaagcagctcttggcgccattggtgctgatgttcatctctggaacaatcaagtatgtcgagagaatattggttctcatggcagctagcagggcgatggagccaggaggtgattctgtggcagatcatgtgatggatgtacaagatgatgttatcatcgatgccaagtcctatttccgagagctgcataatattttcccggggaaggaagtgcaggatctagatgtccgtgatggaagaataagagaagctgatgaagcttaccagggcctggtgatggctgccggcgagggccttcggatatgcctaggttttctgactgacatgacccctttcctggtatggtcgtctaaagaagacactatcattgagagaaccgtcgagaagcttcgtagttcagatcccgacacacaggtggagatggcttataagctggttgagatccaactctcactgatctatgactacatgtacactaagtatggggcgcttcagttccgccttggccttgtctacagcgtaatcgcccggctgattacgttttgctcaacctcggtagccctaaggttgtttgtagggaccgatctaaaggggccattcaactacagaagagaagatgcaatggtgtcctatgtactgctagttggtgctgtcaccctggacatatcctccatcttcaagctcatctcatcatattggttgcagttacaccaaacaggtggcttgtttggctgtgttttcagccttgtcagatttgttaatccatggagcaaacccctctggtcggagaagataccgcagtataacctgatcgacgcatgcatccaagaagaacgtggcagcataatatgcggatgggtagtgaggaagacgggtatcatgcctgacatcgacatgagtaagacggtctctcctgaactgaaaaagctcgtattggacaaattgactgaggttgccaccacccgtagtgtaagtgactactgggactgggattccagcaagtacagtggcatgtggttgcagtggtggctgcaggaggggagaatccaagatgacattgctcaagggatactaaccgatggcatcatcgataccgtcttgtattttccaatgaccgtcattgtttggcacatcgcgacggagatgtgctggttcgccgacaaggatgatcgctccccgtgcagggttccgagcatggagctgtcgagatatgtaatgtacctcgtcgtgaagcgtgacgtgatgagtggcaccaatgggcattttcggcttggtaaggcacgccgcctgctgaagcgcatcattcgagcttccaccgtccatgatgagaagacactcttgcggtatgtgcggcagtcacccggggtgactgagccatgctttagtcgtggccgtgtgatcaccgatcaccttctcaagataagcaacggagctcagcgttgggagctcatctccatggtgtggattgagatgctgtgctaccttggaccaaactgtggggctcagttccatgccaagcatctcagcactggtggcgagttcgtcacacatgtcaggatcctactggttattcttggcattccttttctaaggtcggacatgaaaccaggaaagttttga

SEQ ID NO: 81611 - DNA, 652 bp, Oryza sativa
  Clone ID: PAT_MRT4530_8111C.1
atccccgggctgcaggaattcggcacgaggcatcaagctttgttggtgcggacttgaaggcattggtggataaagcggggaatctagcaatgaagagaataattgatagaagaagagctcagttttgtcaggagcatgatgaaaacagcaagcacgactggtggagacaaccttgggatgcaaatgagatagagggcctgagtattacaatggatgattttgaggaagcaaccaagatggttcaaccatctttgagaagagaaggattttcttctatccctgatgtcacatgggatgacgttggaggccttgattcgctaaggaaagagtttgaccgctacattatccgatgtatcaagcaacctgaagaatataagacatttggattgaatatgcaagctggctttttgctgtttggaccacccggttgtgggaaaacactgatagcaaaagcagttgcgcatgaggcaggggcaaattttattcatattaaggggccagagctgttgaacaagtatgttggtgagagtgaatcagaagttaggaaaattttcatccgtgcacaaactaatacaccatgcatcctgttttttgacgaggtagatgctttgacaacaaaaagagggaaagaggggggatgggttgttgaacg

SEQ ID NO: 81612 - DNA, 660 bp, Oryza sativa
  Clone ID: PAT_MRT4530_81120C.1
atggatttattgcgtcagccgaggggaggggcgcgcggaccgggtccacgggggtggggcccacgcggcagccccacggtccacggtggaccgggcgcacccgggctcacaccggccggcgccgtgggtcccacacgtcagccgcacccgagggcgcgggcggctgacagccgggccccacgcggcagccgcacggtgcgcccgaaggcggccacgccggcgcagcggcgggaggcggcgcgcccgcgcccctatggggtggacgaggtcgccggggatgcggcgaagccgaaggaggcggcgccgaggggagaggtggtccggggcgacaacggcggcggaccggagctcggcggcaacgacggagagagagggcgacgagtcgctccagatacttacttcaagaacatcaaagaagctggaagtatgggagcaagtctggcgttggcgatgaccaaatccctttatccaagagttgatatggatgccattgatggctttgcagacgggacgagcgaagaagctgctcttgacctcattaatgatgcgcagaaagccgctgacaaaattgctgctgacgtggttgagagattccaagatgtcgaccttcggccgactgggtctgataattcagatgatgaaaaaactgatactgattga

SEQ ID NO: 81613 - DNA, 1821 bp, Oryza sativa
  Clone ID: PAT_MRT4530_81121C.1
agaagccaagaacccatttttgtgctttgtttctgcttgttatatggagtttagtagagtaaaagccgtttcttttccgttggtcgtgtagacgctgcagcttcggaagatccgctcttcgtggaagttgaagccgacgtttgggaaagcgagcaaggcaagtcacatcatctccccctctattcaaaacccccaaaatggttttaggctgggctcgaggtgcgtggttgggttttgctagtcgtacctcgggtactataaggattaagctcgggcctctgttgcaaagcactaccgtacttccacatgtctagtgggtaaggcttagtttgtggctcagtctggttataaacaaaagtacacggatggagatggaggaagtcgggggtcgatggacatctctaggacaaatgaaggctacacgagctgcggcccggtagtcgagatgtcatggcacagggccggtgtcctgttgctgggggctcagtcctgcctacctgtcccgggggttccggccgttttatccacttggcttatcctacagtcgagatggctctgataccagcttgtcgcgaccgagaaaatttgcattttcccgaacgctagtgtattaatccccgtcccaggaaaagctgggagatgtccatcgacccccgacttcgtccatctccatccgtgtacctttgtttataaccagactgagccacaaactaagccttacccactagacatgtggaagtacggtagtgctttgcaacagaggcccgagcttaatccttatagtggccggggtgctacttgccacaactggcatgcacccaaaccccaccggaaaataggttgtaggggttttgaaagaggaagagagagagaacggccttccgaaccttcggcgacgaccacgaaccacgcttcgagaacctccggaacgacagaagctacgcgaagcacacaagcaaagctacaagcctataaagaagcaataaccatacataaaaagaaaaccgagtacacagagacggtccacgggtcgacggaagcggaccccgtgtgtcaaccgaggcgagtggccgacaaacggactccactagacaccacgcgggctgcacacgtgaaaccacgcggctaccgagcgggcacactaacagggtcaccacacgcacaagcgaacgactaccgacaccggtacacgggcgatacgcggccggcgcaacgcttgatgacgcggagccgaggacgaagacgacgacggggctgcagcggctcacttgacggaacgcggacgacgaacgcgaacggcttgacggagggacgaacgccacgacgatgaggacgacgaccgggaccggcgaggaggcaacgagggcagccggcggcagctgcacggagacgaggacggcgtggaacacgctgctgcgaatccgacgacggaggcggcgccgcgagacgacgagccggcgatgtcacgatttatcaagcggaagcgtaaatattactttattacatgggcggcgaaggcccagcacacacaaagacaaacgggaaacagcggaagactagggggagggggcgcgcggaccgggtccacaggagtggggcccacgcggcagcctcacggtccacggtggaccaggcgcacccgggctcgcaccggtcggcgccgtgggccccacacttcagccgcacccgagggcgcgggccgcttacggcccggcccccacccggaaccaatcggggggcccaaggcggcctgccggggcggaggtggaaggggggctctgtgggggtccggcccgatgcgccacactccacgcaaggtct

SEQ ID NO: 81614 - DNA, 327 bp, Oryza sativa
  Clone ID: PAT_MRT4530_81122C.1
atgcaggccccacatgtcagcggctgcgggcgctggtccatggtggatcgggtccacggaccggggaaggacggcgcaccacgtggcgctgacgttgcgccgacgcggcggccacgcggcagccacgtgggcggccgaacgggcggtcccgatctacccaagggtagatcggacggcgggggtggctcgcggccggcgcgcgcgggcacggctcaagccggcccggcgaccatggcgcacggcggcgcgacgcgcatgcggcggtggtgcgggacggcgaccggcggcgaccgaccggcggcggagagcggtggcgcgggcggctaa

SEQ ID NO: 81615 - DNA, 521 bp, Oryza sativa
  Clone ID: PAT_MRT4530_81123C.1
gcacgaggcctcgtgccgaattcggcacgaggtcctcaagttgtgcaatgttgattacctcatctttctattttttatcatagcagacttacttagagaagggatgctagagaaattgcaaaatatcatgaaatacgcagttggctcttagagaatgatagttcaaatttgtgctacctaagactgacggtaattttttagtagcacaggatctggatattaggtggtatatactacgtactataccgcagcatggaaacattagagaacttttcgacaatctatgtctttgcttgttataaactttttttttgtttctacacatgtcaataataacggtgagaattgatctggcaccggacatggtatattgaatttgtttcaaacactattcaagtagtctttagtgtactcctatattgttctatgacttactgatagatgggtatccaattgtaaattacaaactaaattattgagcatatgatgtacgcagtattcaggttatgagcattatggtg

SEQ ID NO: 81616 - DNA, 1198 bp, Oryza sativa
  Clone ID: PAT_MRT4530_81124C.1
ggtacggattgagggcccgggggacccaccccaaaggaaaggattctgaacctgcacactgcactgggcatattatcccaaagacccggccaagatgtttccagacaagatagtcatgacaggttatcggctccctgaccagtacagatagaagaacctgagttagctcaatggatgttttgctatacagatcggccgggagagagagagagagggaggagagctgaactgaagtcgccggcgccgccgcggagaagcgaagcccggcgatctacccgaccgtggagagggagcagctcgtcggggaggagagggggaggatgcattcgttcgggcaccgcgccaacgcggtggcgacgttcgcggtgaccatcctggccgccatgtgcttcgccgcctccttctccgaccacttcaactccccttcccccaccgcctctgtcaagatcttgaacataaactggtttcagaaggaagccaacggcaacgacgaggtcagcatgacgctgaacatttcggctgacctctcgtctctgttcacgtggaacacaaaacaggtctttgtttttgtcgcagctgaatatgagactccacaaaatgccttgaatcaagtttccctctgggatggcattataccatcaaaagagcacgccaagtttttgatccatacaacaaacaagtacagatttattgaccagggaagcaacctcaaaggaaaggattttaacctgacaatgcactggcatattatgccaaagaccggcaagatgtttgcagacaagatagtcatgacaggttatcggctacctgaacagtacagatagaagaacctgagttagctcaatggatgctttgctatacaaatgcagtggttattgcggggagcagacatgggagaaggtttagtagcagtaacattgcctatgctaagttttttgttctaatcgtagcaaaacatgtaatcttttgtgcttgtgttctagctgaaaccaggcgatacatatgttgtttgactcgtcatccagaagttgagaaagatgtaacagtgtagtgcccttttgatcgagaacccaggcgttgcaaacttgcaatcacgttaatttcaatgtttatgtagcaaatcctagtatttgcagagtcgacgtttgaaggaagagtgccttggttttttctttcccaaaaaaaaaaaaaaaaaaaa

SEQ ID NO: 81617 - DNA, 486 bp, Oryza sativa
  Clone ID: PAT_MRT4530_81125C.1
ccaagtgccacaagcaccttctgttgaaggagcttggagtttccatggtcgtgaactgaacaaatcctacgagtggctggttcccatgtgcctgtaagaggttcctggaattgaaagcctggtgtttaccaactagagattatctttgtataccataatgttgaggacctttgccgtgcggctgacttcgttcaaagccacccgttgcagctctgggcaagctaggattcaggagcttggacctgggagctgatattctccctcctgttctctgcttctatggctgcggaggatgagataaagtggagttgggggcaagtgagggcagtgagggtatgaggctatgagctacctcattatttttcagcattcctgattttctccaattttaacttacatccattctttattttagagtgtttatataggtgtaattcactcaatatgtatttatattactcctttcttggcaaaaaaaaaaaaaaa

SEQ ID NO: 81618 - DNA, 309 bp, Oryza sativa
  unsure (1)..(309): unsure at all n locations
  Clone ID: PAT_MRT4530_81126C.1
gcaggattcggcacgngacntcncgannacgntangatgcnactcntacntccncangctagccngcaagcagctagctancgcatcggcaatngcgatngtgggcgaagngtnctgctccncggaggagcgggtgctcacggtgcgcaagacctcncacttctcccccggcgacggtttcncggnctnngacnnncgcancggcggcctcgccttccgcgccnanccctactgccgcngnctccnnnggggagccncctcctccggtgngctcccnctcctcgncttttttngngntnccactgctcc

SEQ ID NO: 81619 - DNA, 399 bp, Oryza sativa
  Clone ID: PAT_MRT4530_81127C.1
atgcttgcgtcagcgtcacgtcacgggcaaccccaacggaacggaacggcggcactcccaattgatgccgaccgaacacaccgatccacgtacggcccagaacctccaggtgtagaacaccagaacttcctatctgctcaaaaagttcggaacttccggtgttcttataccggaacttccgggcaacagacaaattcaggaatcactaacaggaacttagccaaaattcacgagatgaatcacagaaaacaccacactaggaaaacctctaggacttcagcacaagattctttactcacttacctcgtttccttgcggagaatggctcaagatcaggtggaggaagcaaataaactcttgggagaggctagcaacggctatggaatggaaaagcaaaag

SEQ ID NO: 81620 - DNA, 201 bp, Oryza sativa
  Clone ID: PAT_MRT4530_81128C.1
atggtgacacagacatttatactggttcaggccctcaatgcgagccgccaccctccacaggccgcagttgcctcagctcccttcatgcgccgtgcaggagttttacaagagagcagcagccgccgagggacgacggtgatgaccggctacgctgcgtcatgctgtccctcgacgccgaccaccgcgggaggaacagcatga

SEQ ID NO: 81621 - DNA, 363 bp, Oryza sativa
  Clone ID: PAT_MRT4530_81129C.1
atggcatcggaaagaatgcatcaatcccgtagttactgttgccgagtcccatgtgttctatcccattatcatcgcgaaaccacaagccctgcacgcactgacggaggatatggccatttgtttacgtcgttcgagtacaatttgatactacagggacccaaggacgtacagttcattctgaagatcaccacacaactcactttacagcaacagttcaatgataacattctactggctgtaaaatctagaaagatactgagtgactacaagtggatccagacgagcaatctctatctttcaacaagatatatgagcagtcatgccgagaccaatgaggcaatggcagctactactctcctgtga

SEQ ID NO: 81622 - DNA, 165 bp, Oryza sativa
  Clone ID: PAT_MRT4530_8112C.1
caagccctgccccctgattcgatgaaccacaagctaggcgcaccagctgggtccggccccctgcgcatgtgtaatctgtcgatcgatcaggatcctagctgccctatgaatgaataaaatgttggcttatgctgttttctcttggaaaaaaaaaaaaaaaaaaaa

SEQ ID NO: 81623 - DNA, 734 bp, Oryza sativa
  Clone ID: PAT_MRT4530_81130C.1
gtggatccccgggctgcaggactagtctcgaggataaaccaatgatttttctgtaatacttcctcaaagatactaatgatacacaaaaatgctggtgatgcccataataacaccacgaaaacagcagtataccaacagatgagcaaggctcaccacataggggcagaaacactacaacttgcacatacattactgttgatcgcttcctgcttagctcagtactgttgcaaaactacagaccgtaagaagataatttctcaagatacaaaacttgcactgcctaaagcatatgaaaggaaaattagaattccagtttcctgtgaggattgctggcgatttggcttgtctcacatggtttgaaggtaggaaccaatactagctcgcttaatatcttacaccatcacagattcacagctattggggttcagattatgattgggtcctcaattcaacaagcaccaacagctatatctgattttgcacatggatacaaatacaggaggatccaacagaacagccaaatctgacgatgctgatctaacaacagttgcatcccagaagcaacagtgcaattaattttcttcattctcttacctcttccgcctcttgcttctcttcttgtcactctcatcagagctcgattctgactctgagctggagctgtctgaagcagatcctgaatcacttgatcccgactcagaagaggcgggtttctgttgttgcggacgcgtggg

SEQ ID NO: 81624 - DNA, 378 bp, Oryza sativa
  Clone ID: PAT_MRT4530_81131C.1
atggcccacgacacccgcaccattggacatggagcccccacggccagggggaacgaatcccctcatccgattgccggcggcggcaccaatggtgccatcccttccgcggcctcgacctcggcttcttccacctcttctgccgcccctggaaccaggtactggacggcgcgacggggcgatgtcggatctggtggcttggaagagtggagggctacgagcggcggcggcagagacggcagccgcgctcacggcggaggtggcggccgcgtgaggtcgcgcgcggcggcggcctcgggagctcgcggaggcggtggccgcgggagcttgcgcgtggcggaggtggcggccgcgctcacggcagaggcggcggccgcgtga

SEQ ID NO: 81625 - DNA, 576 bp, Oryza sativa
  Clone ID: PAT_MRT4530_81132C.1
atcgaacactcgtcgtccaatccaatccgatccgcgcgcgcacgagcaccaccttgggcattggcaatggcgagctcgccgatggccatggacgcggacaagcgcagctacgagatcttctccctgctggagagcaagttcctcttcggctggctggcggcggcgggtgcctgtcgtcggggccgtgcacgccggcgaggccgtttcttggcggcggtggcggcatggacgggcgggtgcgggtgctggccatcgacggggtgcggctcgtcgggcgccggggacgcgctgctcgccgcggcggcgctcgcgcggctggaggccgggctgcggaagcgaaccggggactccgacgcccgcgtcgcggatttcttcgacgtcgcggcgggcgccggcgccggtggggtgctcgcggcgatgctgttcttgaggggccccgacgggaggccgaggtacacggcggaggaggcgcttgagttcgtggctgctagcgtcgggagggactgggccggccggcgcgggcggtgggcgcggctgttccgcggcggcgcgcggggggcggagaggtcgttccgg

SEQ ID NO: 81626 - DNA, 627 bp, Oryza sativa
  unsure (1)..(627): unsure at all n locations
  Clone ID: PAT_MRT4530_81133C.1
ccgggcgantntctctctctctctctctctctctcttctcctttccctctcctcctcttcncaccaccaccaccgccgccgccgcctgattggtggtaatcngangtggaagtgggcgttattatctctacaggcagcggnncgtccnttagcagaatcctcttctgcgtnctcctccggggtgaggntanncgnnnncccanaatgttcaggnnattccncatattgcatcctgcaccgcgganttggcgcatcaaaaggccttggcgttggtgccnggcctctnganaanaaaaacggggcacttgcactgctggacgcngtggttgctgacgctccccancancgtcctctgcaggaaaccntaancatggctccccatcnccaccatnttnnngccgggcttctaccaccgccccgcanatnacatccctcgggtcccctttctccncccgcgtctccaccttcacattggggaanggggtgcaaatttctgggggctttggcgaatacagnatctgcgggggtggccatgtntcngtccatctgtcatcacctccngggtcntncangttccgccgcgntcnattnccgggtnntatanccgnccncctcggnctgnggttt

SEQ ID NO: 81627 - DNA, 760 bp, Oryza sativa
  Clone ID: PAT_MRT4530_81134C.1
tcagtgagggaggccggtggcaggcggagcaacgcacgcagatgcgggtggcgcagcagagggcaagcgccagcggagcggcggcgggcgcaagcgcggcaggccgagcagtggagcgcgagcacgaccgcgggcagagaagcggagggcgagcgcggcggcgggtggagcggtggagggcgagcatggcagcggagcggaggtgggcgagcacggaggcgcatccagcccaccccaaccgaccaaagcacaccctttgccctcggccataagccccgccgccaagtcgccgtcgccgtcctcctcgtcgtcgtcgagcggcagcgatgacttcgcggtgctcctcgacgcggagctcaagctcacctccgccgctgactcgacctccgccggagacacctccgccgccaacgacgacttcgaggaagacccctcccagccttccctccttcctcctcgagctccctcacgccggcgcccacgctgcagggatgggaagctaacagtgctggtcgtcgtggtcagctcgcttgccgcggcaacgctggtcccggcgctaaccggctgatgcgtctgcggatcgatgccctggctcatgagcttgcgcttgatgtgcgtgttccactcgttgcggcgacgggcatggagctcgctggcgcgcccgccgccgccgtcgatgaaagttgctgcacttgaggtcggggctaaggtagttcatccagtggaggcagcaactctttcggcagcggagcagcaccat

SEQ ID NO: 81628 - DNA, 825 bp, Oryza sativa
  Clone ID: PAT_MRT4530_81135C.1
ccgcgccacccgtacgccttgaacccccgaccaccccgcagccgcgtggcggcgagatccgggaggagagggcgcggcggcgcggcgcagcgcggcggggagtgggggtttcgccgcctcggaaaggttcgagaggagcgggaggtttcggtgagggaggccggcggcaggcggagcagcgcgtgcggatgcgggaggggcgggagagggcaagcgcggcagcggagcggcggcaggcgcaagcgcagcgggccgagcagtggagcgcgagcacggccgcgggcagagaagcagagggcgagcgcggcggcgggtggagcggcggagggcgagcgtggcagcggagcggaggtgggcgagcgcggaggcgcatccagcccaccccaaccgaccaaagcacgccccttgccctcggccataagccccgccgccaagtcgccgtcgccgtcgccgtcctccccgtcgtcgtcgagcggcagcgatgacttcgcggtgctcctcgacgcggagctcgagctcacctccgccgctgactcggcctccgccggagacacctccgccgccaacgacgactacgaggaagacccctcccagccttccctccttcctcctcgagctccctcacgccggcgccggcgcctgcagggatgggaagccgacagtgctggccgtcgtggtcagctcgcttgccgcggcaacgctggtcccggcgctaaccggctgatgcgtctgcggatcgatgccctggctcatgggcttgcgcttgatgtgcgtgttccacctgcagaaccaatcaatcagcaccaagaacacaagaagagctaa

SEQ ID NO: 81629 - DNA, 336 bp, Oryza sativa
  Clone ID: PAT_MRT4530_81136C.1
atgacagaggcacggcggaggaaaggggacaatcaggacggcggcggcgcggggacaccatgcaacgacgcccacgcccgaagcgatgacattagcggtgacagttgtggcgtagatcaagtgaggcgcgagaggtggaagcggggagcaccgacggcagcatgcggtgcacaggccgaagttggcggtagcgtcactagttcacggggggcgacgggatgcacggcatccaaggtgcagcaggaggacacggtgcgggagtgcaaggagcagtggcgacacatgaagggtgcggtagcattgtggcagcaactcgcctcggcccacgctgactaa

SEQ ID NO: 81630 - DNA, 243 bp, Oryza sativa
  Clone ID: PAT_MRT4530_81137C.1
atggctcgtgggcccaacctgcagaggtcaaaagtggggccgacatgtcagccgttggcccggaaaccgccacgccgcgtcgttcgcgggaagcagccgctgcgcgccatggaaagcatcggacttggcatggataagaaggcgctggaggagaaggctgccaagaaggtggcacaggccgtgggcggcggcggcggtacctccacggacaacaaaagtaaggccggcggtgcaaagaagtag

SEQ ID NO: 81631 - DNA, 449 bp, Oryza sativa
  Clone ID: PAT_MRT4530_81138C.1
gtcgttgctgccgcagagccagctgcggcggatcggcggcggcggcttcggcggcgcggtcttcgggaggaggcgcggggacggacggcgcacgacggggccggctgcgacggcagtccgggatctggagatcgcggcacggcccgcgctggtgttctacgacacacccgactgctggctagcctcgctctacctcgggttccgcttctccaggctgctcttcttcctgctctctatcaccaccgcgctatacatctccacctcgacgtttcttctcactcgacgtgctccgagccacgacgacgactacgaccaccaccacaaccaccatgaccaccaccaacaccttaatccttctacttacaagccaaaccaaacctcttccccatttaacctttccaaccacactgccctggacgcgggcagatgcggccggacacacccagagc

SEQ ID NO: 81632 - DNA, 1368 bp, Oryza sativa
  Clone ID: PAT_MRT4530_81139C.1
atgggcaaacagccggcgggcggcagcgagccgaggagccgtgcccgtgcgtccggcactgcggcgccgacgacgcgggggccggcgccgcagacgcacgcgccgccgcaggagcgtcgccaagaagagatcgtccatggcgtacggcacgccgtggcgccgggcgacggtggcgccggtaccagcgcccgtccggaccgacgcactcgtttcgtgacccaagtaacggaagtgccgcaatcgccggttcacggcgacgccgtcgccggggaggaagccgccctggcgaggaggccagggaagaagccgtcctacctgcctgcgcggctgagaagggcggaggagggtagccatggccggacgccatggtcggcgcctgctggccacccagcaccgcccgccgccgtgccggaagaaccgcaggagccgcggttaggaccaccaggattaaagccggcgaagatcttagacacccataagagtatcgagcgcaccagcacgatcagagacgaggacgacggcgtcacctacccggccgaaccggcgccgccgggccgcaccttcccggccgcccggccaccacaagatgagcctgggttcgcaacggcggcgcgacatccgcgcacgtcgccggggacaccggcgctgccgggccgcagctctccgtcaccatggcggccgcacaatgagcctgggtcgtacgcatcgccatcgccatcgtcggaggcaccggcgcggacgccggccaagtcgccgatgctgcgccctcggaacgacaagaagaggcggccggtggcgttctgcttcaccgcgtgctgcatcctcttctggctgctggtcatcgccgttggcgccgccgtgctcgtcatcttcctcatctaccacccgcagtcgcccaggatgcgggtgacctccgccaccctgaacgccgggtacgtcgacgagctcggcatcgtcggcggcgcgcgcgcgctcaacgccgacctcaccgtcctcgccgccatctacaaccccaacaccaagctccacgtcgtgctccgctacatgcagctggacctctacttccagggcagcatgatcgggacgcaggcggtgtggccggcgccgctgcacgagggcccccgcggcagcgtgctccggagcgtccacctcgtcgtcagcgaggtcaccatgacgcaggaggacgtgtacgagtggcagaacgcaacgagcaagggcgggcccgtggtgctgcacctcgccggacgcttccgcgcgcggctcatcttcggccggtggttcaagttcaactactgggtctcgccgcagtgcacgctctggctcgacccgccgcccagcggcgcgctgcgtcgcgcgcggtgcagctga

SEQ ID NO: 81633 - DNA, 468 bp, Oryza sativa
  Clone ID: PAT_MRT4530_8113C.1
gccttccgaaccactcccacttcgtgtgaacctcccctttttttccttggccctggcccccccaatagattgttaaaagaatcttttttggaataaaccaaaaccttttcaagtttccccatttccaacttaagaccggcccaccgggaataacccaccaaaaccttccccattaagtccccaaccccctcctccccaaaagccaccaatttccttccccttaaggaaggaaaaccgtttgggttaaccaaaggtcttcaaaaggttccaaccccaaaagttaaaaaccccaaatgggccacccaagccccccggaaggaattgggaagaaggaaaccttcccgggggggaaggcccaaaccccagccgggccggaaccgggccttggaaccaaccaaaagtggcctggccaagggaaggaattaaccgggtgttcccttaacccaatggccccttggtggccttaac

SEQ ID NO: 81634 - DNA, 387 bp, Oryza sativa
  Clone ID: PAT_MRT4530_81140C.1
ttggggtttttttgggtctgggggattcatgaccaccaggtataggtgctgttattattgcacaaaattcacaaaaactcaatgaccaatgcaacgtgtatgtacgtatatctatgtgcatgcactccatcatgcatcatccctggttgaccgggcagaatgtatgtgcgtgtatcaatataatgcactcctctgcatcgagcgaccagccgctgacgtaggctagcctgtcgaggggcgaccggaatttcttggcgactgagccattctggcaccggagcgcgctttcaccggcttcccaccagcaccgggtgcagaccgagggtgtgcttcagcatgaaggcctgccttgccaggatcgcgagcatccggcacctgattgaggac

SEQ ID NO: 81635 - DNA, 1935 bp, Oryza sativa
  Clone ID: PAT_MRT4530_81141C.1
atgatcacactaagaaaacgagagtttcgctacctgaagcaaggagatttgaccgtcacagagtacctgcatgagttctatcgtttggctcactatgcaccagaagatgtggaaacggatgaagacaaacaagagaagtttctccaggggttaaaagatgagcttgcagtgcaactacttctagaggattatgaagattttgagaaacttgtggacaaagccatgcaactcgaaagtgagcataatcggatgacgaactgcaagagaaggattgtcaacatcccagtatttccaggtggtaaccaaagacagcgcactgagccacttcagatcaccggatcttctgttgcgcatcaagagtttccgccccaagaagatggacgcaatgcagacaacaacactagcaatactaatgatgatgataccaccaacaaccatgattcttgctccattagtgaccactcgaacaaagcgtgcaatgtcagtagcattcaccaagatgtcaacgatagtatcaatgttggaacccagaatgacaaccttagcaattttgacactgagaaagactccaatggtgatagcaactatggtaccactgatgccaatgtcatttctctagagattgtccacagccgaagcgtaacctgcgccatcactccggccattatgcaagaagaagacagaccaaaggacctcatcgccaccagaagcatccacaactctcggagtgaagagtacttagtgaccaagaaccccctctttgcgttctaccgttttggtctcctcccaagctctcccgtggtctctagccacctccccaccgtcgccctctccctcccacgttgccggccggcctccagccgcctctcccgcctcgccggagagtcgtccggccgcgccatcgcctcctccagcgtcgccgccacctcctccacgccggcctgccctccgtttcgcgaggagacccccggaactacgttcccgccgtcgccctcctctttccttcgcgccggccacctccagccgccttcctctcctcgcccgagcgccgcccggccgcgccgtcttctccctcggcctcgcagctgcctcctctttcccggcttcgcctccgtttcgcggggaaatcaccggagacgcgtcctcgccggcgtccagtggcgtcgccaccacttctccgcctccggccgcctctgccgcgtccccggtgcaccggccgacgtcgccaccacctctcccggcaccggagtgccgtcctctctcccggccaggccacggcgtcgcccgaatttcgccggaacgccgtcgtctccgcgccggcctctccttcctcctcgtcggctcgtcgccccgctgcaccaccaccttcaccaacatcgcagcggcgtgttccacgccgtccccccctccgctcagccgctgctgcctgccatcatcgtttcatcgtcgtctccgatcgttctcgtcgtcgacgtcccgtcggtcgcccggctcgtcgtctcgcggcgccgcctccgtcatcgtcatcgtagcggcgtgttccacgtcgtcctcgtccccgtgcagccgctgccggctgtcctcgtcgcctcctcgccggtcccggtcgtcgtcgtcgtcgtcgtcgtcgtcctctcgtcgttcccggtcgtcgtggcgttcgtccctccgtcaagccgttctcgttcgtcgtcctcgcttcgtcaagatcgctgcagccccgtcctcgtgttcgtcctcggctccgcgtcgtcaagcctcgtgccggccgcgtctcgccttcgcccaaggatcgccgccgaagccgtcccctcgccgttcgtctccgttgtgcccctttcgtcgttccggaggttcccgaagcgtggttcgtggtcgtcgccgaaggttcggaaggccgttctctctgagcaaggcaagtcacatcatccttga

SEQ ID NO: 81636 - DNA, 232 bp, Oryza sativa
  unsure (1)..(232): unsure at all n locations
  Clone ID: PAT_MRT4530_81142C.1
tgcccacatcctgnnaaaaaaaaaagagagggggagaaaaaaaaaaaaaaaaaaaaaaaagaaaagaagaatataaaagaatccaaaacttacatacgggtgctatgccgttttaatatcccttgctttagagttactctaatgtcaatttactggcccgttgttattacaccgccttagactgggtaaaacgctggggtggggggggctctactctcctttgcaaaacatc

SEQ ID NO: 81637 - DNA, 939 bp, Oryza sativa
  unsure (1)..(939): unsure at all n locations
  Clone ID: PAT_MRT4530_81143C.1
attcccgggtcgacccacgcgtccgctgagtttgcccttgcccaccgcttccgcctccgccgatccccatccctcccgcgagcaggagcaggagcaggagcagggctagccgtcgttcctcctgctgcttccgccgcatccatcctgataccagatgtgccgccaccagccaagggctcggctctctcccgatgagcagcttgcagctgaagaaagcttcgcattatactgcaagccggtcgagttgtataatatcattcagcgccgatccattaaaaatcctgcttttcttcaaagatgccttctttacaagattcacgcaagacggaagaagaggagcctgataaccatatcactttctggaggcacaaataaagaactgcgggcacaaaatatctttcctctttatgttctgttagctagacctactaataatgtttcacttgaagggcattctccgatatatcgattcagtcgtgcttgtttgttgacttcttttcatgaatttggaaataaagactacactgaagcaacattcgtcattcctgatgtgaagaacttagcaacctcccgagcttgcagccttaatattatccttatcagctgtggacgagctgagcaaacttttgatgacaataactgttctgggaaccatgtggaaggctctactctccaaaagcttgaagggaagtgtttctggggtaaaataccaatcgatcttcttgcttcatctttgggaaattgtgtgagcttaagtttgggacataccgtggaaatgtcttccacggttgagatgaccccaagcttcttagagccaaaatttctggaggatgacagttgcttgacattntgctctcagaaggttgatgctactggttcatttcaactgcaagttagcatatctgctcaagaggctggtgcaaagacatgtccgagtct

SEQ ID NO: 81638 - DNA, 4386 bp, Oryza sativa
  Clone ID: PAT_MRT4530_81144C.1
atggacatctctagggcaaatgaaggctacacgagctgcggcccggtagtcgagatgtcatggcacagggccggtgtcctgctgctaggggctcagtcctgcctacctgtcccggaggttccggccgtaggtggggttgggtcagtactcttgtctatggctaggatgggttggaaactatgtcacgtcttccgtccatatacagttgtgatggccggcagcatcaaccgtcgtggcctggaccttactggctttgttttggagctgcggggcatgtgcgttgtcctggggtatccgcatggagtggactaccagggcaagcagctcctggagcaggagggtgatgatgtagagccccacgctgcctgggaggtcactgtagtggtcctcactggctctcccgagaggacttcgttggcagtcaccgcgggtggagattctttctccgccgcttgccagaacgctgcactcctcgccatcggcactcttcaccagcgctacccggacgagttgcagcactcgccctaccgctaccaccctcgtcgcggaggagcccgcgactacgccaccttcagggatgctagctcggaggatgacgctaccatcatgcacctggcgcgcatggtgcaggcgtacaacgcgacccgtatcaacttccatcatatggtgcgccgtgggttggtcgagaacaacatgaagatcctggagctgcgtcaggagaatctgcagctaaagaaggacttggacgcagtagaggcgcagctgtgtcagctcaagatcgcccagggagagatggtgacaaccaggagaagtgctgctttcctccatcacatccaaaatccgccacagcataatgctccacctctaccaccacccccgcaacattctaaactcgcagagttcctccgcatccgcccgcctatcttctctagctccaataaccccgtggatgctttggattggttgcatgctgtggggaaaaagttggataccgtgcagtgcaatgatgaggagaaagtcatcttcgccgcccatcaactgcaggggcccgcatctctatggtgggaccacttccaggctacgcagccagaaggacagcctattacttgggcccgcttcaccgccgctttccggaggacccatgtgccggccggagtcatggcccttaagaaaagggaattccgagagttgaagcaaggcaaccgctctgtgatggagtatttgcatgagtttaacaacctggcccgggtccgctacaccattccctatccagggggatcctcctcgcagcagcagcagcagcagcaaccacgctccgcgccccgacctcaatttgtggtgcgcgtcccacagccacagcaacagcagagtcagcaagggacccgtgcgccccgtcctcctgcgcctgttgtgcagcctggtcaaggccgcagagacgctcaaggtcagcagcgtctgtgcttcaactgcttcgagtccgggcactttgcggataaatgcccaaagccgaggcgccagcaaggccaagcgcctccccgccccaacaacggtggtaaggatgtcattcggggtcgtgtgaaccacgtgactgccgaggatgtgctgacaactccagacgtcatcgttggagtagtggattgcgcaaggcgcactgtcactctgtatcgggggctggaacaaccggttgttttctttgcacccccaacctctgtcggcagttcagaacttcatcagataggactgtcggaaatccccatcgtcagagagttcggagacgtgtttccggaagaactacccggtatgtcgcccaagcgagagattgagttccggatagatctcgctccaggaaccactcctctgtacaagcgaccctaccgtatggcagcaaatgaactagccgaagtagagagacagttggaagagttgaaagaaaagggatatatatggccgagcacttccccctggggtgctcctgtgatttttgtggaaaagaaagacaagacaaagaggatgtgcgttgactacagagctctcaatgaagttactatcaaaaacaggtaccctcttccccggattgatgatctgttcgatcagcttaaaggtgccactgtcttttctaaaatcgatcttcgttctggatatcaccaattgcgtattcgtgaagaagatatcccgaagaccgcattcaccacgcgatacggactgtatgaattcacggtgatgtcgttcggtctaaccaatgatcctgccttcttcatgaacttaatgaacaaagtgttcatggaatacttggataagtttgttgtggttttcattgacgacattctggtgtactcacaatcagaggaagaccatcagcagcatctccgtctggtgttgggaaagttgcgggaacaccaattgtatgccaagctcagcaagtgtgagttctggttgtccgaagtcaagttcttagggcacgtgatatctgctaaaggagttgcggtggatcccgacacggtgaccgccgtcactgattggaagcaacccaagacagtcactcaagtccgcagctttttgggtttggccggcccgcaatgcgagaaggcgttccaaactctcaaagaaaagctggtttcctcgccagtgttgatcttaccggatactcgcaaggacttcctggtgtactgtgacgcttcgcgccaaggattggggtgcgtattaatgcaggaaggtcatgtggtagcctatgcctcacgccagctacggccccatgaaggcaactaccctacccatgatttggagttggccgctgtggttcatgctctaaagatctggcggcactatctcattgggaatcgctgtgaaatatatactgatcataagagtttgaaatacatcttcactcagtcggatctgaatcttcggcagaggagatggttagaactcataaacgattatgatgtgggaattcactatcatcctggtaaggccaacgtggtcgccgacgctctaagtcgaaaaagccgttgcaacactcttggcgtccgtgacattccaccggaacttaatcaacagatggaagccctgaacctaagcatagttggtcatggattcttggctacgctggaagccaagcctaccttgctcgatcaaatccgcgaggctcagaagaatgatctagatatgcatgggatcctcaagaatatgaaacagggtaaagccgctggtttcacagaggatgaacacggaaccctatggaacggaaatcgggtatgcgttccagacgacagggaacttaaaaagttgatacttcaggaagctcatgaaagtccctattccatccatcctggcagcacgaagacgtacttggacttgaaagaaaaatattggtgggttagtatgaagcgggaaattgcagagttcgtggccctttgtgatgtgtgccagcgtgtcaaggcagagcaccaacgaccggccggacttctccaacctctccaagtaccagaatggaaatgggatgaaattgggatggatttcatcaccggacttccaaaaacccagggtggttatgattctatatgggtagtcgtggatcgactaaccaaggtagctcggtttattcctgtgaagaccacctatggagggaacaaactagctgaactctacttcgctaggatcgtgagtctccatggcgttcctaagaaaattgtatctgataggggaagccaattcacctctcacttctggaagaagctccaagaagagttgggtacccgattaaatttcagcaccgcgtatcacccgcagacagatggacagaccgagcgtctaaatcagatcctggaagatatgctctgtgcctgtgttctagatttcgggaagacctgggataagagtctcccctatgccgagttctcctacaataacagctaccaagccagcatacaaatggcaccctatgaagcgttgtatggccgcaaatgccggacaccgctattgtgggaccaagttggggaaagccaagtgttcgggactgatatcctgagagaagctgaagctaaagtcaaaaccattcgggataatctaaaggtggcacagtcccggcagaagagctatgcagataaccgacgccgtaacctggaatttgcagtggatgactttgtgtaccttagggtcacgccattgcggggtgtacacaggttccagacgaaagggaagctcgcacctcggttcgtgggtcctttctgtatcattgctcgacgcggagaagtcgcttaccagttggagctgcccgcatccttgggcaacgtgcatgatgtttccatgtgtcgcaactcaagaaatgtcttcgagtgccatccgagcaggccgattcagagcaaattgaagttcgcgaagacttga

SEQ ID NO: 81639 - DNA, 682 bp, Oryza sativa
  Clone ID: PAT_MRT4530_81145C.1
tagagatgatgtaaatgatgaacattggagaggtttttcggatgccttgcatgttgcggtggagctcgctcggattgggcgtatgtgatgtgaccatggctaccacagatgcaaccattgctcacatcatggatgaacaagaagatatcaagatcaagtcctccaagtgctggaatccgattcgtccacctactacactgctgacttcaaacggctgccgaatctgcatacgacctccgttttcggcccgtgagtacttgatggaaagctcttggagtcctctttccaatggatccagcctcattgcgaaattccatcttattgagccgcaattgaagcaacaaggtgctgcatcacctataatgggcctatgggcttgtaacttcgtctgggaccccggcccaggtggggcccatgtggggtgcgccccagccaggtggagcacgaccctaggcacccctaggtcgtcctcccacccctatttatatacaggaatagggttgatctgcaccggcaagatcagcaacccgcggagaggtgtatcgatcgctaaggcgcaacacaacgtctcgtacgcacaactcaccgaaagatcgggccaacaacagccttgagtgtcgagaggaactcagggttcatcaagatctagtgggaaatcgagggaatcgatgatggggcgaaa

SEQ ID NO: 81640 - DNA, 369 bp, Oryza sativa
  Clone ID: PAT_MRT4530_81146C.1
atgccgcgctacaagcctgagtacttgtttggtgttgaggaatttgtccaggagttgcgtacgatgtcctttgtcataggatttgggactgcccctttttatgcccagattcctcatgatcgtcaccttgaacactaccttgagactcaaggaattgagaatgatgctaccacaaagcatttggttgagatgctgtgggctatgaatgaaacccgtgcggagactgtgttagcagctcaagatcgtgaagaccggaatcgtggagaagaatcgaagcgcaccccttcaaaggtcgattggggagctactcaagatgatgaagacgagccgaacgagccttcaatcaactccgatgctcggaagaactag

SEQ ID NO: 81641 - DNA, 1391 bp, Oryza sativa
  Clone ID: PAT_MRT4530_81147C.1
tggcggtgcgggtgcgggtgcgggtgcgggttctaccggggttttgcgggatgcgaagcgcgtgagcgctcgggctactatggatacgaccattgctcacatcatgaatcaacaagaagatatcaagatcaagtcctccaagtgctggaatccgattcggccacctactacactgctgacttcaaacggctgccgaatctgcatacgacctccgttttcggcccgtgagtacttgatggaaagctcttggagtcctctttccaatggatccagcctcattgcaaaattccatcttattgagccgcaattgaagcaacaaggtgctgcgtcacctataatgggcctatgggcttgtaacttcgtctgggaccccggcccagtgtggggcccatgtggggtgcgccccaatctggtggagcatgacccttggaccctcttggtcatcctcccacctctataaatagttaggaatagggtttatctgcaccggcaagatcagcaacccacggagaggtgtatcgatcgctaaggcgcaacacaacgtctcgtacgcacaactcaccgaaagatcgggccaacaacagccttgagtgttgagaggaactcagggttcatcatcgtcttcatgccatggtggattctttggcggacctcggcgaaccgataaccgacaagaccctcatcctcaacttcctttgaggtttgaatgaaaagtaccacaacttgcagactattctccccatgcagcacctgttcccgatgttcctggaggcacgctcgcaacttcttctcgccgagatcaacaagggacaaggccactccgccggcaccgccactgccttcgtcgtagtggccgcctgtggtgctcgcgggaacggcaacagcggcaacacctctggcaactccggcggcaacaacggcaacagcggcaacaacaaaaattgtcgcaagcacggcaaaggcggcaatggcagcaacagcggcggctccatgttgacggtcctcctggctgaagaggcggccgagaggagggttttctggtttggccgaaccaccagttcggccgaacccgtttcgtggccgttgatcgccagattcgacgtggacagccctgattacttcctgatgacggttggagggtagtttggtcgtttcctatacccgtactgagctgtcaccatcagcggcacacctctcattttatagaagaagttctccgaatcaggagcagagtgtaccgacagctccggtactcctccagaattcctcctaggaaggttcatggagtcggtgaagcgggtggcgctggggatcgtggcgagcacgcacatacgctggcacacatcgtcggaccactcgtcgtgtgcgaacgccgtggtggtgctcgccat

SEQ ID NO: 81642 - DNA, 4518 bp, Oryza sativa
  Clone ID: PAT_MRT4530_81148C.1
atgacggagctcgtggctcctcaccgggagaccgcgcaggcccccctttgccagttcggccgggggcttaggcggttttgccaagtccgcaatactataccatgcatccctgcacacgcggtgatctacgcgttcagggggggtgtgcggcacaaccgcatgctcgaaaagattgcctccaaagagccccagactaccgcagagctttttcagctcgcggaccgagtggctcgtaaggaggaggcctggacctggaactcctccggttccggagtggcagcttcggccgcccccggatccgccgctcagacagggcggcgtgacaggaggaggaagaagaggccggaccgttccggcgacgagggtcatgtcctcgccgtcgagggcgctccgcgggccactcgaaaggggaggcctgcgagcgacaaaaagaacgaggctggtacacccagcagggagcgcctcgccggcaggtggtgctctgtccacaacacctccctccacgatctcgcggactgtcgtgcggtcaaaaacctggccgagcgaacgaggaaatgggaggaggacaggaggcaggaacgccgtgagggcaagtccccggcggttccttccggcaaacggcgaagtgaggccaagcagaaggcccccgctgttgacatcgatgatggtgatgatgacctaggtttccaagaacctggggccaccattgccaccgtcgatggaggagcatgtgctcacgtctctcgccggagcttcaaggctatgaagcgagagcttctggccatggcccctacccatgaggcgatgcgtcgggcgcggtggtcggaggttgccctcactttcgaccagaccgaccacccaccgtgcattgcccggggagggcaggctgcgatggtggtttcccccaccatctgcaacgtgaagttgggacgtgtcctcatagatggaggagcggctctcaacatcctttcccccgcggcctttgatgctatcaaggccccggggatggtgctccagccgtctcaaccgatcatcggtgtgacgccggggcacacgtggccattaggtcacatcgacctaccggtcaccttcggtggacccgccaacttccgcacggagcgggtgagcttcgatgtggcggacctcagtctgccctacaacgcggtcctagggagacccgcgttggtgaagttcatggcggcggtccactacgcctacctccagatgaagatgccgggccccggtggccccatctctgtccgtggcgaccttaaagccgcgcttgcttgcatggagcagcgcgcggaccgcctcgctgctgcgtccaagcccgagggtggtgacgagaggcttggcccctctgcccccaccgccccgaggcagcggatggccacatgcgacgaggtcccggaagacgcgctcgtctccttcctgcgggcaaacgctgacgtcttcgcatggagaccagcggacatgcccggggtccccagggaggtgattgagcaccgtctcgccgtgcggccgggcgcaaggccggtccggcagaaagtgcggcggcaagccccggaacgtcaagccttcatccgcgaggaggtggctaaacttttggaggccgggttcatccgtgaggtcatccatccggagtggctggcgaacccggtggtcgttcccaaggcgaacggcaagcttcggatgtgcatcgactacaccgaccttaacaaggcatgtcctaaggatccttaccccctgcctcgcatagatcagatcgtcgactccactgcgggccaaataggacgtaatgttgaggcgtatgtcgatgacttggttgtaaaaacgcgcaaccaagagaccttactctcagatctagcggaaacttttgagaacctccgctccgcccgcataaaactgaaccccgataagtgcgtgtttggtgtacctgcgggcaagcttctcgggtttttggtctctgcccgaggcattgaggccaaccccgagaagatacgagctatagagcggatccgcccccccagcaaacttagggatgtgcagtgcgtcactggttgcatggccgccctaagtcgtttcatatcaaggctgggagagaaggcgcttcccttgtttaagctcctcaagcgctcggggccgttcacttggacggaggaagctgaacatgcccttactcagttaaaggcatatctcagctctcccccggttctagtcgccccggagccaaatgagcccctgctactttacttagcggcgaccccccaagtagttagtgcagcgttggctgtggagcgcgatgaagacaatcctcattccgcgcacccccaccctgtgctgacttggcccgggagcaagcagggaggagaggcccccgagccgaacggtggcctaaggcccctgacgaccggagtcggccctctccccgctcgtcagacggtgctgggcgcccccgaccctcaggaaggccccgaggccactgcggggaggccgcacctatcgccctctgaccccgaggctaaccctgtaccgattcgacccgggagagagcagggagaagaggcccccaagccgaacggtggcctaaggcccctgacgaccggagttggccctttgcccgcttgtccgatgacgccaggagcccccgacccccaggacggccccgaggccactgtgggaaggccgctcctgtcgtcctccgaccccgaggtcatcggcacagaagacgagtgcgccccgaggggccactcggacgaagaacgccccgggggtacggtccctagcgaagaggatcggccccgccgaaaggtgcagcggcctgtctactttgttagtgaggccctccgggacgccaagacccgatacccacaggcccagaagatgctttacgctattctgatggcctcgaggaaactgcgccattatttccaggcgcatcggatcactgtggttacgtcttaccccctcggtcaaatcttgcataatcgagagggtacaggacgagtggtaaagtgggcaatcgagctttctgagttcgatctgcactttgaaccacgccacgctatcaagagccaggccctcgccgattttgtggcagagtggaccccggctccagagactgtctcaatacccgaggccagcacgaacccctctcagctgcctcacaccgcccactgggtgatgcagttcgacggttctttgtctctccagggcgccggtgcaggggtcacgttgacctctccgaacggagacgtcctcagatacttggtccgcctcgactttcgagcgaccaataatatggcagagtacgagggactccttgccggactcagagtggcggccgggctggggatccgccgcctcctggtgttaggtgactctcagctggttgttaaccaagtctgtaaggagtaccggtgctctgatccgcagatggacgcctacgtgcgccaaataagactctacctgaggaccgcgaagggagtgaacgcgtacaacgcatttccaaacgctacagcgtgtcagtttcacgccaagcaaatccatcagccggcccaggccctgcagatcataccactgtcatggccatttgctgtctgggggcttgatatcctgggaccgttcaaacgagccccgggcgggtttgagtatctgtatgttgcgatcgacaagttcactaagtggcccgaggcttatccggttgtcaagatcgataagcactctgctcttaaattcattaagggcatcacggcccgttttggagtgcctaaccgtattattacggataatggcacccaattcactagtgaactcttcggcgactactgcgaagacatgggcatcaagctctgcttcgcctcacctgcccaccccagaagcaatggccaagtggagcgcgccaatgcagaaatccttaaaggcctcaaaaccaagaccttcaacattctcaagaagcacggcgattcatggatcgaggagttgccagcggtgctctgggcgaaccgaaccacaccaagccgagcgaccggggaaacgcctttcttcctcgtctacggcgcagaagcggttctcccatctgagctcaccctgaggtctcctcgggccaccatgtactgcgaggctgatcaagatcagcttcgtagagatgacctcgactacttggaagaacgaaggcggcgcgcggccctccgagctgcgcgctaccagcagagcctgcggcgctaccatcagcgccacgtccgggcccgatcactctgcgtcgacgacctcatcctacgccgcgtccaaacgcgtgctggattgagcaagctctcaccaatgtgggagggtccgtatcgagtgatcggtgtcccccggccgggctcggtacggctggccatgggcgacggcacggagctgccaaacccgtggaacatcgaacaccttcgtcgcttctactctacccctgaaaggggggggggtcgggtatcaggttttggctcgggccaaccccgcacccccctcggattaagttaa

SEQ ID NO: 81643 - DNA, 296 bp, Oryza sativa
  Clone ID: PAT_MRT4530_81149C.1
gcccgcgtgctggccgagtggtccagagggtactggaaacgcgacttggagagcgcggcggcgagcctcaacgcgttcatgccacaatgacatacgcaatgggacgatgctgtgtatgctattgtataagctatactacgacccactaagctgctaactatggttctaaagctaactgtgtgtatggactctaatgagtagctaaataactagtgatgaaatatgtctacatgtatatattcatataggaactaaatgatgaacttgaatgttcttctgaaaaaggaggacgatct

SEQ ID NO: 81644 - DNA, 495 bp, Oryza sativa
  Clone ID: PAT_MRT4530_8114C.1
gtagagagagagagagaggaggaggaggaggagagcggcggcggcgatggcggggaaggggttgaacgcgacggtggagttcttccggtgtcggtacgactggaggaggcacccgatggttgggaaccagctgagccacttcacgcttgtgtctcggcatcgccatcgttgcctttgttatctactttgtctgttatgtctcctacaatttatttttttgttctttttttgttttcctttattatttgtttttgtctttagtctcgctctttatattttatttttttcttctttttaatttttctttagtatttttttcttttttatattttttatttgaaattttttttaatttttttcatttattttttaattttatttttattattcttttttatatttatcttttttttaaaaagtatttgttttaattttttttatatatttttgaattgtttttttataattttcttacttctttttttattttatttt

SEQ ID NO: 81645 - DNA, 1307 bp, Oryza sativa
  Clone ID: PAT_MRT4530_81150C.1
atggccagatgtctcgagcacgcagctcattctgatactaaaaggtctaatactgaaaagagggttgctgacgtcatcaaaggggaggggcggcgccggcaagcgggccccaccggtcagcggcacaagggcgccggtccaccgtggaccgggaccaccgaggcggtccaccaccggtccacgggaaccgacggtccggatcggcccaagccgatcgggcggccaggggcggcgcagctggggcacagcacggcacaaagccggcctagctgagccatggcgcggcggtagcgcggtctccggcgacggcgaccgatgggcggcgcgggagaggcggcacgcatgggcggcggcggcgcatgagatcgacgcggcgcgacaagggggggtccgggcggcccaggcgagcggggcggcggtgcacggccaggtggtcgccggcggcggccaccggcgcggcagcgcgcacgggacacagaggagggaggcaaggagggagaggaggagctcaccaaggagctcctcgggacgaaggcggaacggcggcccggtggcgtagggtggaggtggcttgggatgcacggtggaagggtggttgcggcgattaaatggggaaacggagcgggggccggggtgcggcgaggcacggagaagccggcagtgcaaacggcgcggcgcggcagtggctagggcggcggctagaggtggccggagctcgctggggaccgatggagagagggagcacggtggagaggtggttcgcgtggtggaaggggaggaagaaacggcggccgagcattcccttgaggtggcaaagccagcggtagcggcggagcagtgcggcgacgaccctagcgacgggaaacggcggccggagttcgccggagtgtggcggcgcgcgggagcggcgtggggagagcgagggagagagtgccgggctcgggaaacaaggggaaatggacgaggggagcacgggggtgctttttatgggctcgggaaggcgggatcgaggccggacgtggcagaatcggccggcgaagtggggcaccgacgtggggtggtggaggggttaactggcgccgattttcgcggggagagtggggggggaaaggtggaggaggtggaggggatatatttcacgcgctcgtggggcggggtggagcgcgggagccgcggcgtcgtggggcgaaaccggcggccatggcggcagttggggcgacgggaggttggggaagaagatgacaggtggggcctcgggtcccacctgtcggggagagagagaggggaaaacgggcgagggaggtaaa

SEQ ID NO: 81646 - DNA, 329 bp, Oryza sativa
  Clone ID: PAT_MRT4530_81151C.1
tcgtccacgcggccggacatggaggcggtggatctgtgtgccgcgataccgctcgaagagagggatatgaagtccgaccaggcgctgagggatctgcacgagcggaggtatgagcaccaccacgtgcagagcaaccaccgctagaagctcagacgattcgacgcgatcatggacaactggaggtacatacaagagcactacacgcgcggcagtcaacgctaacgactacggctcatccgattattttacatgctcagagaggagacgcgagccaagttcgccgagcacgatcgaacgacctacgtcgtacagggatatcgcgccgctct

SEQ ID NO: 81647 - DNA, 4194 bp, Oryza sativa
  Clone ID: PAT_MRT4530_81152C.1
atgaccggaaacgagaacgcagtggctacaaaccaaggcgactccatgtcaaaaaatccacccgtcgaaacggagaacggatcatcgacgacatccaagcacgggaaggattctgatacggccaaaccttgtccttccaacataaaccacgagccggcaaagatgacttccgaagccacaaggtcttggtgtcctatccacaaaaccaagaaacacaccttgcaagattgttgggttttcctcaacgtccgtgttgaaattcgcgcctgcaaagaacgtggaattcagcgtacttctccaactcgggatgtctattgtcctattcacaagacaaataatcacgacctctcgagctacaaagtcttcctcggcgccatgaaagctccgtctcctaagtcatacgtccccgtcagggataacggcaaggaacaaggagcgactccagcctcagatcgattcgttggggtaatcgatatcgatcctcacgaaccatcggtcttacatcttctcgaagactatgggtcatcaacaacgagcgtgccacgggaggtattggctatcgatgacgttggcacgtcagcgcaagccaacgcagaagcggcgaatcaatcgactactccagcccaacacatcagggtcgttcaagctatactgagggaaactccttacgatcccgttctgaacgatgacctcgagcgttggacagaacgactacgggaatcggtgaccaacctcagcaacgcgtttgaagaagccgctaccgcagcgcaccaagatcagccgccaactggcgacgccaatgattctgacccggagcaattgaaaagtatgatgggagcaccgacccagaagaattccttcaagtctactccacagtactctgctaccggagcagacaacaacgcactagcaaactatttaccaaccgcgttgaagggttctgcacgttcatggctgatgaatcttcctccctactcaatctcttcatgggtagacctgtggcaacaattcgtcgccaatttccaaggaatgtacaagcgccacgcgatcgaagacgacctacacgcgttgacacagaactcaggtgaatcattgaggaaatatgttcgacgcttcaacgaacgcagaaacacaattcctgaaatcaccgatgcttctgtaatccgtgccttcaaatccggtgtcagagattgctacactacccatgaattggcgacaagatgcatcacaaccactcagaggttattcgagatcgttgagcgatgcgcccatgtggacgatgcgctaagatgcaagaacgacaagccgaagaccgggggagagaagaaatcagccacagacgcatctgagtcaagcaagaagaaaaatcacaaaaatgggaaaaggaaagctcaagtggaagtcctcacagcagaatacgcgaaccctcccaagcgcccagacccacaaggcagcgacacaaagaaatcttggtgccccatacacaagacggacagacattctctgaaagattgccttgttttcaaaaagtcgctcgagaagcacatggcgtttgaaaaaggcaagcgagtacgcgttgtcgagaagaacgaagagacggctcctcacgaatcggattctgcatatccggactccgacctccacgtctcacacattttcggcggctccacaactactctaggcgcaatgggaattccgcatagtgagttgacaccaactgatcaacccttccatggaattactccccgatcatcatccagacctttgggcaagattacgttgcctgtgactttcggccaagccaacagcttccgaacagaatggatcaccttcgatatagcttacaacgccatcatcgggagaactgcacttgcgaagttcatggccgcatcccactacacgtatcaagtactcaagatgccgggaccgaagggaacaatcactattcaggggaatgcaaagctggcgccgtccgacatgccgggggtccccagggaggtgattgagcacaaactaatggtgcgacccgatgccaagccagtaaagcaaagactgcggagatttgcaccagaccggaaacaagccatacgagaagagctcaacaaacttctcaaagctggcttcatcagagaagtacttcatctagagtggctagccaatccagtcatggtgcggaaggccaacggaaaatggagaatgtgtgttgacttcaccgacctcaacaaggcgtgtcacaaggatcacttttctctccctcgaatagatcaattggtggattcaacagccggttgcgagctattgagcttcctcgacgcttattctagctaccatcaaatcagcatggcaaaagaggacgaagagaagacagcattcatcacgccgttcggggtattttgctatgttaagatgccgttcggactcataaccgccgggaatactttccagcgcacggttcagggcacacttagcaaccagcttggcaacaatgtcgaggcttacgttgacgacatcgttgtcaaaaccaagacaagcgactcattgattaacgatctgcgggaaacattcgacaacctccgacgatatcgcctcatgctcaatcctgagaagtgcacgttcagagtaccgtcgggcaagctactcggattccttgtctctggcagagcaatagaggcaaatcccgagaagatcaaagcaatcgagaacatgaagtcgcccacgagactcaaggaggtacaaaagctaaccggatgcatggcagcactaagcagattcgtcgctaggatgggagaacgagcacaacctttcttcgctctattaaagaaacaagacaaatttatatggacacaggaagccgaagaggtatttattgcactcaagcgctacctatcaaaccccgctgtacttgttgctccccaacctaatgaagaattattcctctatattgccgccacgccatattccgttagcactgtcattgttgtcaagagagagaaagtacagcgacaagtttattacgtaagcgaagctctccatgatgcaaagacaagatacccacagatccaaaaactgctttacgcagtcatcatgacatcaaggaagctgcgccactacttccaagctcacagagtcacagttgtatcctccttcccccttggagaagttgtgagaaacaaagacgttgttggccgcattgcgaaatgggtagtcgagctaagccaatttgatgtccactttctaccgcgaacagccatcaaatcccaggacaacgtcaagccagatgaccaagcacgacgcgtgtccagacgagaaccgctcgaacctggcacctttctcgatatcctgacgaagccatcggtgaaagaagttagcccgaacacccccgacattagctcggaggtcactgaggcagaacgcgccgttgctgacatcgaaactacagacgactggcgcaccccattaatcaaattcatcagcagcgaggagttgcccgaggacgatacagaggccgagaaaataacccgtaaagcaaagatctactgtatggtcggtaatgatttatacaaaaaagcgctaaacggggtacttctcaaatgcgtctctaccgacgacggcagacacctcctcctcgacatacatgaaggcatatgtgggtcacacgccgccggtcggacattggtcagcaaagcttttcgacaagactttttctggccaaccgcccttaaagatgcatgcgacatggtccagcgatgtgaaacctgtcaattccacagtaaacacacaaagctacccgcgcaagcgctccagactatccctctgacttggccgttctcgtgctgggggctagatatacttgggccattcccacgaggacagggcggctacagattcctattcgtggcgatcgacaaattcaccaaatggatagaagcagtgcccacgggggaaatcaaggccgacaacgccatcaaattcatcagagggaaattctgcagatacggactaccgcaccgcatcgtaactgacaacggctcccaattcatcagcgccaacttccaagattactgcatcgggttgggagtcaaaatatgtttcgcctcggtctctcaccctcaaagcaacggacaagtcgaaagggcaaacggcatagtactacaagggatgaaaacccgcgtctacgacaggctcatgtcataa

SEQ ID NO: 81648 - DNA, 396 bp, Oryza sativa
  Clone ID: PAT_MRT4530_81153C.1
actagtggatccccgggctgcaggaatcgcacgagggaatcatatcattcccacacatagtgccacatgctgatggctcgcatgcagctcacccagctagagctgcaagcgcagcagggaagagccggtctttcgatctcgatctcgctactagctactacctaggtagatcgattgataggagtagagatatagctagctgttgctcgcaaatacgcagcgaataaagctggctcgctttccccattccccaatggaacagtgacacaagcagagagagagagagagagagagagataatccgtcgagatcgggtggtagacccttccgtgcacaggagagatttatttaccccgggttaattactagtagtgctggttgattatggcgcgaaat

SEQ ID NO: 81649 - DNA, 453 bp, Oryza sativa
  Clone ID: PAT_MRT4530_81154C.1
atgggctgccttcagctcgtcttcacgttcccaagtagcctcttcctcagcgtggttgctccattcgaccttgcaaaaacggattacccggttcctggtcctgcgctccatggtgtccaggattttcactggcctttccacgacccccggtgtctcctctaccggccgccaccctcgccttcgcctctcgtcgcccgtagcgctctagcgccgtgtgccctagcgccgccgtcgccgccgtcgctccagccgtgcgccgccgccgttccagtcatcgtcgtcgctcgggaagaccgccgtcgtgctcgccaagtcgtcgccgtcctcgtccgccgcttcgccaccgtcggagaccgccggagcatcgtcgccgtcgtcatgccgaagagcgccgccgtttcaacctcgtcgccgtcgccgtccgttggtcttccgccgtcgctttggtcgccg

SEQ ID NO: 81650 - DNA, 4572 bp, Oryza sativa
  Clone ID: PAT_MRT4530_81155C.1
atgtctttcgtgattagtttcacacttctcatcataatagaagatgctataactggtaataatttgattagctcctggtttggaatgatgccgcgctacaagcctgagtacttgtttggtgttgagggatttgtccaggagttgcgtacgatgtcctttgccataggatttgggactgcccctttgtatgcccagattccccatgattgtgatgaagagaagtgccgagtcaaagtcaccttgaacagtaacagtgaagatatcccatcagtgatgttcaaagctggaggaggaaactacattcatgcatgtcaggaggtggcaaggatcgccataggagagctccgcgatcgctacagtgatcagttggccgacactgagtatcgctaccatcctcgccaaccccagggaagtgaccgtggcagctaccttgagaccgaggggattgagaatgatgctaccacaaggcatttggttgagatgctgtgggctatggatgagacccacgcggaggttgtgctagcagctcaagatcgtgaagaccggaatcgtggaaagatttgcaagctagaagacaaggtggagcgtttggagaaggaactagccgcgttgaagggagaagcaccaccgcagaaggccagggttcgtcttaccgcaaggaagagagctctattcgtccctcgctaccaattggcgccaaaggtccgtgtggtggagaaagaagttaccccagccctagcgaatcctccgatcgtcaacatggtgctcactcgcagcaacgggaatggccccaacatcaataataacaacaacaacaatggagagaatcccacacttgcccaagtcctggctcaacaggcacagcttatgaacatgatgatgcagcaactccagaaccagcagaacgagggaaataaccatgcacctccccagaacaagttagcaaaatttcttcgtgtgaggccgcccactttctctagcaccactaatcctgttgaagctggcaattggctgcacgccatagagaagaagttggatttgcttcagtgcactgatcaggagaaggtctcatttgcatcacaccaactgcatggccctgcctctgagtggtgggatcacttccgccttaacaggactaccgctgaacctatctcttggtttgaattcaccgctgctttctggaagacgcatataccatcgggagtggtgtctctcaagaagaaggaattcaggtcgctcacccagggatctcgcacggtaaccgagtatctgcaggagttcaatcgtctggctcgttatgctccggaagatgtgcgcactgatgaagagcgccaggagaggttcttggaaggacttaatgatgagctttcttacccactcatgactggggattatcatgatttccagaagttagtagataaggctattcgccaggaggacaagtacaaccgcatggagcagaagaaacgccggattgctcacttcaaggcacaacaggggaatagtcagaggccgcgtcttactttgggacctcagtcaatgtcacagggaggttcttcgtttgttgttcgtccgcagcgtcagttcttcaacaacaatgctggcaacaacatccgcaatcaagctccacgccctgttgcaacttcgacacagcaacagcatgccaagaaggagcaaggcagcaagcccgggcaactctaccgcaccagcgccaaccatgttactgctgcagaagctcaaggtgctccagatgtgattttgggtacgttccttgttaactcagttcctgcaacagtgcttttcgattctggtgctacacattcatttttatctatgagttttgcgggaaatcataggatggaagtagaagatcttagacgtcctttgatggttagtaccccaagtaatcaagcactctctttgcaacgtagcccctctatcagaatagaaattcaagaagtaccatttctggccaatcttaccctgttagaatccaaagatcttgatgtcatcctagggatggactggttagccagatataaaggtgtgatagactgtgccaacagaaaagtaactctcaccagcaatgatggtcgagttgtaactgttcatgcattgtcttctgagtctttaaggtcaagtctgaaccaaatgactttggaagagattcctatagtccgggagtatcccgatgtgttcccagacgatttacctggtatgccgcctaaaagggatatagagttcagaatagatttggtaccaggaacaactccgatccataagagaccttatagaatggcggccaatgaattagcagaagtcaagagacaagtagatgatttgcttcagaaaggatacatcagaccaagttcatctccatggggagctccagttatttttgtggaaaagaaagatcatacccagaggatgtgtgtggactatcgtgcactaaataatgtgactatcaagaataagtacctgctgcccagaattgatgatttgtttgatcagcttaaaggtgccactgttttctccaagatagatcttcgatcagggtatcaccagttgagaatcaaagaggaagatatacctaagacagcttttaccactaggtatgggttgtttaaatgtactgttatgtcttttggacttaccaatgcccccgctttcttcatgaacttgatgaataaggtgtttacggaataccaagacaagttcgtggtggtctttattaatgacattcgtatctactcccgaaccaaagaagagcatgaagaacatcttcgccttgcactagagaagctacgagaacatcaactgtatgccaagtttagcaagtgtgaattttggttgtctgaagtgaagttccttggtcacgtcatctcagccggaggagttgccgttgatcctagtaatgtggaatccgtaaccaactggaaacaaccaaagacagtttcagagattcgcagtttcctaggcctcgcaggatattatcggaggtttatagagaatttttccaagattgctaagcccatgacacgattacttcaaaaggatgtaaagtacaagtggtcagaagaatgtgcgcagagttttcaagagttgaagaatcgcttaatatcagctcctattttgattttgcctgatccaaagaagggttttcaagtgtattgtaatgcatccaagtttgggttagcttgtgttctgatgcaagatgggaaggtggttgcctatgcatctcgtcagttacgtccgcatgagaagaactaccctactcatgatcttgagttagctgcagtggttcatgcgttgaaaatttggcgtcattatctttttggtactcgtacagagggaaaggctaatgttgtagcagatgctcttagcaggaaaggctattgcaatgctacggaaggacgacagttgccattggagttatgcaaggaatttgaaagattaaatttgggaattgtcagtagaggtttcgttgcagccttagaagcaaagcccactctaatcgatcaggttagagaagcccaaattaatgatcctgatattcaagaaatcaagaagaatatgagaagaggaaaagctatcggtttcttggaagatgagcaaggaactgtatggttgggcgagagaatctgtgtccctgacaacaaagatttaaaagatgcaattctgaaagaagctcacgatactttatactccattcaccctagtagtaccaagatgtaccaggatctcaaggagagattttggtgggcaagtatgaagcgtgaaatcgcagaatacgtagcagtatgtgatgtttgtcagcgggtcaaggcagaacatcagaaacccgccggtttgttgcagcctttgaagataccagagtggaagtgggaggaaatcggtatggatttcatcactggcctacccagaacgtcatcaggccacgactctatttgggtaatagtcgacagacttaccaaagtggctcatttcatcccagtaaagacaacatattccggaagctggttggcggaattgtatacggcaaggattgtgtgtttgcatggcgtccctaagaaaatagtgtctgatcgaggttttcgggaagcagaagagaaggtaaagatcattcaagaaaggttgcgtgtggctcagtctcgccataagagttatgccgacaatcgccgcagagatttgagttttgaagaaggagattatgtgtaccttcgtgtcacgcctcttcgaggagttcatcgcttccacactaaaggaaaattggcaccgcgtttcgtgggaccttacaagattgtcagcagaagaggagaggtcgcttatcagttggagttacctcaatctttggcaggagtccataatgtgttccatgtgtcgcaattgaaaaagtgtttaagggtacctaccgaagaagctaatcttgaacagatagaagtccaagaggatctaacctatgttgagaaaccaatccgtatcttagaaatagatgagagaagaaccagaaatcaagttatccgtttttataaagtccaatggagtaatcactcggaagaagaatcaacttag

SEQ ID NO: 81651 - DNA, 258 bp, Oryza sativa
  Clone ID: PAT_MRT4530_81156C.1
ttataaccattggtctttgttggaagaagtagtgagacaaaccgaaaatctctagcagtaaaatagttggcttcactaagcatccaagcacttagtaatggtctctggttgtaccaatgttgaaatttttagcagtaaattgtcttcactagtaatttgttcagagctagaattcttgaagatactttgaaaatccagcattaaggttttagatatgcccacatgccttatgaaattgttaaaaaagggtttacacaa

SEQ ID NO: 81652 - DNA, 962 bp, Oryza sativa
  Clone ID: PAT_MRT4530_81157C.1
atgatcacactaagaaaacgagagtttcgctacctgaagcaaggagatttgaccgtcacagagtacctgcatgagttctatcgtttggctcactatgcaccagaagatgtggaaacggatgaagacaaacaagagaagtttctccaggggttaaaagatgagcttgcagtgcaactacttctagaggattatgaagattttgagaaacttgtggacaaagccatgcaactcgaaagtgagcataatcggatgacgaactgcaagagaaggattgtcaacatcccagtatttccaggtggtaaccaaagacagcgcactgagccacttcagatcaccggatcttctgttgtgcatcaagagttcctgccccaagaagatgaacacaatgcagacaacaacactagcaatactaatgatgatgataccaccaacaaccatggttcttgccccattagtgaccactcgaataaagcgtgcaatgtcagtagcattcaccaagatgtcaacgatagtatcaatgttggaacccagaatgacaaccttagcaatttcgacactgagaaagactccaatggtgatagcaactatggtaccactgatgccaatgttagcaaggattcccaaccaccaattccaactccaagtcaaaatgatcgtccccagatggacagctcagtaaagaagacgttgatttgttacaactgcaaagaaccaggattcgtgctcgcgccgctttcctctctctccgccgtcgccgacgagttccggttcgccgccgccgtcgctccggacttcctccccactcggcgtcacctccatcgggttcgccgtgttcccgtcgacctcgtccgcgccttcgcttcgcccgccgaccgccggagctccgtcgtcctcgccgtcccgaaccgcgccgccgccttcttccgcttcggccgccgttcccgtcgtcgccgtcgaccggg

SEQ ID NO: 81653 - DNA, 394 bp, Oryza sativa
  Clone ID: PAT_MRT4530_81158C.1
gctcttagcctgaacacattcatagcgtacttgggggctgattctctcctacctgaggggatcgccatactagtgagggtattatggattcttcttcaccatcgtcgcgcacctaggctcagagacagacgaactttgattacctctttaaggtgctcctaacaagtacatctggcgacggcaagatcagtaccctcctccgatggacttcaaactgttcggaggatatgtccgccaccatgaagcatcagactgcaaggtcaagatggttaacaccgccagcacaagactagaaactggcgatctgagacacagctagacaggagccattcagaacctagaccagctcatactacagcggtgcacatggctttagcatggcgcacgacttcac

SEQ ID NO: 81654 - DNA, 2391 bp, Oryza sativa
  Clone ID: PAT_MRT4530_81159C.1
tcacttgactccaagtgcggctgcatctcttatcccagcgagtagtccttcgtactcggctgtgttattggtcaccctgaagttgaggtgaattgcatgcttgaactgatctcccgaaggtgatgtcaagatgaaccctgcccctgctccttggctgttgagtgcgccgtcgaacgccattgtccatgtttcgttgtcggtttgactatctaacctgttttcaggcacagtccaatcggctacgaagtcggcgagaacttgggacttgatggttgttcgtggcacaaagtggacatcaaactggcttagctcgactacgacttcaccaagagggaaggaggaaacaactgtgaccctgtgagcttggaagtggtggcgtagctttcttgacatcatgattattgcatagagcagtttttggatctgtggatatcttgtcttcgcgtcatggagagcttcgctgacgtagtagactggtctttgcaccttctctctcgcgacaacaacagtactcacggaatatggcgtggcggcaatatagaggaataattcttcattaggttggggagcaacaagtacagggggatttgacaggtagcgcttgagtgcgatgaacgcctcttcggcttctccgaatgtgcacttctccggattgagcatgaggcgatatcgtcggaggttttcgaacgtttcccggagatcttcaatcaatgagtcgcttgtcttggtcttgacaacaatgttgtcgacgtaggcctcaacgttgtttccaagctgatcgttaagtgccacttggaccgttcgttggaaagtgtttcctgcggttatcagtctaaacggcatcttaacgtagcagaatacaccgaacggcgtgatgaatgctgtcttctcgtcctctttcgccatgtttcttgggtggctcagctgtgacaggtgggctgggtgtgtgctttgcaccgccagctttgcattcccttgaatagtgattgttcccttcggcccggacatcttgagcacttgatacgcgtagtgagatgtggccatgaacttcgcaagagcatttctcccgatgatggcattgtatgctgtatcaacttcagcgacatcaaaggtgatctgctccgttcgaaaattatttgcttggccgaaagtcctaggcaacgtaatcttgcccaatggcttggaggatgactgaggagtaatcccatggaagggttgatcagtgggagtcaactcgcttcgtgggattcccatcgtgtccaaggtgctggcgaagaggaggttgatagagttgcccttttctaatgccagctgttttgccagcgactttttgaagacgatgcaatcctccagagaatgtctgtccgacttgtgtatagggcaccatattttcttcgtgtcgctgccttgtgggtctgggtgcttgggagggtgctcgtattctgtcgcgaggacttccacttgagctttccttttcccactcttgcgacttttcttcttgcttgattcaggtgcgtccttggctagtttcttctctccccctgtcttcgacttgtcgttcttgcgtctcagtgcgtcatccgcgtgagcgcatcgatcgacaatctcgaacaatcttcgagtagtcgtgatccgtcttgttgcccactcctgggtagtatagcgatctctgacaccggtcttgaaagcgcgaatcacagaggcattagtgattccggggattgtatttctacactcattaaagcgccgaacatagtccgtgagtcgtgcttctcggcagccattcaaatggtcacggagatcactggtgccgcggggtggaagggtggcttgtcgaggtgaggcccactgctcaggtggtttgccattggcaccgccagctagcggctgttctgggtgtgctgcggcagcggcctcctcgaacgcgttgctgaggttggtcacagattcccgtagccgttgttgaattccacgctctttgtaggcacggatctcagcttgtgcgttgagaaaaacccagcaagcttgcaaggtgtgtttcctggttttgtgaataggacaccaggaccttgtcgccttggaagttgtccttgaaggctcgtgtttctcatcggaaggacaagatttagccgcactaggatcctcctcgggcttggatgtcgtcgacgttccgttctccgctcctacgggaggatccttcgacatggagtcgtccgaggttgtagccacggcgttctcgcttccggtcaatgatggaccagtcgagaccggcactgtggtataaaccggaaagacgatttcgccgacttgagtccacaccagcattgttgaagtcggaactccttggttgatgctggggttgacgctattgtcgacgaagcttgacgacat

SEQ ID NO: 81655 - DNA, 459 bp, Oryza sativa
  unsure (1)..(459): unsure at all n locations
  Clone ID: PAT_MRT4530_8115C.1
caggtcagcagagcaagccaaacaaacatacgtgagctgtggacaatggcggctggatgtcaggagagctagctagctagctaggcgtgagctgtggactgacggctgctgctgctgctgctgctgctgtggatggttggcaacgtcttgtgcagtgcagcagtgcggtgcatgggactttcattgattttggaggccggattntgagacgatgtacatatggaatgcaagatatagagagatactgttgttgctgttgttggagactcttggagctggaggtgatggatatggaggttttactgctgctatccttttttgtagagatgagcgagagatactgtggattcttttcttgctgatgtattcttggtgtatgcctgactacgatggtttaatgtcaaggttatatgagcagcatttatttggtgaacaaaaaaaaaaaaaaaaaaaaaaaaa

SEQ ID NO: 81656 - DNA, 1851 bp, Oryza sativa
  Clone ID: PAT_MRT4530_81160C.1
gaatcagtgaatcttgaggcattttatggaaactggaagcacgatgaactgacgaagtgatccattctgaatcatcttcagaaacaatcaaatacaagctatagctattgccaattttgccatctctctgatatagacgaattttgccggtgaatcgcaagaacaaacgaatctaacgccttgctcgcgcgcaatcgcggcaggcagcagcagcattttgattttttgttcttcagctgctgttctggtcgacgagcacgtgcacggtggcggacacggcggcgtcggtggcgatgacgacgcggttgccggagacgttccggagagcgtggcccgggaacgcgtcgccggcggcgagcgagtactgcacgtgcccgatccggtccgggaacagcagcaccggcgagaagtccaccgtccacgagctcccgttcccctccgccgcggcgcgcgccgtcgtcgacctcaccgtcatccccgtcgccgcgttctgcgccacgtacacctgctccaccgtcgcgaactcgccgtcgagctccacgatgtccacccccttccccctcccgttgaacaggttgccgacgatctgcacccccctcgccacgccattgacggccttgagcacgacgttggcgtcgccgaggaagaaggagcccgagacgtggagcagcacggggtcctcggcgacgatgccggtgtagtccatgtagcagttggtgatccacgtctgcgtcagcccgggcaccttgaggtagatgcccgcgccgccgaacccggtcgccttgttgtagcagtgcacgccggagatggcgttggcgcctccggtgaccatgatcccggtcgccgccgagaacaccaccacgtcggagacggagttgtcgttgccgtcgaggcggatcccggtgcccgtgaacgacctctcgccggggtcgccgccggcggtcatgtgctggccgaggaaggtgttccggacgaacgtctcgtggccgccgctcaccgcgacgccgtccgtcgcgaagtggacgacgtagcagttgtcgacgccgacgcggagcgagtccaccacccgcacgccgccgccgcggtagttgcagtccagcatcaggtcgcgcagcgtcacgtactcgtagtagtagctcatcgccggcgagctccccccgccaccgccggccgccttcgccgacagctcgatcaaataccggtccgtcgggaagtcgtccgccgcccgcagcgacccgctgtgaatcttcaagttaccgccgccggaggcggggagggagagggggcccttgaggaggtaggagccgccgtcgaggtggatctcggcgccgccgaggtcggggatgccgccggtcatggtggcgttggaggggcggcggaacgcgtcggcgatggcgctgttgatcgccgccgtcgcgtcggcgccgccggtcgggtcggcgccgtagtccgtcacgtggtaacacccgcgacgagctcgccgccgtagacgttgctaattccctcctcgcgacgaaggaagatctgacgctctccatcctcctcatcgcgagatccatgtaccgccgctcgccggcgccggcgccggcgccgccggcgagcccgccgtgggcccacgcgctcgcgccgcgcgccaatgcaaggagaagaagcagaagagcggcaagaaccaccagcagcaaaccaccaccttgccttcctcttcttcctcttcttgcagcctccatgttcttcatcaatctctctctctcactttcttggaccttggcacctcttgctacagcatcaatggcgtccaccccaatccaacaactctctctctctctctagacttgaaatggcaaagcagag

SEQ ID NO: 81657 - DNA, 941 bp, Oryza sativa
  Clone ID: PAT_MRT4530_81161C.1
gatcaaatctagaattaaatttactcagattcaaaaatacccaactccaactatgtcaatcgtcataacgtgcagatcaaaataattaatcactacaaaaattaaattggacgtacaagaattattcatataaaatcgatcattttgcatactccgattaattactccatatccatcatgtcgccgggccatcttagctgctagcttcttcatcctaacctcatcttccatgtccttcaatcaatctcagcacatccatccccacctagctctcaagattaggaggaaaggttgggtgttgggtgagaagaagacgacgcaaagaacggtggctagaactgcctggagctatccgtcgacctgtccatggcgttgaacatgaaatgaccggcggtggcggcggcggcggaggaggaggaggaagggtggtcggggcccgcggcggcgccggcgccggagcgggaggtggcggcggcggcggcgcggtcgccctcgagctcgcggtacttgttgaggtacctgcgcatggggtcgacgtagtcgtcgaagccgagggcgccgaaggcccagcagacgtcgtcgccgttgaccgtcttgcgcttctccttgtggcacttgtcggaggcctcgccggtgacgaagctgatgaactccgagacgcactcctgcatcgtctccttggcctccttggagatcttggcgttgggggggaggatctgcttcatgattcgccccacgttcgcgattggcagcaacctgtcctgctccttgatgatctccgccgccgcctgatccgccgcctccccctgcagctgctgctgccggcgatgcccgtcggcgtggtggccgccatggtggtcggccatggctaagctcgagctctctctctctctctctcttcagtggtggtggtggtgagttcttgggctagtggaagcgct

SEQ ID NO: 81658 - DNA, 393 bp, Oryza sativa
  Clone ID: PAT_MRT4530_81162C.1
atggtacaaacagatcatttccgtcaacaagatattagtatctattatcctttattttcatcaatatttttcgggaccgaattacccccaacccaacttcttcctcctactcgccggcgagatctgtcgtctcctcacccacatcgactagctatccgacaaccggcgacggttggtaaactcaacggagccgccggtcggggacctagtgtacgtgcgccgcgggcggctatggcggcggcgacgcgtggcgttgagctccttgcagcacctacgagacgctccccgactgacttggcctcgagctcgttgaatagtgtgaggttaaaatcccccgacacggtgaagacgtcgtgtggcactagcggcagatctatagtgttatgtcagtgt

SEQ ID NO: 81659 - DNA, 236 bp, Oryza sativa
  unsure (1)..(236): unsure at all n locations
  Clone ID: PAT_MRT4530_81163C.1
gttgccgtctnccancaacattttaacgncccccatctccttcatccnnccgtttntttccggcnacaagaacctctctactcgcngccgcttgcttngngctcggtttcgngcccttgttnntccgcctcctttntntgtggggggaaccggccggatagctngttntgggccgcngtccgtacggttngaagctgtnactagtnctnttggtngtcctcgggcgggcagaggtt

SEQ ID NO: 81660 - DNA, 171 bp, Oryza sativa
  Clone ID: PAT_MRT4530_81164C.1
atgggggttatagccaaggagggagccaactacggctctgatctcgacgtatatggtgacgtcgaagttgatgaagtgcatgagaggtcgtcgggtttcttcatgctccttggcagcccatcacttctactcgctggtattgtgtacaagtacgtcatagttgatacttag

SEQ ID NO: 81661 - DNA, 884 bp, Oryza sativa
  Clone ID: PAT_MRT4530_81165C.1
ttttttttttttttttttttttttttttgatggggcacttgcaacctgcatatcaactgcaatgtctcatctgaaattgtttgcttgctcttctgaagaacattctctagcgagaatagcaaggagtgatacaaatgtgaagcacttctctgaactactactatcaagaagagggctcagaagcctcgtcagattcagagttctctgaggtctcatcagattcaggcttctcaagctgcagaacaacactgaaactgaatgatgaacccggcgtaaacgatgactcgagctcttcttctgactgggttgtcttgatttcagggttcaccttcaggttttccttctttacaaaatcaccaacagtgatgctgagtatttcctgaagaacgaacttggtgacccggcttttgccaagcatctgcagcagaatgctgcttggtatatttgatgttctccctcctttggacttcctaaaacctggaactggcggtgcatcacgagccaagcttgtcaaggcttcatcaaacaccttctgtgtcgcctttccaggcaaatccactcttacattgatcgtttcatcgtcgcgtgacacaacggatgtcttggcgttctgcagcgacaagccactcttcctctcgtcctcagcaaccgatgagcccccgcctgatccaactgccgacactggcaggacaggacgacttctcgcgctggaaacaagcaacccgtgggtaggaatctgacacttgcaagcattgcagttcttgatatggacatgaaccggatagattgcctggaagtggccgtcggcattttggcctgaaccgaagcttcggaaggtcgccgctgacgccatggatgcggcttgctctgcccctattcctgca

SEQ ID NO: 81662 - DNA, 429 bp, Oryza sativa
  Clone ID: PAT_MRT4530_81166C.1
atgaattgcactaccttggctgctccagagagatttcgtctagctccagaggatttggaccaaaacgatggagaatttgtaggcgctgcacttcgaggattgtcagggtatcaggctatcagcatgatggggatcaccctgaaaaacagccaggaaagccacctgacgttcaccaggtgctcacacgtcaaggccaactacatgaggataacctcgccggaggacagcccggagaccactggagttcacgtcgtcagctcgcgaaatgttcatatcatggaggactccatctccacatgtcatgattgtgtctcgattgtaggcaattctacggatgtgcgtctaagagcagaggaggaaaaatgtagcacatatgggtcccatttgttaaagacttataatggaaatggtagatggagaggctgttag

SEQ ID NO: 81663 - DNA, 710 bp, Oryza sativa
  Clone ID: PAT_MRT4530_81167C.1
caaaaatggcaagattggacaacaaggctactatccacttccagctccaaggttctcctaaaaggaattcctatgtcatcaagtgctggagacggctctccatctactggcaggatgtagatacataaggagaatttgggggattctgatgtgaccatggctactaaggatacaaccattgctcacatcatggatcaacaagaagacatcaagatcaagtcctccaagtgctggaatccaattcggccacctgctacattgctgacttcaaacggccacccaatatgcatacgaactccgttttcagcccttgagtacttgatggaacgcactcggtgtcctctttccaatgaatctagcctcactgcaaaattacatcctagttggcaacaattgaagaaacaaggtgatgcgatacctgtaatgggcctatgggcttgtaatttcatcaggaaccccggcccaagtggggcccatgtgaggtgcgccccaaccaggtggagcacaaccctaggaacccctaggtcatcctcccacctttataaatagctaggaataagattgatctgcaccggcaagatcaacaacccgccgagaggtgtatcgatcgctaaggctcaacacaacaatgtctatcatcaactcaccaaaagatcgggccaacaacagccttgagtgtctcgagtggagctcagggttcatcagattct

SEQ ID NO: 81664 - DNA, 444 bp, Oryza sativa
  Clone ID: PAT_MRT4530_81168C.1
atggcctctggtgccatcatcggtgaaacgaatgacgacttatctaaggaaaggtttcgcgccttgtccccagcgagctcggaggagttcccgaggctgtctgcagcgacgacgcttgtcccctccaccgtcaccgtcatcaccaccacctcgcaccccccccccccggcgacgggaggtcatcgcttgctcattgtcacgccactggatcaggacgagaaatggcccacgcccatttacctcctcccgctgctatcgccggtctccgtccacacgcccatcaaggtcctcgtgacctctacaagaaaaagaagaagaagccccctcccggtgccaccgccggccggccccttcgctccattgaccatcggccagccccttcgcttcctcgtccatcgccactggccgccgcaatcccctcagttcaacccggttgccgtttag

SEQ ID NO: 81665 - DNA, 888 bp, Oryza sativa
  Clone ID: PAT_MRT4530_81169C.1
gaccattacagtacaccacctcaagctagtagccaccttctccccaagcacacactctcctcccaaaccctagcaccagctagctctctcactctactccaatggcgcgcttccagatcgtggccttggccatggcgatgctcttcgccgccgcatcagctcaggccccggcggccaccccgacgcccgctcccaaggcgtcccctcctccggcgacgccgccgccgacgcctgcgccggtgtcagcgcccccggctcaggccccggccactcctcccccggctccggctcccgcccccaaggcctcagctccggctcccgcccccaaggcctcggctccggctcccgtgcccgcggccgcggctcccaccccggagatcagctcgccaccagccccgtcaccggcaggcttggccccgtctcccaccgccgaggtgacccctccccccagcgccgccgccggcgtctcccccgccgacgcgtgggtcgccgccgccgccgtggccgccgccgccgcgttctactgagatcgaggctgatgagatccggcgaacacctcattaatttattacccgtccatcagagggactcaccattcctcctcctcctctcctgatctcctccttttccttcttcatctgtggtggtggtgttgagctgtttattttatttctctctctatcttttttttcttccatttttttgggcatttttttttccattcaggcattcgattcagtaggtgtgtgggcgtgtggcgtggacagattggttggttgggttggtgttgtgctgctcctccattgtactatacatctcccgttgttcaatattcctttcactttggactttttaaaaaaaaaaaaaaaaaaaaaaaaaaaaaaacaa

SEQ ID NO: 81666 - DNA, 642 bp, Oryza sativa
  Clone ID: PAT_MRT4530_8116C.1
ctacccccataaaatctggggggagtagaactcgatctcaaccatttgattaaataccatcaacggttcaaattaatttcagcttgaagtaaacacagagtgattaatcgccaacggaaagaggtcagcgtaaacgaggtcaacataaacctttacaacccgggcctttttttgaaaagcatggctgatccacctattcgcgactgcatcttgcgggtcagtgtcatcgtcgttgtcataagatatggaataccggagacagaacttgtccagagaggcgactgggtcgcggagttccagcagccggttgacaaatcttttgaacagcgccggcgcctcaccgtctcccgcttcagaatgcgtcacctcgaactgcttgtaatcggcgttgatgcagggcacggagcgccagaggtagcaccaccgcttggacagcacgcacgtctacactgcctggcgcgaggtgaggaaggacatgatgtggtggaggactccttcagggaggtcgctgagcctgtcagtacagggggcgctccccggggacgtgggctgcacgcgcttgccaggcgatccttccatggcggccgagcacgcagaggcctttcgtcgaacaggtggcgtgcgtcgaaactgcagaaatga

SEQ ID NO: 81667 - DNA, 268 bp, Oryza sativa
  Clone ID: PAT_MRT4530_81170C.1
gcacgagggcacaagcaaggaaaaagccacccgcagcattgaggagcaacccctttttcggtgcccgctcgtcggtgagtccttgtgcctattctccgtatttactttcacccgatatatacattcagaacactgccgttcaatgctcggacctaccgactaccccgtaccaaaatttgcaaccctaaaccaaatgtggccttgaggctttgacctgaggaggaagtacctgttgtgataatccatggcgccatctcccgttttctgc

SEQ ID NO: 81668 - DNA, 936 bp, Oryza sativa
  Clone ID: PAT_MRT4530_81171C.1
atgtatgcaattgaattgggtgccaagagagtccccttgttgctggtggggaaatcgtgctactctgcaacggctagaaaactagccgttgaagtgctgtcagagggctccatcggcctggccggtcagaccagtgttgagtgggcggtcagaccggcctcggctcggtcagaccgccatcggctcggtctgaccgactacggctccgtcggctctgtatcggccaccccgagcagcaccatcccggcctccaggggccggtctgaccgcgcatgtaccgccggtcagaccggccttatgcgccggtcagaccgccttcttgcggccggtcagaccggccaaggcacgccgcgcttgtcattaattaccaaaattaacaacgggggcctagatgcttcaccgccaactgccgccggccaccctccaaatccggccgagaggcgcggatctgggggacaccgcgccgccgccgccgggcaccgcgtcatcgccaccacaagcccacacgggaccaccaccaccaccttcgcgcccgctgccggttccgtccccgccaccatcgccatccctgccgccatcagccgccgccgcccggcgccgcacgcccctgccttcgacgtcgccatccccgccgccgtcctccccgccgccagtcgccgccccgccagatccggccagagcggcctggatctggcggtcaccgccatcccgcttggtggctcccctgcccgcccgagcaacgcgagcggaggggcgaggggcgccacgagcgatcgggggcggagggcggcgcgggcgacggggcggagggcagagggcggcgcgggcggagggcggcaggggcggagggccgcgtggaggagcggcgagcggcgggagcggaggggcggcgtgagcagcagagcgacgggagcggctggatttggccagagatag

SEQ ID NO: 81669 - DNA, 129 bp, Oryza sativa
  Clone ID: PAT_MRT4530_81172C.1
atgacctttaaccgaccaacacaatgcctagaaacaaacaaacaactccgaccagccataaccagagatgagattcagatcccaccagaaaaggcctcacaaccacgaccgttggctcccacggaggcg

SEQ ID NO: 81670 - DNA, 415 bp, Oryza sativa
  Clone ID: PAT_MRT4530_81173C.1
aagacgccagatatcgacttcagagataagcatggctagtcccctacggtgtctacggatactattaagagagacatagcgctgtctttgatctcgccggatacgaattcgaggaggaaggctaccctgttgtcgactacgagtcaatgaataaagagcaacaccaaattcggccaacaggatgtatggctattacctatcagataaggggtccgaacctgtataaaaatctatgtctccatctcttttacctcaatctcgcatataccctggtaccgacgattcccatgccatccaaataccctagtcacgatatcaaacgtcgacatcttcggcgacaagcgagcgacgcaggccaccgcgcgcggttcgttttcgcgagggaggccgccgccgaccagccgccatggtctcg

SEQ ID NO: 81671 - DNA, 1878 bp, Oryza sativa
  Clone ID: PAT_MRT4530_81174C.1
gcaacacaacacaccaccatgaagacggcatcaatggcggcgtcgctgctcatcccgctctgcctctgcatcctcctcctgcgcggcgcctccgccgtgagcgaccagcaagaagccggccgtcgcgatagctgcgaccgcatcgaccgccgcatccgcgcgctggagccgacgcgccgcgtcgactccgaggccggccacaccgagctctacgacgaccgcgacggccagctcccctgcgccggcgtcgccgccgcgcgcatcaccatccagcgcaacggcctcctcctcccttcctattccaactccccccgcctcgcctacatcgtccacggccgtggcatcgtcggcgtcgtcatccccggctgccccgagacgtaccaggagacctcgtcgtcgtcgtcgcaggagcaggaggacgacgagcgccgccgccgtggccgccgtggtgatgaggagagacggcgatcgagcgagggagaggaggaggaggaagaggagaccagccgccgcagcttcgagcagtccatccgcgacgagcaccagaggatcaccaccgtccgccagggcgacgtcgtggccatccccgccggcgcgccgttctgggtccacaacgacggcgactccccgctcgtcgccatctccgttcacgacgtcagcaacaacgccaaccagctcgaccaaacctccaggcgtttccggctagccggcgggcaggcgaggagcgaggggaggcagaggtacggtgagggcgagtcgtcggagtcggagacggaacgcggcggcgaggagtcgtacaacatcctgagcggcttcgacaccgagctgctcgccgagtcgatgcgcgtcagcccggacatcgcgcgcaagctgcagggccgcagcgacaagcgcggcaacatcgtgcgcgtccgccgcggcggcctccgcatgctccgcccggcgacggagcgggtgaccgacgaggagatgatgaggggcgccaacgccgccgccgccgccgggaacgggatcgacgaggccgtctgcttgatgaagctccgcgagaacgtcgccgacccgatgaaggccgacctctacacccccaatggcggccgcatcaccgtcctcaacagccagaagctccccgtcctcaagctcatcaagatgagcgtcaaccgcggcgtcatgcgccggaacgcgatcctggcgccgcactggaacatcaacgcgcacgcggcggtgtacgcgacgagcgggagcgcgaggctgcaggtggtgagcagcgaggggcggcgggtgttcgacggcgagctccggcgcgggcagatggtggtggtgccgcagagcttcgcgtggcggggcgcgccggcgacgaagggttcgcggtggcggggcgcgccggcgacgaggggttcgcgtgggtgtcgttccagacgagcgacggcgccatgaacgcgccggtggttggcaagtcgtcggcgctgcgcgggatgccggcggacgtgctggacaacgcgttcggcgtgtcgagggaggaggcgcgcatggtcaagttcgggagggggcaggagctcgccatcttctcccccaagtccggcgccgccgcccgccgccgccgctctcccggccacagggacgacggcgtgctcgccgccccggcctgaggcgtacgtagataccagcgtgagcgcacgtgcgcatgtacatgtagtactaataatgtgcacgttttccgttaagggtgccacgcactgcatgcaccgtatgttggcccgtacatgtacggtgtacccgatctagaataaatgaagtcgctgctgctaccaaagtgcagtgtgttaattaaaaaaaaaaaaaaaaaaatcaattaaaaaaaaaaaaaaccggacgcgtggg

SEQ ID NO: 81672 - DNA, 5337 bp, Oryza sativa
  Clone ID: PAT_MRT4530_81175C.1
atggcatacaacgagaagatcaagttcatgacctacaacgtctggtctaacgaacatgtcgcggtgtatcggaggattcaggccatttccaagctcatagtgcgccatgagccgcacgtcatcttcttgcaggaggtcacggagtacatctccagcatctttgaagaggatcactggtggatgcagtacaagaagctgtggtcatctaccacacaagaaagtcatttctgccttctgcttagcaagttagacgcagatgatgcgcacatccggcggtggtcggagtcggtgtcgccaccgcggattgcaccacctgggttgctctcacaaatggtgtacaagcccttccccccggggcatccacacagcgcccaccgcgtgtgcgcggcgacgtgccgtctcgtgccgccgacgccgatggacgtcggcgccgcggagcgccgccctcttcctggagcatttcgagttcgacgccgtccacgggctgttacgctgcctgtagcagatatcgacaaaggcaatccgctgagaagctatcggcgtcctacgcgggctaagaaacctaatgtccgtagcgctcgaatcctggagtacctcaacaagccacgctaccattcgcgagcgcagctcaaggctcaggagatggagcagcaactcgctgatctcgcggcggccatggcggcgatccagaagcaaaacacggcgattcaaacttcggttgggtcgctggaagaaatcaagccgatggtggtggagttggctggatggaagccaacagtggagcggacggtggcggaattacgggacaagatggcggagttgcgcacgcaagtggagcaaatttctcgttctccggccagggtgaccaagcttgcggatctgcctccgttgctgcctacaccaccaggaccgaagctgaacgagatcaaggacgaggaacccaagccctctctagaactcaagcttcctcaagtggatgaacatgctaggctatttagccatcgcgctgcaacttcaaaccgggggaaaaccttgggaaatgaaaatttcccatcgtctctcccgggcaagggtacgttctattcgagtcctggaaataattctcgatttgagtttggagaatcgtcggggaggtttgggtcatcgcatcatgttcatcaccatgggggatctgtgcgggtagattgcccttcgtttgacggcgataatcctagggcatggaagcttaagtgcgaaacctattttcgagtcagtggagtctattttgatcattgggtgggagtagcagctttgcagtttatgggggcagcgcttacttggctacaatccactgatgctcatattgagtgtgtgtgttgggaggatttcgcggaagtagtgtgtaagaagtttgggagagaggagtttcagggattaaataggcagtttaatcagttaaggcaaaccggaactgtgactagctatgcagagaggtttagtgagttgattcatcaattgcaagctcatcattcatcatggaacccagttttctttgttactcagttcatggatggcctacgagcagacattagagctgctgtagtgctccatcgcccacaagacctcgatactgctgtcgatttggcatgtttgcaggaggaagtattggaggtgctgcgcaaggaaatgcgacgcagtgattttgctgggggagttcgtacggtggcaagaccaaattctctgacatcagtttctactgttcgtcagaacacaagtctgggcaacaaacctgatgaatggcgcattactgaagaatccagggcatcaatggctgaggataagctgtcagccttgcgtgcttactgccgagccaaaggactctgttatacttgtggggagagatataatcgagaccacaagtgtggtcctactgtgcagctccatgttgttgaagaattattggaaatgttatctgctccttcggtggataattctggagatgagcagtcaagtgtgcaagacccaacagaaggaatttctgaaggagaaatctgtcagatctctaaggaagcaatgatgggtattgaggcttcaggaactctacggctgcagggtttcattcagaaacatgaggttctgatgctggttgattcagggagctcgcgcatagctttatatctgaaggtgtgcgtggccgatggcggagttctgcactgttctcaagaaattgctgattgtgaatggtgggtgcaaggatacacttttcgttcagatctcaagattttgcctctgggtagttatgacgttatactgggtatggattggcttgtgaaacatagtccaatgcaggtggattggcgagccaaaactctgttatttcagcaagagcagcagtctgtttgtcttaagggggtacaacttaacactgttcattgtccggcaatttctgcatctcaggtgcgagggctggtcagtcgtaatgcggtggttcagactgtggaactgtgtttgttggatactattgcacctagttcagatataccagctgttattgactcattgctacaagaatttgcttctgtttttgaggaacctcaaggtctgccaccacagcgtgattttgatcattctataccactgttgcctggtgcaaaacctgtcaatcttcgtccttatcgttataatccagcacaaaaggatgagattgagcgtcaagtgactgaaatgttgcgtcagggtgttatccaacccagctccagcccgttctcatctccagtattgttggtcctcaagaaggacttgacatggaggttctgtatcgactatcgccaccttaatgctataacagtcaagaatcgatatcctcttccagtgattgatgagttacttgatgatctggcaggagcaactatattcactagtttggatttaagggcgggttatcataaaatccgtatgcgaccagaagatgaacataaaactgcgttcaaaacgcatcatggacattacgagtttcgggttatgtcttatggattaactggtgcacccgctactttccaaggtgtcatgaatacagtgttatcccctttgctccggaagggagtgcttgttttcatagatgacattctgatttacagtgcaaccttgacagaacatgtgcaattattacgtcaggttttccaattgttgactgaacatcaacttaaggtgaagcgctctaagtgttcatttgctcaatcaagtttgatttacttgggccatgttattagccatgctggtgtcagtactgatccaaaaaatattcttgctgtgcaacgatggccagttccaactaatgtaaaggaggtacggggatttcttggcctggcaggttattatcgcaaatttgttcggcactttggtgtaatcagtcgtccgttgacagatctgcttaagaagaatgttgtttttgtctggactatatctcatcagcaagcatttgaagctttgaaatcagccttaacttctgcaccagtgctggcgattcctgatttcagtaagccttttgagattgaaactgacgcgtctgacaaaggtgttggggcagtcttgatgcaggcaggccatccattggcgttcttgagtaaggccttgggacctcgcaatcgcggtttatcaatatatgaaaaggagtgtctagctattcttttggcagtggatcgctggcgctcttatcttcagtttggggagtttgtcatccgtactgatcagcgtagtctgattcatctcggtgatcaaaagttggctacgccttggcagcagaaggcaatgacgaaattattgggactgaattatcggttagtctacaagcgtgggttagataatagagctgcagatgctttgtctcgttgctcaactgatgatcacattcaagcatgtgctttgtcagtatgtatacctgactggttaactgaagtccaagaaggatatctgtctgatccctactctgctgatttgttatctaaggtgactttacaagcttctgctgtacctaatttttccttgcgggatggcattttgcattataagaacaaaatttggattggcaacaatactacactgcaacatcgcattttatcagccttgcattctggagctattggtggtcattctggggtgcaggtgacttatagcagaataaagaaactctttgcttggcaaggattgaagaagtctgtgctggaatttattgatcaatgttcagtctatactcaactcaagatgagttctgcataccatcctcaaactgatggccaaaccgagcgtgtcaatcagtgtcttgaaacttttcttcgctgctttgtccatgcctgtcctactaagtggtaccgatggttggctctagcggagttttggtataatacagcttatcactctgctcttggcacatctccttttgaagtgctctatggtcacactcctcgtcactttggtgtattggacatttctgctgctgctgttcctgatcttgctgagtggttgaaagaacgagcaatggtttcaggtttgctgcttcaacacttattgcgtgctcagcagcgtatgaaggttcaggcagataagaaacgttctgagcgagagtttgcggtgggagattgggtttttctcaaagctcaaccatatgcgcagacttctttggcagttcgttctaatcacaagttagcttttcgctactttggaccgtttcaagtaactgctcgagtgggtgcagtggcttaccgattgcaattacccccaggttgttctattcaccctgttatccatgtatctcagcttcgtcaggcgcctccaccggattctgcgacggttgtcaagttacctgctgcactggctccggattcttcagttccgatgcagatattggtgcgtcgtctgtacaagcttggagctgccgtgcgtcctcaattcaaggtgcgttggtttggccatggtgtggatgaggcgacttgggaggatgctgaatctcttcgggtccgttttcctgctgcaccggcttggggacaagccgagtctgaagggggggagaatgttacgctgcctgtagcagatatcgacaaaggcaatccgctgagaagctatcggcgtcctacgcgggctaagaaacctaatgtccgtgggtggctcaagccggagatcaggaagaggccggacaggttcttgtgcaggctgagggacttcaagctggacagcgtcgagatggtcggcgtggagccgatccccggcgtgacgcactgcgacgacaaggggggcatgctgccggtgctccccagccaccacttcggtttgctgctcaccatcgccccccaaatccacaagtga

SEQ ID NO: 81673 - DNA, 271 bp, Oryza sativa
  Clone ID: PAT_MRT4530_81176C.1
cgttaccactcgacgcgctacgcaacggaagaaggcgctaagaagtcgaaggaattctcgcgaagtagcgcgcgtcgatgtagaggaagtagtcgatcgcaccggctcgaccttctcctcatgcgttctcctcgctgtattcccacagtgatgcaatacctccgccggtcacaccccttacaaatatataggatccattactcgggcctccaaggcccgtaggactcctattcggatctctatccgaattaagctcatattggatctccat

SEQ ID NO: 81674 - DNA, 771 bp, Oryza sativa
  Clone ID: PAT_MRT4530_81177C.1
tgggtagtctgtacaagcttggagctgccgtgcgtcctcaattcaaggtgcgttggtttggccatggtgtgaatgaggcgacttgggaggatgctgaatctcttcgggtccgttttcctgctgcaccggcttggggacaagccgagtctgaagggggggagaatgttacgctgcctgtagcagatatcgacaaaggcaatccgctgagaagctatcggcgtcctacgcgggctaagaaacataatgtcggtgtgagtgggccagaatgggtcacagtccaatgatgttctggtatggtgtataaataccagagggctaagagagaagagggtgtcgaaagtgtaaacacaaaacacaaaactattccacaaatcaaaccttcttctctattttgacatttcctcctctgttcctcccgttcttactctgttcttccacttcctctagaattcgctggatagatcgtaacacgggcacggggacgtggtgctcggaggtgatttcagctgggacgaagacctcgacaggccgctccggctgaggcccgggtgggtggacgtacgacgtggcggcgaacccgatgctgaaggggtggctcaagccggagatcaggaagaggccggacaggttcttgtgcaggctgagggacttcaagctggacagcgtcgagatggtcggcgtggagccgatccccggcgtgacgcactgcgacgacaaggggggcatgctgccggtgctccccagccaccacttcggtttgctgctcaccat

SEQ ID NO: 81675 - DNA, 521 bp, Oryza sativa
  Clone ID: PAT_MRT4530_81178C.1
gttggatagccatgtagtcatgtaaatgtgttaatcaactgtactttttgaaccgcatgggggttcttctggatgtaatctggaatgggaaggtctggcctccccactcatttgtccaatatcttcttcccccaagtacattgacattcagcagtctgtagcttgcagaacatgattatttctaaaattgaagtacttttccattatgttttcattggaccacttttcatgtttaattgtgttcatacagtacaactaattgtataactatcgtgcagaaaatttcatgactggtcttcgtgttgtggtcgatcgagaaaggaataatctttggttggaagaaaattaattggttcctcccttcagcacctgagaattactccctcgaggaaacaaagggtgggaacccaacaagcgttacacagttgagaccccttattaattcctacccaataatgtgggtatgattgtttaatcactcaggtttctcttgtcaatttggccgctctgatccttttcta

SEQ ID NO: 81676 - DNA, 3492 bp, Oryza sativa
  Clone ID: PAT_MRT4530_81179C.1
atggccggcgtcgtcttcctcgtcctcttcgtggcggccgccgccatgccagcatcggtcaccgcagcgacatcacagaccgatgcgctgctggcgtggaaggccagcctgctgctgggcgacgcggccgcgctgccctgccgaacgcgagcagcgccggtacgcacacggtgcggagtagcacgatgagcactactagccggccgcgtcacttggctgcgcctccgggccgccggtctcagcggcggcctcgacacgctcgacttcgccgcgttcccggcgctgaccgagctcgacctcaacgggaacagcttcgccggtgacatcccggccggcatctcgcaactgcgctcccttgcttcgctcgatctcggcgacaacgggttgaacggctccatcccgccgcagatcggcgacctctccggcctcgtcgagctccgcctctacaacaacaacctcgtcggcgccatcccccaccagctcagccgtctccccaacattgtccacttcgatctgggagcaaactacctgaccgaccatgacttccccaagttctcgccgatgcccaccgtcacgttcatgtcgctctacctcaactccttcaatggaagcttcccggagttcgtcctcaggagcggcagcatcacctacctcgacctgtcgcagaatgctctgttcgggccaataccggacatgctcccgaatctgaggttcctcaacctgtccttcaatgcgttctccggcccgattccggcgtcgcttgggaggttgacgaagctccaggacctgcgaatggccggcaacaatctcaccggcggcgtcccggagttcctcgggtcgatggcacagttgaggattcttgagctcggggacaaccagctcggcggtccaatcccgtcggttcttggccagctccagatgcttcagaggctcgacatcaagaacgctagccttgtttcaactttgccgcctcaactaggcaatcttaataatctcgcttatctggacctgtccttgaaccagttctccggtgggttgccgccgacgtttgcagggatgcgggcaatgcaggagttcggcctttccacgaccaatgtcactggtgagatcccaccggcgttgttcacgagctggcccgagctcatatccttcgaagtgcagaacaactcgttcaccggcaagattccatcggagctcggcaaggcgaggaaactggaaatcctttacctattcctgaacaaccttaacggttccatcccggcagagcttggcgagttggagaacctggtagagctggatttgtcggtgaactcgctcaccggaccgatccccagctcgctcggcaacctcaagcagctcataaagttggcgctattcttcaacaatctcaccggcgtaatcccgccggagattggcaacatgacggcgttgcaaagcttcgacgtcaacaccaacattctgcacggcgagctcctttccatcggaacctggaggtatgccattttcggttttgttgatggcatgcaatgtaaagttaagcagaaagtctcctctgtcgataaatttctttcaagaggaaatactgcatcaagtatttgtagctgggttttttttctgtaccatcgaagatgtagcatggttagtttgtcagtgttctgtaattggcaggagtcataggacccccaacaaacttcctttgtatcaagactaagatgtaagaagttctgcatccatccaaattatatggaacatgtccatcttatatactagaaacaaaaaaaaaaaaacatctcggaggccttcggcgtgcaccccagcctggagtacctggacatctccggcaacaagcttactggtgagctgtcctccgactggggacagtgtaccaacctcacgctcctgagcatggacggcaatcgcatatccggccgcattcctgaagcatttgggagcatgacaagattgcagattctcagcttggctggaaacaatctgacaggaggtattccacttgatttgggtcatctcaaccttttgttcaatctcaacctgagccataattccttttccgggcctatcccgacaagtttgggcaacaattctaagctacagaaaatagatatgtcaggaaacatgcttaatggcacgataccagttgctcttggcaagcttggtgctctgacatttcttgatttgagcaagaacaggttgtcagggaagataccaagggaacttggtaatctggttcagctgcagaccctacttgatttgagcagcaattttttatcgggttggatcccccaggcagccttctgcaaactgctctctcttcagattctgatcctgtcgaacaaccagctgactggaaaactgcccgactgcctatggtacttgcaaaatctgcagttcttggacctttccaacaatgcattctcaggtgaaatccctgcagcaaaggcaagctacagttgttcccttatatcgattcatctttccagcaatgacttcactggagtttttccatcagcgttagagggatgcaagaagttgatcaatttagatattgggaataacaatttttttggtgatattcctatttggattgggaaaggccttccatcattgaagattcttagccttaaatcaaacaacttcagtggtgaaattccatcagagttgtcacagctttctcaacttcaactgctagacatgaccaacaatggtttgacagggttgattcccagatcttttggtaaacttacttccatgaagaatccaaagcttatatctagtcgggaattattacaatggtcttttaatcatgatagaatcaatacaatctggaaggggaaggagcaaatatttgaaataaagacttatgcaatagatattcaattagtgacgggtatcagtttgtcaggtaactcattatcacaatgcatccctgatgaattaatgaacctccaaggccttcaatttctgaacttgtcaagaaactatctgtcacgcagcatacctgagaacattggtagtttgaaaaatcttgagtctcttgacctatcatcaaacgaactttcaggagccattcctccaagccttgccggtatatctacccttagcagtctgaatctctcgaataatcatctatcaggcaagatatccaccgggaatcaacttcaaaccctcactgacccatcaatctacagcaacaattctgggctatgtggccttccgttgaacatctcatgcacaaattatgcacttgcatcagacgagagatattgtagaacatgcgaggaccagtatctatcgtactttgtgatggctggagtggtttttgggtcttggctatggtttggaatgttattttcaattgggaacttaaggtatgccgttttctgctttgttgatgacattcagcgtaaggttatgcagaaggtgtcctgtattaatcaacttctttcaagagggaatactgcccaatatctgtag

SEQ ID NO: 81677 - DNA, 615 bp, Oryza sativa
  Clone ID: PAT_MRT4530_8117C.1
gatcgcagcggaccaccctaagctacaagctccaaaaacatggccgccacctagatgtcgccgccgaccgtggccgtgctgcggttggcgccgtcgccgtgcgtgtggtcgccgattgtggcgtttcatggcgggggcggcgaggaggaggtgggcttgggaaagtgcgtagctgagtccgtctgtggtgatcaacctgatcgccggagtatccctgttgctggggcggttcgtgctcttgaagtttcatcgggtgaacgcgctatcacctggccggagcagaacggtctgtgctttcacgacgcaggatgcccgggattcgcagcttgtctggcacagccgcaggggctgcatcctgggtgtaagccttgcttgcggctgattcggccgactggttgcgtattatatgctggccgcgtgctttctttatgcgtgctatgcttgctttactgctgtctcatattgtctggttccaggagcctcaggagggttttctgctgatccgtctcttgtttcttggcgttggccttgctcgtgcgtctcttttgcccgttttgctaaccacagattgtccgcccttttgtcagttttgtgctctttgctggattttttttt

SEQ ID NO: 81678 - DNA, 3819 bp, Oryza sativa
  Clone ID: PAT_MRT4530_81180C.1
atgccgcttaagatcaagatctttatgtggtatttgcttaagggagttatgttaaccaaggataatttagcaagacggaattggactggtcattttcaaggcaacatattggcttcgtctgtgggcacagttacaaaagaagtggcgattgaaaggaaggaagcgcaaaatgcattcatcaacaaaggtcaggacttgattccttcttttgttcaagattctaatgtggcccttatggatatggctagtattttaggagttaacttaggctgtgctattgataatattgattcaaacttgtctttgattaaagacttagaatgtgctagaattagtttatttttaaaagaacaagaggttatgaagaataagaattgtgaatctaaaactgagatagaattccctgtggaaaatttgcttgatgaattgtgctcttctgagggatatgactctgatttggagcacattgactctttacttaaaggctctcatttttctggtagtaagcataaaaacaaaagaggaaaccttgagattttcaaggatttctctgctggtctattgagaggtctaagtggtaacaaaaatatgaaatgggagtggttgccggctatgggtcactcaagaggatttttggagattttcatgttaaaattgaattgcaagatatgtgtcacgaccggaattaacccaacgggcgttccttacgtgcgtgtattattccttgtcccaggaggcaagggcgcggctattcgaatagattatactctgatcagaggtgtacatctttacccacaagacacatcttcctcacgtgtaaccacgtgccacataccaccacgactgagccacaaactaagccgcaccgtgggtcccacgcgtcagccgcacccgagggcgcgggcggctgacggccgggcgccacgcggcagccactcggcgcgcccgagggcggccaagccggcgcagccggcgggaggcggcgcccgcgccctatggtcgccggcggcggccataggcacggcggagcggcggccgagagaggggaagggaagggggaaaaagaagcggcggtccacggctcaccctaggtcgacggcgacaacgaaaaaggtggccggagcggaggaaggcggcggcgcggctcaggtcgacggggtcgacggcgttccggcggccggcgagcgaaacggaggggtggacgaggtcggcgaggatgcggcaaagccgaaggaggcggcgccgaggtgggaggtggtccggggcgacgacggcggcggaccggagctcgacggcgacggcggagagagagagcgatggcgtgagctcgattctggcgaggaggaagggcggcgagaggcggaaacggatggaggagctgtatatggagcagcccaaaatgcacacaaggataggtttttgactgaactggctaacattattcagaaacaaatgaaacctttagtcatgggtggtgattttaatattattagaaaggaaagtgataaaaacaaagctggagggtataataggtggagtttcatttttaatgctgtcatagagcaagctaatttgagagaaatctttctaggtgggagaaagtttacttggtgtaacaatcaagagaatcccactttagaaaaattggacagaatttttgtgaacacagattgggaaaaggaatatcccctcacaatggcaaaaactttaactagaagcatttcagatcataatcctttgcgcatagatactggagtcttaaagattactcataagagcttcaaatttgaactcagttggtttcttagagaagatttaaaagaaattgtggagagtgtttggaaaattaattattatggatctagtattgagagatggcagaaaagatttagagctttgaggaaaaaacttaatggttggaataataattgggaggggagatataggagggaaaaagaaagcattcttgagaaaattgaaaatttggatgcgaaggttgaaagatgtgggatgagcaaggaagatagagaagaaaggaaggagttggaggataaactgaattttgtgattagagaagaaaagattaaatggtttcaaaggagtaaagaaaatgagttgttagagggagattgtaatacaaaatactaccatgccaaggccaatgggagaaaaaggaaaagctatattcattccttaactcaggaggaaggtgaaatagaagggcaagagaagttgttaacctatattactagcttttacaaagatttgtttggtcatcctaaacagaacacactttttctagatatgagaggggttacaacaataatggaagaacacaaggtgatgttgaccaaacctttcagtgaggaagaggtcagaatagttgttttcgagcttaagaaaaacaaagctccaggcccagacggttttattggtgagttttatactcagttttgggatctgatcaagggagatcttctaaaattggtgaatgactatcacaaagggttggttgacattgatagattaaattttggtgttattaccttgattccgaaaattaaggatgcagctcaaattcaaaaatataggcctatttgtctcctgaatgtcagttttaagattataaccaaagtgctcatgaataggattacagaaattatgacatatatcatctcaaaaaatcagacagcgtttctgaaaaatagattcataatggaaggtgtgctgatcctgcatgaaattcttaactccttacatcagaaaaaacaaagtggtgtcctttttaaggtggattttgaaaaagcatacgacaaagttgattgggtctttatttatagaatgttgaaagcaaaagagtttcctgatcaatggtgtgattgggtaatgaaagtgataatgggtggtaaggttgctgtccaagtaaatgatcaagtggggccttattttaagacacataaaggtttgaggcagggagatcctctatcccctcttctattcaatttggcagcagaagcactaactttactagtgcaaagagctgaagataatctgttgatagaaggattgggggaaaatgataacaacaaagtggtcattttacaatacgctgatgatactatatttcttcttcctgataatgagacatatgcaaaaaatctgaaatacatcttatgtttgtttgagcaattatctggtctcaaaatcaacttcaataaaagtgaggtgttctgcattggtgaggttgctgataaggcagaggttttcagtcagatttttgcttgtagtgtgggtgttttgcctatgaagtatttggggatcccaatagatcagaagcgcattacaaaaaaagattggagaaatgctgaaaacaaaatggaaagcaagctgggatgctggcaagggaaacttcagtcaatagggggaagattaattttgatcaattctagtttaagcagtgttcccatgtatatgatctcctttttcaagttacccaaaggagtgaaagaaaaaatggacttcttcaggaggaggtttttgtggcaggaggaccaaggcatcagaaaatatcatttagtgcaatggcccattatttgttcacctagagatcaaggaggtttaggtgttctggacctggacattatgaataaggccttgttggggaaatggatttggaatttggaaaacaaagaaggttggtggcaggagattcttagggggaaatatttgaaaaataaaactatgtctgaggtaaactttaaacagggtaactctcatttctggcatgggttgatggaagtaaatgatgattttttttaa

SEQ ID NO: 81679 - DNA, 2292 bp, Oryza sativa
  Clone ID: PAT_MRT4530_81181C.1
atgaggatccgtcgataccttaggctggcacccaagaagccaggaacacaggtcggtcaacctgcgttcccagtttcgaagaagccattgaccgcaccaaaaacaaaggagctcgccgccgtcggtcaacccgagccgccgctcgttccccgtcgtcgccggaagtcgtccgacgtcgtttgtcgttgtggtgagtaccgttgggttcgtctcgtcgtcctctacgtgttcttgccctccaattccgcagccggccgctctatctccggcgaggtcgccatcgtggatgcaatgtggaaatccaaatatgcaattggaaaggaattgagcccttcacttaggtccctgcattttgctgccattctcacccgcctgcatataaagggtgtccagcctcatcgtgagaaacccaagtcccgagaggaactcgagcgccaccagttggaagcaggaggcatcccacttgatccagaggaacgggtgtgcgcgttcccccagtgtacgtcgtgcggtgcttgccagcgattctcattggcactgtgccaggaagaaccaccggtgctgtgccgtggtgcctgggtccaaccgggtgcatctcccgttggctcccagtccgcctcgtacatctgcacaggtatcgatgaggatgactcctcatgctcttgccttggtctgttgcgtgtcttcctgtggggcccgcctgtcatccctatcctcgcgccgctcccgccgcccgcccgtgccctagcgccgccgccgccgccgcggattccgccgcatcccgccgtccccgcgcgcaataaagtggggggaatcattccccgtgattccctctcccttttcccccacttttccctctctctctccctcggattcgctcggaatctttcccctaaacctcgtcggcatcaatggcggccgcatctttcgcggccgtttccccctcgcccggccgctctctccccctcccgacgctatttaatcgttccccgtgcctccctcctccgtttccgccgctcgccgctcactctccccttcggaatcgagcccgcgccgtcgtcctctctctccgccgtcgccgccgagctccggttcgccgctgtcgtcgccccggacctcctctcgtctcggcgtctcctcctttggcttcgccgcgtcctcgtcgacctcgtccgctcctccgtttcgcccgccgaccgccggagcaccgccgtcctcgtcgacccgaaccgcgccgccgccttcctccacttcggtcgccgtttccgtcgccgccgtcgacccggggtgagccgaagaccgccgcttcacttccctcttctctcctctctctcgggcgccgctccgccgcgccggtggtcgccggcagtgaccatcggggcgcgggcgcgccgcctcccgtcggccgtgccggcgaggccgccttcgggcgcgccccgcggctgccaggtggggcccggccgtcagccgctcgcgcccgcgggtgcggctgacgcgtgggacccacggcgccagccgcgtgcacccggtccaccgtggaccgagaggctgccgcgtgggtcccactcccgtggacccgacgctgcagcttcggaagatccgctcttcgtggaagttgaagccggcgtttgggaaacacctcggccatataaggaccggtcttcgggcctctgttgcaaagcactaccgtactttcacatgtctagtggggcaaatgaaggctacacgagctgcggcccggtagtcgagatgtcatggtacagggttggtgccctgctgctgggggctcagtcctgcctgcctgtcccggaggttccggccgtaggtgggattgggtcggtactcttctctatggctaggatgggttggaaactatgtcgcgtcttccgcctgtataccgtggtgtgccaggacagaggaatcaaaatgagaaaagaaaatgccgagtccgggaagatatctgttgcttcaattgtcaaggaatggccgcagccaccagttgacaagacagaggccagtatcggcattgtacctttggatgttccagcacagcagccaagaaatcaagtacaagatgaagaacccgagcgtaagaaagttattgtcggccgagcaaagggcaatcaacctccggagggcgataccaagcagaagaccgtcatccgcttcaacccacaatcagaaggaagcttctccttgcctcgtattcttgtaatatgggagaaatgtgtaataaagacaagttctatgaggactctttcagaagatgctgatatgggattatgtgtataa

SEQ ID NO: 81680 - DNA, 742 bp, Oryza sativa
  Clone ID: PAT_MRT4530_81182C.1
gcacgagggcctcatctcctcttcgtccctctctatctttctttctgatttctcattaatttcgcatcaagctagcttgtgatcagcaatggacggcgagatggattggatcgcggcgcgcttcgtcctgtcggcgataatgggggtgcacccgctggtggccgtcgacgacgccggggccgatgacgagcacttcccggtggacgacgccgcagccgtccacggccacgcgtcgccgcctcctgtcgcgctgccggcggcggtgctggcgccggaggaggtggccggcgcggtggtgtgcgcggtgtgcacggaggaggttgcggcgcggcaggccgtggtgcggctgccctgcgcgcactggtaccacgccggttgcatcgggccgtggctgcggatcaggaccaactgcccgacctgccgcgccgagctgccgcgggagcccgccgccgccgactggcgtgtcccgcggcgcccggcggtggcggagacagccggcagccgcctgcggcgggaggcgtcgtatacgatgctcgcaggcacgttgcccagctaatcaatcatcatcgatcaatagattaatttattatactatgtacatgtgtaaattaatcggcatgtatatacaacgaaggtgaagtgaaaattgtacagaggcaaactcacgtaaacccagcgcccgctggatagaacggaacgatctatgaaagataacatttttaacttaaaaaaaaaaaaaaaa

SEQ ID NO: 81681 - DNA, 1238 bp, Oryza sativa
  Clone ID: PAT_MRT4530_81183C.1
gtaccaccgctcaacaggtcttcagctagaaggcctctctgaacagcattctcagccgtgcttcgctcctccgtacgcaaagaatttctcctgcttttgtttcctgcacaccggctagatctcgccaagaactcggtaatcccaagccctgggtgagtgagatccagcttcgcaagaaggttttgggggttcttgggcagttctgccaggagagtgacactggatgattgcataaatgaagcttgctgaatgtagattgtgaagttctcctttcctgcgtacggccatatacacttttatcatggcaccgcgcaacaggtcttcagctagaaggcctctctggattgtcatcttgattgcttttgtctgtgcagtaggcattggagcctatctttatacaccccagcatctacacaccttgttacttggggtcatcaaattcctgtagttctcgggctactccgcaatctgctaaggtttacactgatgatgagattgcggatattgttgttctaagagatatcattttggcacagccaaatcattcatatgaaccaaaaaatgttttcctattgcagactcccatttttatgtgtttggacaatctttgtgaacagctactaggctggcattatgataataagataatagaaataaataaaagaaattgaagaaaaggtgcacagtgtttcacagtgaaacgtcagcatgcagttcttattctttccgatttcctttactatgcaaagttcaagcggtactgtaagctctttactgatcttgtgattgcacttttgcagccgggaaacgaatggcataactgctattctgatgaacactatttgccaaccctctttaatttgtgtttacttcccagtgatttcaggccgttattgtacctgcagatggttgatccaactggaattgcaaattggtcagtgacacatgttgattggtctgaaggaaaatggcatcctaaagcttacagggctgttgacacaagctttgaactgcttaagaatatttcgtccattgatgagagtattcatgttacaagcaatgcaaagtgtttcattgctgaggaagatgaaaaatccagagagatttgccaattttttcttgaaagctctcttggaacatcaaatggttttctattgcgaactgtaatgatgatgtttgagcacaatgattttgatcaacaacttccctatatgaagaatattcagtttgaagagtaa

SEQ ID NO: 81682 - DNA, 2256 bp, Oryza sativa
  Clone ID: PAT_MRT4530_81184C.1
atggtgaacactcgcagcaatgggaatggtctcaacaacctcaacaacaacaaccctaacaacaacaatggagagaatcccactctggcccaagagaaggtctcatttgcatcacatcagttgcatggccctgcctctgaatggtgggatcacttccgccttaacaggactactgctgaacctatcacttggcttgaattcaccgctgctttccggaagacgcatataccatcgggagtagtgtctctcaagaagaagaagttcaggtcgcttactcagggatctcgctctgttacggagtatctgcacgagttcaatcgtcttgctcgttatgctccggaagatgtgcgcaatgatgaagagcgccaggagaagtttttgggaggacttaatgatgagctttcttacccactcatggttggagattatcctgatttccagaaattagtggataaggctattcgtcaggaggacaagtacaatcgcatggagcagaagaaacgtcggattgctcaattcaagacacaacagggaaataatcagaagccgcgtcttactttaggaccccagcccatgccacagggaggttcttcgtctgttgttcgtccgcaacgtcagttcttcaacaacaatgctggcaacaacatccgtaatcaagctccacgtcctgttgcagctccagcacagcaacaacctgccaagagggagcaaggcagcaagcccgtggtgtgtttcaactgtggagacccaggacattatgctgacaagtgtccgaagccccgtcgcgtgaaggttgtccctgcccagaataactctgctgtaccagcatccaaggctcgtgtaaatcatgtcgctgctgcagaagctcaagatgctccagatgtgattttggtccgagagtatcctgatgtgttcccagaggatttacctgaaaggatacatcagaccgagttcatcaccatggggagctccggatattatcggaggtttatagagaatttttccaagattgctaagcccatgacacgactgcttcagaaagatgtaaagtacaagtggtcggaagaatccttagaagcgaagcccactctaattgatcaagttagagaagcccaaattaatgatcctgatattcaagagatcaagaagaatatgagaagaggaaaagctattggtttcttggaggatgagcacggaactgtatggttgggtgagagaatctgtgtccccgacaacaaagatttaaaggatgcaattctgaaagaagctcatgatactttatactccattcaccctggtagtactaagatgtaccaggatcttaaggaaagattttggtgggcaaccgtcgccgtcgctcgggaaggccgccgtcgtcatcgccaagtcgccgccgtcctcgtccgccccttcgcagccgtcggaacccgccggagcttcgtcgccgtcgacaacccgaagatgccgcgttacaagcctgagtacctgtttggtgttgagggttttgtccaggagttgcgtacgatgtcctttgtcattggatttgggactgcccttttttatgcccagattcgtcatgatcgtcatgaagaaaagtgccgagtcaaagtcaccttgaacagcaatagtgaagaggtcccctcagtgatgtttgaagctggaggaagaaactacatccatgcatgtcaggaagtggcaaggatcgccataggagagctccgtgatcgctacagtgatcggttggccgatactgagtatcgctaccatcctcgtcaaccacagggaagtgaccgtggcagttaccttgagactgaaggaattgagaatgatgctactacaaggcatttggttgagatgctgtgggctatggatgaaagtcgtgcggagactgtgttagcagctcaagatcgtgaagatcggaatcgtggtaagatttgcaagctagaagacaaggtggatcgcttggagaaggaattagccgcattgaagggagaagcaccgccgcagaaggccaggattcgtctcaccgcaaggaagagagctttgtttgtccctcgttatcaattggcgccaaagatccgcgtggtggagaaagaagttgccccagcaaatcctcccgtcatcatcataagtagtgatgaagaagaagaacccaagcgcaacaattccaagtttgagtgggtagctatcaaagatgaggaagatgagccgaacgagccttcaatcgacctcctatgctcggaagaactagagtga

SEQ ID NO: 81683 - DNA, 306 bp, Oryza sativa
  Clone ID: PAT_MRT4530_81185C.1
gtgatctaacatgataaatgaatctatgaagaaggagaccatgttcaatgggcttctggcttagagtgcgcgcgcgtgagcagaaacaaaccatttggttggaggcttaatgcttacaactatgacctcataacccttaaaatgatagagagcactgaacgactagtgtagaaggacctgatacactgttgggagcaggatgtgaggtacctttgcaaactaagactggaggggtggcgactaggtaaaaaggcttaggactttaggaagggaaagtgtgagaaagtgctccaaaaatgtagaatt

SEQ ID NO: 81684 - DNA, 4575 bp, Oryza sativa
  Clone ID: PAT_MRT4530_81186C.1
ttatgatgcggtgcggtagtccgtatctgcaaaatatccccttgatgaatttgatggcgttgtcagccttgatttcccccgtgggtagccaccctgtcctcgtgggaatggtccgagtatatctagcccccagcacgagaacggccacgtaagagggatagtctggagcgcttgcacgggtagctttgtgtgtttactgtggaattgacaggcttcacatcgctggaccatgtcgcatgcatctttaaggacggttggccagaaaaacccttgtcgaaaagctttcccgaccaatgtccgaccggcggcgtgtgacccacaaatgccttcatgtatatcaaggaggaggtgtctgccgtcgtcggacgagacgcatttgagaagtaccccgtttggcgctttcttgtatagatcgtcgccgaccatacagtagatctttgctttacgggttattttctcggcctctgtatcgtccttgggcagctcctcgctgttgatgaatttgattagtgggatgcgccagtcgtctgtggtctcgatatcggcaacggcgcgttctgcctttgtggcctccgagctaatgtcgggggtgtccgggctaacttcgccgctaacctctttcactgatggcttcgtcaggatgtccagaaaagtgccgggctcgagcggttctcgtctggacgcacgtcgtgctaggtcatctggctcgatgttgtctttgcggtagacgtgtcggacttcgatcccatcgaaccttttccctagcttcctgacttctgtgatatacttagataactcggggttagagcatttataatctttgtgcacctggttcgtgactagctcggagtcccctttcacgattagtcgcttgaccccaagtgcggctgcagctcttatcccggcgagtagtccctcgtattcggctgtgttattggtcgccctgctcaatgctgccatgcatccggttagcttctgtacttccttgagtcttgtgggtgacttcatgttctcgattgccttgatcttctcaggatttgcttctattcctctgccagagatgaggaaaccgagcagctttcccgacggtgctccgaacgtgcacttctctggattgagcatgaggcgatatcgtcggaggttgtcgaacgtttcccacagatcgtcaatcaatgagtcaaatgttttggtcttgacgacgatgtcgtcgacatatgcctcgacattgctgccgagctggtcgctaagtgcgccctggaccgtgtgctggaaggtatttcctgcggttatcagtccgaacggcatcttaacatagcaaaataccctgaacggcgtgatgaatgatgtcttctcttcgtcctcttttgccatgctgatttggtggtagccagagtaagcgtcgataaagctcaacagctcacagccggctgttgagtccaccagttgatctattcgaggaagagggaagtgatccttggggcatgccttattgaggtcggtgaagtcgacgcacattctccattttccgttggccttccgcaccatgactggattggctagccactctggatgaagtacttctttgatgaagccagctttgagaagtttgtcgagctcttctcgtatggcttgttttcggtctggtgcaaatctccgcagtctttgctttactggcttggcatcaggtcgcaccatgagtttgtgctcaattatctccctggggacccccgacatgtcggacggtttcttgggtggctcagtcgtggcgggtgggctgggcgtttgctcaactatgtcgaggctccgtttgtcgcattgcaccgccagctttgtgttcccttgaatagtgattgttcccttcggtcccggcatcttgagcacttgatacgcgtagtgagatgcggccataaacttcgcaagtgcagttctcccgatgatggcgttgtaagctgtatcgaattcagcgacatcaaaggtgatctgctctgttcggaagttgttggattggccaaaagtcacaggcaacgtaatcttgcccaatggtctggacgaggattggggagtaattccatgaaagggttgatcggttggtgtcaactcgctttgtggaattcccatcgcgtccagagtgctggtgaaaagaaggttgattgagctgccaccgtcgatgaggactcgtgcgaccttgatgttccgaatagtgggttcgaccacgatcggatatattcctggaatgacggcggtcttggggtggtcttcttccgagaactctatcttctgttcagaccacttcatcttgggtgcagcccccaaccatgtcgaacagacttcgcgttccactttcttatactctcgcttcgaggagtatgttgtggaatctccgaagatgtgtgaaacgtggaggtcagggtctggatatgctgagtctgattcctggggagccgcctccacgtccttttcgaccacgcgtactcgtttgcctttttcagatgcaatgtgcttctcgagcgattttttgaaaacaaagcaatcttccaaaacatgtatgtccgtcttgtgtatggggcaccatgctttctttgtgtcgctactttgtgggtctgggcgcttgggagggttcgcgtattctgctgcgaggacttccgcttgagctttccttttcccatttttgcgattcttcttcttgcttgactcaggtgcgtcagtggctgatttcttctctcccccggtcttcggcttatcgttcttgcgtcttagcgcatcatctgcgtgggcgcatcgctcaacaatctcgaacaatctccgattggttgtgatgcgtcttgtcgccaactcctgggtagtatagcgatctctaacaccggatttgaaggcacgaattacagaagcgtcggtgattttggggattgtatttctgcactcgttgaagcgctgaacatattccctcaaggattcacccgggttctgtgtcaacgcgtgtaggtcgtcttcgatcgcgtggcgcttgtaggttccttggaagttggcgacgaactgctgccacaggtctgcccacgaagagattgagtagggcggaagatgcatcagccatgaacgtgcggagccttttaacgcagttggcaaataattcgccaatgcgttgtcgtctgctccggcagcgtagagtactgtggagtagacttgaaggaactcttctgggtcggtgctcccatcgtatttctcgttggcatcgccagttggtggctgctctgggtgtgctgcggcagcggcctcttcgaacgcgttactgaggttggtcactgattcccgtagtcgttctgtccaacgcgcgagattgtcgttcagaacgggatcgtagggggtttccctcagtatagcgttgacggctctgatgtgctgagctggagtggtcaattgattctccgcttctgcattggtgcacgctgatatgccgacatcatcgatagccaatacctcccgaggcgcgcttgtgaaggtgcaagacccaacaaatcgatctgaagttggcgtcgctcctcgttccttgtctttatcccagatggggatgtgtgactgttggaccttaggggatggcgcttccatggcgctggaaaagaccttgcagcttgaaaggtcgtgattctttgtcttgtgaataggacaatagacagcacgagttggagaaatacgctgaattccacgctctttgtaggcgcaaatttcagcgcggacgttgaggaaaacccagcaggcttgcaaagtgtgtttcctggttttgtggataggacaccaggaccttgtcgcttcggaagtcatcttcgtcggctcgcggttcatgtcggaacgacaaggtttggccacattagaatccttcttgagctcggatgtcgtcgatactccgttctccgcctcggcgggaggatttttcgacatggagtcgccttggtttgtagccactgcgttctcgtttccagtcattggcggaccggttgagatcggcgtcgtggtgtaaaccgggaagacgatttcgctaacttgggtccacaccagcatcgttgaagcagggaatacttggctgaggttggtgttgacgctgttgtcgacgaggctggatgacatagtagtagaaccttgagtaccaagggcccctacctggcgcgccactgtcgacgggtggtacccgtagaccggatatagagggtattggggtacgttggtacaagaatcggcgagatcgtggtcgagttggttcgactagatccccggcgacttggctccttgcgggctccgacttcgtaggctgtgagggtcgtgttggctctgagattcgatgccccaggtcctccctggggggtcccttttatatcgcaggtcaggcggtttccaagtagaactcggagataacagacccattcgcgacttgttgtgtcgagactgttgtcgttcccggtgtgaggaccatagagacaggacgtagtcgagaacaccgtgtgaagcccaacggtcacgagtgaatttaaactgaagtccaaaaaactgccgcgcgtaacggatccagaaatctccggcgggcat

SEQ ID NO: 81685 - DNA, 2358 bp, Oryza sativa
  Clone ID: PAT_MRT4530_81187C.1
atgtcatctagcttcgtcgacaacagcgtcaacaccaacctcaaccaaggagttctcacttcaacaatgctggtgtggactcaagtcggtgaaatcgtcttcccggtttacaccacggtgccgatctcggctggtccttcaatgaccagaagcgagaacgcagtggctacaaccctggatgactccatgtcgaaggatcctcccgccgaagcggagaacggaacgtcgacgacatccgagcccgagaaggatcctagtgcagccaaacattgtcttttcgacaagaatcacgagccgacgaggatgacttccgaggtgacaaggtcctggtgtcctatccacaaaactagaaaacacaccttgcaagcctgttgggtttttctcaacgtccacgctgaaattcgtgcctgcaaagagcatggacttcagcgtacttctccaactcatgatgtctattgtcctattcacaagacaaagaatcacgacctctcgagctgcaaggtctttctcagcgccatgaagacgtcacctcctaaggtccagcagtcacgtatccccctcagggatgaggacaaggaacaaggagcgacgatgatttcagatcgatttgttggggtaatcgacatcgatccccacgaaccatcagtcttgcacctgctcgaagactatggctcatcgtcaacaaacctatggcagcagtttgtcgccaacttccaaggaacttacaagcgccacgcgatcgaagacgacctacatgcgttgacacacaacccgggaatacgcggaccctccgaagcgcccagacccacaaggcagcgacacgaagaaaacatggtgcccgatacacaagtcggacagacactctccagaagattgcttgttttcaaaaagtcacacgcaaaacacatggcattggaaaaaggcaaacgagtacgcatggtcgagaaggacgctgaggcggctactcaagaatcggactcagcatacccagactccgatctccatgtctcgcacatcttcggaggttccacggcatactcctcaaagcgagaatacaagaaagtggaacatgaagtctgttcgacgtggcagggagctgtgcccaagatgaagtggtctgaacagaagatagaattctctgaagaggaccaccccaagaccgctgtcatcccagggcaatatccgatcgtggttgaacccactattcggaatatcaaggtcacgcgagttctgatcgacggcggcagctcaatcaaacttctcttcgccagcacattggacgcgatggggattccacgaagcgagttgactcccaccgatcaacccttccatggaatcactcctcagtcatcgtctaaaccattgggcaaaattacgttgcctgtgactttcggccaagcaaataacttccgaactgagcaaatcacctttgatgtcgctgaattagatacagcatacaatgccatcattgggagaactgcactcgcgaagttcatggccgcatctcactacgcgtatcaagtgctcaagatgtcgggaccgaagggaacaatcactattcaagggaatgctaagctggaagtgcaatgcgataagcggagcctcgacatggtcgagcacacgcccagccctcctgccacagctgagccacccaagaaaccgtccgacatgacgggagtacccagggaggtgattgagcagaaactcatggtgcgacccgatgccaagccagtaaagcaaaagctgcggagatttgcaccaaaccgaaaacaagctatacgagaagagcttgacaagcttctcaaagctggtttcatcatagaggtactccatccagagtggctagccaacccagtcatggtgcagaaggccaacgggaaatggagaatgtgtgtcaatttcaccgacctcaacaaggcgtgtcccaaggatcacttccctctccctcgaatagaccaactggtggactcaatagccggttgtgagttgttgagctttctcgacgcttactccggctaccaccaaatcagcatggcgaaagaggacgaggagaagacagcattcatcacgccgttcgggggcgcacttagcaaccaactcggaaacaatgtcgaggcctacgtcgatgacattgttgtcaagaccaagacaagcgactcattgattgatgatctgcgggaaacgtacgacaacctcagacgatatcgcctcatgctcaatctagagaagtgcatgttcggagtaccatcgggcaagctgctcggtttcctcgtctctggcagaggaatagaagcaaatcccgagaagatcaaggcaatcgagaacatgaagtcgcttacaagactcaaggaagtatag

SEQ ID NO: 81686 - DNA, 795 bp, Oryza sativa
  Clone ID: PAT_MRT4530_81188C.1
atgaacgtgcagaacctttcaacgcagttggtcggaatctctcaggccatcggacatcacgtagggaacgaccgaaagccctacacccagcgttgggggcggtgggttgtcggcggttgtgtgtccttcgtggatgtctgtctgacgatgaggaggacgaggatgatgacgatgacgacaggtcgcttgcttccagcgtacgattacgaggatgtcggcctggatctcgggaatcctgtcgtcgtctcccactattgtctcggcgccgatctccgtcatcatcgtcgttatggcgacggcctcgacctgtattgtctcgcacccgtcgttcgcgatcgttgtgatcgtggtggttgtcctggtctcggtcctcgtttgagcggtctctttgatttccgttatcatggcgccgtgaagagacatgacgccgagaacgattcacattgtctcgtcttcaccattgacatcgtcagttggtggctgctccgggtgtgctgcgatagcggcttcttcgaacgtgttgctgaggaccttgtggcttcggaagtcatctttgtcggctcgcggttcatgtcggaagaacaaggtttggccgcatcagaatccttctcgagctcggatgtcgtcgatgctctgttctccgtctcagcgggaggatttttcgacatgaagtcgtcttggtttgtagccactacgttctcgtttccgaaccttgagtaccaagtccccctacctggcgcgccactgtcgacgggtggtacccatagaccggatatagagggtattgggccctaa

SEQ ID NO: 81687 - DNA, 117 bp, Oryza sativa
  Clone ID: PAT_MRT4530_81189C.1
atggccggtctgtccggccaccctatggcgaggttgccatctcctagatggcttgtggaggtgtttccctgtgacctctccaaggagattatgaagaaggcccgacgccagttgtga

SEQ ID NO: 81688 - DNA, 1498 bp, Oryza sativa
  Clone ID: PAT_MRT4530_8118C.1
ccgggctgcaggaatcggcacgaggcccaccacttcgcgagacctccaaaaccctagtttcgtcggcgatggcggcggcggcggcggcgggggcggcggcgggtggggggttcgttggggagaggaggaagctgttcgtgggagggatcccgacgtcggcgcaggaggcggagctgcggggccacttcgggcagtacggggcggtgaggtcggtgatcgtgatgcgggacaaggagaccgggcatggccgggggttcgggttcgtggagttcgaggaggaggaggacgccgccagggcgctcggcgacggggagcaccccaggcacctcatctgcggccgcgtcgttgatgtcaagagggctagggcaaggcctcaacgaaaccatgatgatcaatcttcacagcatcagcacttcggacagggtcaggatcagggtcaccagccagcacctgtgagtggtacagaggatggcggcgacggcatgaactatgcttcgaagaaggtctttattggtggtctgcgggacaacatcactgaggaggagttcaagacatatttcgagagttttggcaccgtaacagatgtggtagtcatatatgacagtatgacaaacaggtctagggggtttggtttcgtcacctttgactcagaggaagcggtgaggaaggtgatagaacacagttttcatgacttgaaaggaacaagggtagaagccaagattgccatccccaaggatgcttcgtattaccgtaatggcagaggtcgtggctcaagaaactttggtggaaggggtcatgctggttttgatggtccctcgtaccaaccatacaatgacagatatggtttctacaacagctataatatgcctcaacctgttccaccacatccctactatcctggtgtatattatggtatgggaggaggttatccctatgcgaatgcatattcaaacatgggagcccctgctaatattcctccaggcatgatgacaaggcgtccagtttatggtgcatatcctccaatgtttccagggtacggcgttatatatagaggttatgtgggtgctgcaccctctattcagcatgatagtaatggtgggagcgatagcaaaaaggatcaaacttcagtagatgtacaagaagttgacagtgctgcttccgttgcaacaaaacttgagtttatgaagctagggtcacaatgactttctggacaaattacttctaaattgatgacaccagagttcgacattttgggaaccctcaattgtgaagacttgagctgagattctttggttgacaagtacatcattggaattcaacttacccaccctcattccttgcttcatctgcctgtacactgaaaacgtgcaagttgacctcactgcttcttgtaccgatgtttaaattctttgttgatttaatgtaccaggatcagaacatccaatcctaattgcttgtgctatctcgtttttgtgtcactaaaaaaaaaaaaaaaaaa

SEQ ID NO: 81689 - DNA, 513 bp, Oryza sativa
  Clone ID: PAT_MRT4530_81190C.1
ggaagaaccaatccatctgagcacaaacagttaaagcttgcaaggagcttaactcgtggaataattgataaagatctgaaaccaagctcaaatgagcgaaagtgtctgcaaagaattatcaagtttcctcctacacgctctttacaagtggatgagaagcagctggtctggaaatttcggttctctttgatgtctgagaagaaagctcttacaaagtttgttcgtgcagtggactggagcgatatccaagaagctaaacaagctgtagaattgattagaaagtgggaaacaattgatgtggctgatgccttagagcttctctcaccagactttgaaagtgaggaggtacgagcttatgccgtcgacatacttgaaagggcagatgatgaagaattacaatgctatttactccagctagtgcaagctcttcggtttgaaagatcggatgaatcttgtctggcacactttcttgtaaaacgtgctgtatcaaacattgaaattgctagcttccct

SEQ ID NO: 81690 - DNA, 177 bp, Oryza sativa
  Clone ID: PAT_MRT4530_81191C.1
atggaggtggatgcggagcgagctcgacaagctgacagcggagatgaggcggagcgcgtcgtccgcgcggcgttcgcccccgcccaccgccgtccttggctcccctccgctgcacccagccggctctgtcctcggctgttgccgtcctcggcccctcttcgtcgccgccaccagtga

SEQ ID NO: 81691 - DNA, 504 bp, Oryza sativa
  Clone ID: PAT_MRT4530_81192C.1
atgcacccaaaccccaccgaaaacagccgcgagggcgcgcccgaaggcggcctcgccggcacggccgacgggagggggacgcgcccgcgccccgatggtcaccgccggcgaccaccggcgcggcggagcggcgcccgagagagcggagaggagagggaagcgaaagggacggtccacggctcaccccgagacacgaggacggcggagacgacgaacggagcggaggaacgcggcggcgcggttcgggacggcgagggcgacggtgctccggcggtcggcgggcgaaacgaaggagcggacgaggtcgacgacgacgcggcgaagccgatggaggtgacgccgactggaatcttctcttcacctgacttatctccggttgaacctttagccgacttcgactgggttgtggcacttgatgatggggcttcagatccagaacttctcacgattcatatcttcggcgtcaacctcacacaagttaccacttcatgtcatgcgtcgtaa

SEQ ID NO: 81692 - DNA, 423 bp, Oryza sativa
  Clone ID: PAT_MRT4530_81193C.1
agatgtaaagaacccatttttgtgctttgtttctgctgttatgtggagttatttagtgttaaagcctttttcttttccgttggtcgtgtagacgctgcagcttcggaagatccgctcttcgtggaagtcgaagccgtcgattgggaaaacgagcaaggcaagacacatcatcgccccctctattcaaaatccccctaaaatggttttaggctgggctcggggtgcatggttttgatggtagcacctcggccgtttaaggaccggtcttcgggcctctgttgcaaagcactaccgtacttccacatgtctaatgggtaaggcttagtttgtggctcagtcttccaggccgagcaaagggcaatcaacctcaggagggcgataccaagcagaagaccgtattcgcttcaaacagcatcagaagga

SEQ ID NO: 81693 - DNA, 1860 bp, Oryza sativa
  Clone ID: PAT_MRT4530_81194C.1
atggtcaccgccggcgaccaccggcgcggcggagtggcacccgagagagaggagggaagggggaagcgagagggacggtccacggctcaccccgggacaacgaggacggcggaaacgacgaccgaagcggaggaaagcggcggcgcggttcgggacggcgagggcgacggagctccggcggtcggcgagcgaagcggaggggcggacgaggtcgacgacgacgcggcgaagccgatggacgtgacgccgagacgggaggaagtccggagcgacgacggcggtgaaccggagctcggcggcgacggcggagagaagatgcgacggcgcgagcacgattccgacggggagagcgagcggcggacggtggaaaccaagtgtgagttctggttgtccgaagtcaagttcttagggcacgtgatatctgctaaaggagttgctgtggatcctgaaacggtgaccaccgttactgattggaagcaacccaagacagtcactcaggaaggccacgtggtagcctatgcctcccggcagcttcggccccatgaaggcaactaccctacccatgatttggagttggccgctgtgagaagatggttagagctcatcaaggattatgatgtgggaatccactatcaccctggtaaggccaatgtggtcgcagacgcgctgagtcgaaaaagccgttgcaacactcttggcgtccgtggcattccaccggaacttcatcaacagatggaagccctgaacctaagcatagttggtcgtggattcttggctacgctggaagccaagcctaccttgctcgatcaaatccgcgaggctcagaagaatgatccagatatgcatgggatcctcaagaatatgaaaaaagagttcgtggccctttgtgatgtgtgccagcgtgtcaaggcagagcatcaacggccggtcggatttctccaacctctacaagtaacagaatggaaatgggatgaaattgggatggatttcatcaccggacttccaaaaacccaaggcgggtatgactctatatgggtagtcgtggaccgactaaccaaggtagctcggttcattccggtgaagaccacctatggagggaacaaactagctgaactctacttcgctaggatcgtgagtctccatggcgttcctaagaaaattgtatctgatcggggaagccagttcacctctcatttctggaagaagctccaagaagagttgggtacctgcttaaatttcagcaccgcgtatcacccacagacagatggacagaccgagcgtctaaatcagatcctagaagatatgcttcgcgcatgtgtcctagattttgggaagacatgggataagagtctcccctacgccgagttctcctacaataacagctaccaacccagcatacagatggcaccgtacgaagcgttgtatggccgcaaatgccggacaccgctattgtgggaccaagttggggaaagcgaagtgttcgggactgatatcctgagagaagctgaagcgaaggtcaaaaccattcgggataatctaaaggtggcacagtcccagcagaagagctatgcagataaccgacgccgtaacctggaatttgcagtggatgactttgtgtatctccgggccgactcagagcagattgaagttcgcgaagacttcacctacgtggagaggccagtgaaaatcctggacaccatggagcgcaggaccaggaaccgggtaatccgtttttgcaaggtccaatggagcaaccacgccgaggaagaagctacatgggagcgtgaagacgagctgaaggcagcccatcccgatctcttcgccagttcttccgaatctcggggtcgagattccgtttaa

SEQ ID NO: 81694 - DNA, 316 bp, Oryza sativa
  Clone ID: PAT_MRT4530_81195C.1
ttcgtcttgcgagtgcaatggccttttcctggcggccattttattgtaagctggctcgttaagatcaacaacatgccagaagagacggagaggcagaagacatgggacctccatgggcaacacactcacacgcaagaagagcggcgcactaggaggagcggacaaaaaggacagtggcgacagcagggacacaccagccattgatgtacgccacggatggatcgccgacacggcaaaaatcagctatctacgacccacagaacaccgaggaccagatgcaacgaaaccaaacgatgagcatgtaacactgggacca

SEQ ID NO: 81695 - DNA, 1053 bp, Oryza sativa
  Clone ID: PAT_MRT4530_81196C.1
atgccgcttagttcacagctaccattggttggaagtcaagaccaaaatcagtatgtgtttgatcgagcatttgccacccaggtcaatgagcttccaatgccagaagaggatgtccccttttgtcacgattgtagggaaccaggacactatgccctgaattgtccatgggtatatgccaaagaaaccccttcctttggtttagcagggcagacatcgctaaaccagcctcctcacaccaagacaagcttgcagcctagtgtgcaaagtagagagcccaatggagagaatccatggaatcccgggaattgctttcctcctagcctttcgtaccacgtggggtcacgtactaagcaagccaaaggcaagaagagtaagaatcagaagagaaaagcgccgatgcgaactgaagaagaagtacgtaagatggctattagcagcaccgaatggcctcccgcagggataactattcccagacgtcaaagaggaaataccttccgaggtgcccgacagttgacccagcaccttctaagccatggtggcagagtatctgatagtgaagggtcagatcaagtctcctcgaatgatgaagatgagtctccccgacatctcggtgaggaagagatggaatcaaaagcatgcacccgttgtggagaaattggacacgttgctagcatgtgtctcacactctgcactcattgtgaagaagaccatccaccaggggagtgtcccacccgcaaggtcacatgttttctgtgcgaaggaatgggtcatttcgccgacaagtgccccagaccgagaaacatagctgccagcacgtcagtccacgcaactccttgcaatcagaagcttgctcctcagcgaattgtcatccatgcatcccgaagcagtcctatagaccgcgttgcaacagctccaactctagcgagtgcattaccacaaggtgtcaatgctcaatttcagccccagccatcagttgacaagacagaggccagtatcggcattgtacctttggatgttccagcacagcagccaaagaaatcaagtacaagatga

SEQ ID NO: 81696 - DNA, 1450 bp, Oryza sativa
  Clone ID: PAT_MRT4530_81197C.1
atggaggacccgccgccgccgccgccgccgccgcagaggctgcggtgcgcggtgcagcactacgagtggggccgacgcggggctgcctccatcgtcgcgcgcctcgcggaccagcaggatcccgacttggcccgcgcggacacccgacgcgctcggccccgccgtcgccgcgcggtggggaggcgacctcccattcctcttcaagccggcgccggcaacgctggttacgtgcaggtgctttcggtggccaaggcgctctcgatccaggcgcacccggacaagaaacgcgccgaggcgctgcacgcgctgcgcccttccgtctacaaggatgacaaccacaagcccgagatggccatcgccatcaccgagttccgggcgctctatggttttgcggccatccaggagctcaaggatgtcctgaggactgtacctgaagttgaagggctaattgggcatgagcatgctgccaagctcatgagcttcaaggagtatgatgcgggtaatcaagtaaaatccactttgcaatcagcttttgctaacctaatgttagcaagtaaagacatggtttctgaagcactttccaaactgatcagtcgcctgaatattgagagcaagattaggaccttaacagataaagaagagctggttttgtcactggagagacaatatcaagaggatgttggtgttctagcagcactcttctttaactacgtcaaacttagtcctggtgaagcacttcacattggtgcaaatgagcctcacgcatatctctctggggaatgcatcgaatgtatggccacttcagacaatgtggtccgtgctggtttgactcctaaatacaaagacatacaaactctttgctcaatgctaacatataaacaggcattccctgaaatcttgcaaggcgttcctgtgcagccacacgtaaggcggtacagccctccatttgatgaattcgaggtggattggtgcttggtacctgcagatgaagttgttaccatatcctcggtgccaggcccatctgtctttctcgttataaccggggaaggagagctccacgcagagtctctgtctggtgggaaaaaggaggcaaaggaaggcgatgttttctttgtccctgcatacactgagattaacctctctacccataagtccatgcagctgtacagggctggggtaaacagcagattcttcagttaactgtctttcgatcgcaagtggactgcactgtgattgtagggcctgttactgttaggcagacagattagaattgggccttgggcccttgggctttgaccgcatgaatgaatgtggttggtagattcatgggcatgtcatcctatggctgtgacagtcgtataataatgaataaaacaatgctccattatatatactagccgtcaacgcacggggcactattacaaatattataaatgttataattttggtc

SEQ ID NO: 81697 - DNA, 240 bp, Oryza sativa
  unsure (1)..(240): unsure at all n locations
  Clone ID: PAT_MRT4530_81198C.1
cagcctcctcaactcaactctcttcggcagcgagcagcagcgtctgccaccatgccgaagcatgatccacgagatcaaggacttcctcctnacggcgaggaggaaggacgcgaggacggngcggaacaagatggaccaaggacgtcgncaagttcaaggtgcgctggtccaaggacctntacaccctctgcgtcttcgacgctgacaaggcaacaagctcaagcaggtcggttcccccgg

SEQ ID NO: 81698 - DNA, 285 bp, Oryza sativa
  Clone ID: PAT_MRT4530_81199C.1
cccacgcatccgatcattagtcacagcatccatccaaccagtttccttcctctacttcagtctattgctcactggcatgagctgtaccacttctttcagatcaacttcaacctcatctactatgactactgacatgaactaacgatagcttcattataatgagcacaactatgatcatagcatgccgataaagaataactaaataaataaattgcaagcaattgttttgctgctatgtactgaccagtctttcgactaatgatgataaagcctctctttatcctt

SEQ ID NO: 81699 - DNA, 2055 bp, Oryza sativa
  Clone ID: PAT_MRT4530_8119C.1
tcatctcccaattgaaagattactaatcgtgcctaaactcttcaacgacgagtcaaacccttggttctgcatgagtgctgacaggctgaaagtaaagcgcattggtgacatctctgggaggggcatatctccgttgaggtactgcacaacttgtcgcatggttggccttacattagacattgggtgcgagcacaagagccctaacttcaatactaaacttgcttcactaatgttaatgttgccgttaagtcttgggtcaataacagcaaggatctgttccttgctgcaattctcaaacacccagtccgtcagcaggagtcgatgcccttcgatgtcttgctcgacaggccttcgcccactggtgacctcaaggagaaatgcgccaaaggcgaacacgtcggtaagaggggatgccttcccggttagtgctaattcgggggccatataaccaaaggtacctgcaacaactgttgtttgtagctcggtgtcacggttgtagagccttgcgagcccgaaatcacctagccgtccattcatgtcgttgtcaaggagcacattgcttggtttgatgtcccgatggataacaatttgctcccactcctcgtgaagataaagcaagccagatgcaataccttttataatctggaacctttgagcccaattcagagtaggcttgtcatcatggctgtacaaatatttgtcgagactaccatttggcatatagtcgtagaccaaaagaagttcttctttgagccgacagtaaccaagcagttgtacgaggttgcggtgccggaggcgaccaatgcttgctacctcagcaacaaactcctttattccttgccttgagtcgtgtgataccctcttcacagcaacctccgaactagaagtaggaagcactcctttgtacaccctcccgaaccctccaattccaagcaagttcttgttcttgaaccgttctgttgcctgaagcaaatccttgtatgacagtctatgtgctccaaactcaagctcccaatcttcacgcagttcgacatatctctgaaacttcctcttaatcagtagaaaaacaccagcagcaacgacaatcacaagcaccaccgagactattggtagagctatcaccatggtcttgggcggataagacttcttgcttcttctgccaggtaacttgggaagcttgtccatgtcaatggccggagcttgcgtgcccacaccgaagctccagccgagcacgtagtgttgcgaggtcattgtgcctatcgacgctgagaagcccacatatgcttcatcggtgatcactgttgagaggttggatctcgtagagaccaatggcttcatgggcttcttgattcctaccggagcaagcctcacgtcaatctgtgtagcatcgtcgtcatagtccacccatacttgcatggctttcccactaaccagtgttagactcttgaactcaccggtgttgtcatcatagtagccggcatcagaggcatttgaagacacaaggctattgatgtcgatgccgacgtggttgtcgtcgatgtcggagaattcggggctctggatggtatcaagctcaaccgcgaagatgtgatttctgttgtcgccgttgcttgatctgttgaggaatcccaggtatgtgctggcgagcccggaggagaggtccttggttggggtgatgacgagggcgatgccatggccgccgacaccaggggaggcagtgacgatgccgaacacaaaggacgccgagaaagaccgcactgctgccttcttctccccgccttctggtgacgacaactcctcgaagcgcagcggcgtcggatggaatgcgtggcctttaacctgcggcttgccattggtcagctcgagtaggccatctggtgtgaccatggccgtgccgtcgagggttaggtccttcactccggcaaagccggagtaggcaaactggtccccgccgttgccgtcaccggcagcagcaacggctgctgcaagatgaacgccatagaggaggctacactgtagacacaatatgcaaactggcttaaccatatgctgcat

SEQ ID NO: 81700 - DNA, 550 bp, Oryza sativa
  unsure (1)..(550): unsure at all n locations
  Clone ID: PAT_MRT4530_811C.1
tttttttttttttttttttttnttttttttttttttttttttacnccattttccgccaaacgcaaattgtatattaaaatcatgggatatatcacaagatgattgctaaagaaaggggagacgaggaaaaatgaagttccattggcaccaaagccagtcaccacagcgacgacgaaccccggattatgtacattgtcaaagttgcaaaaccatgagctcctccgccggtcgccggagcagcagcaccgccggtgaccggcgaccatcctgagtcgtcatcactcgtcgctgtgctgctgcgcgtgcgagctgctgccggaagtcgaacgccggcgacggctgggagaggatgctcctgagctcctgcatcacggccggcaacctgcccaggccttcccccgtcgacccgcggcgccggctgggacaaccgccggccgccnccggagtgngcggcgccgccgcgtgcggacttggaggagtcgtcgtcgtcgtcggtggggagctggaagcggcagacggggcaggagctgtgcatcttgagccacggcac

SEQ ID NO: 81701 - DNA, 159 bp, Oryza sativa
  Clone ID: PAT_MRT4530_81200C.1
gatttcgctagcgacgggggacgccctccaggagtccaggttgcccttcgttctgatcatcggcaactatttcgactttgttggcgttgacgatcgagagacatgcatgcacgtcagagaagatttatacaccgtcatcgcttcaaggaatccaagtag

SEQ ID NO: 81702 - DNA, 3097 bp, Oryza sativa
  Clone ID: PAT_MRT4530_81201C.1
cgaattctttagaaacaaagggagttttgaatatggagttgaccatcggcagcaagacaatttcaaccacatttttttgtcattgataggaagggttcatatagcgtgttgctggggagagattggatccatgctaattgttgcattccttatactatgcaccagagtttgatttaatggcaggcagaccaaatagagattgtgccagccaacagccagttggagatggagagccccagcttttactttgaaggcatcgtggagggatcaaatttctacaccaaggacagaggagatgatttagatggcaagctaggttaagggtttatgttggccaatgagttagaggaagttcatattagaccaggtgataggcctaggccgacatatattagtgcaaaattattagatgtatttaaaaagaaatagtggaattattgaaagaatacagagattgttttgcttggtaataatatgagatgccaggacttagccgatctatagttgaacatcagttgtctattaaaccaggatatcgaccattcaaacaaccctagagacgatttgagtctgacatgtatgatcctattagggctgaaataacaagactttatgatgccaaattcattaggccatgctgatatgctgaatagatttccaatatagtgccaatgatcaagaaaaatgggaaacttagggtatgtgttgatttcagagatttgaacaaagctactcctaaggatgaataccccatgccgattgcaaatttactagttgatgcagcttcaggatataagattataagttttatggatggtaatgcaggatataatcaaaattttatggcagaagaagacattcacaagactgctttcaggtgtcctggtgcaatcggcttgtatgagtgggttgtgatgacttttcgtctaaagagtgcaactgctgcgtatcaacgtgcaatgaattatatatttcatgttctgatcgacttgctggttgaaatttatatcgatgatgtggttgtgaaatcaaagtagattgttgcacatctagcccatttgcgccaagtgttggagagaacaaggaaatatggtttgaagatgaatcgaaataaatgtgcatttggtgtatctattaaggaatatttgagttcttctctagtcttgattccaccatagaaaggagtaacctactagctgtatttatcagctgatgaaaaaacaatcggctcagtgttaatccaggagtttgaaggcaaggaaagagctatattttatcttagtagaaggattttggatgctgaaacaaggtataccccagtggaaaaattgtgcttaagtttgtatttttcatgtaaaaagtagaggcattatctacattcaaatgagtgcacggtgatttgcaaagccaatgttgtcatatatatgctatcggctcctgtgtggaagggaaggattggaaagtggattttagctttgacagaatttgatctaatatatgaatcggccaaagctgtaaaaggatgggcaatagccgatttcattgtggagcagtgaaatgattcaattggtacattaaattagtgccttcgactttatttcttgatagattagttcgcactcatggttgtgttatcggcttagtaattatactgcctcggggggggggggggggagggagggcaagttttgagtttgctttcacaattataccatattatactaacaatcaagcagaatatgaggcaattttgaagggattacagttgttgaaggaagttgaaggtgacgctattgaaattatgggtgattcattattggtgatcaatcaattatgagagtatgaatgcaagaatgatgtcttgagagtttataatgtgaaatatcacgagttgatgaaggagttcaagatggtttctatgaagcatattcccaaggaacataatgttgaagccaatgatctagctcaagtgcatctgcatacaagcgatgttaaaagatatagagattgaaattgctgctatacaagtcgatgattggaggtacggaatttttgagtatttaaaaaatccttctcaataagcttcaaggaaattgaaatacaaggctctcaaatatgtgatattggatgatgatttgttttatcagatgattgatggagttttgctcaagtgcttcaaattagaagccaaagttgttatgtgtgaggtacatgaaggaatttgtggaactcatcaatcggctcataagatgaagtggtcgattaggagagttgggtatttttgtccgacaatgctagaggattgtttcagatattacaaaggatgtcaagattatcaaaagtttgggtcaattcagaggacacctgcatcggctatgaactcaataatcaagccatggccgctcagaggatggggaattgatatgatcgtccagataaatccaccatcaagcaaaggacataaatttattttggtggctacagattacttaccaagtgggttgaagcaattccattaaagaaggttgattctagagatgttattgagtttgtcaaggaacatattatatatagatttgggataccacaaacaatcaccacatatcaaggatctatgtttgtgtcaatgaaattgttcaatttgctgagagcatgggcataaagttgttgaattcttctcctgattatacacaagctattggacagacagaggcatgtaacaagagtttgatcaagttggtgaaaaggaagattattgaacaacctaaaacgtggcatattgcattagctgagtctttgtggtcctattagatagcatgtcatgtatctatacaagtccctccctattagtactcaatagcatatacaccacgtctacactatttaatactactctaatgccgatcaaacattaaagtaaacactatttctagtgaacaatattccagtacgctaataggaactaagagataatcctcacaaagtgaatctcaattactcaataaagatattatcaattaaagcagagtaattgacaaggtacaaaagtaagaggaaattagtgacaactccgaaatttctccaactctttctcact

SEQ ID NO: 81703 - DNA, 3007 bp, Oryza sativa
  Clone ID: PAT_MRT4530_81202C.1
attgatattgtcaccacaacaagctgtttttgagaaacctgaaggcacagaggatcggcaccttaagccattatatgttaaggcttttgttaatgggaaacccatgtccaagatgctggttgatggaggagcagctgtaaacttggtgccatatacaactttcagaaaactgggtaaagctccagaggacttgatcaaaaaaatatggtgttgaaggactttgggggaattctttagaaacaaagggagttttgaatatggagttgaccatcggcagcaagacaatttcaaccacatttttttgtcattgataggaagggttcatatagcgtgttgctggggagagattggatccatgctaattgttgcattccttatactatgcaccagagtttgatttaatggcaggcagaccaaatagagattgtgccagccaacagccagttggagatggagagccccagcttttactttgaaggcatcgtggagggatcaaatttctacaccaaggacagaggagatgatttagatggcaagctaggttaagggtttatgttggccaatgagttagaggaagttcatattagaccaggtgataggcctaggccgacatatattagtggaattattgaaagaatacagagattgttttgcttggtaataatatgagatgccaggacttagccgatctatagttgaacatcagttgtctattaaaccaggatatcgaccattcaaacaaccctagagacgatttgagtctgacatgtatgatcctattagggctgaaataacaagactttatgatgccaaattcattaggccatgctgatatgctgaatagatttccaatatagtgccaatgatcaagaaaaatgggaaacttagggtatgtgttgatttcagagatttgaacaaagctactcctaaggatgaataccccatgccgattgcaaatttactagttgatgcagcttcaggatataagattataagttttatggatggtaatgcaggatataatcaaaattttatggcagaagaagacattcacaagactgctttcaggtgtcctggtgcaatcggcttgtatgagtgggttgtgatgacttttcgtctaaagagtgcaactgctgcgtatcaacgtgcaatgaattatatatttcatgttctgatcgacttgctggttgaaatttatatcgatgatgtggttgtgaaatcaaagtagattgttgcacatctagcccatttgcgccaagtgttggagagaacaaggaaatatggtttgaagatgaatcgaaataaatgtgcatttggtgtatcgtatggacaatttcttggatttttggttcatgggaggggaatagagataactcaaagaagcttgaaagctatcaaaaatatcgaacctccagtgaataaaaagaaactacaatccttgatcggcaagatcaattttgtaagaagattcatctccaatttatcaaggaaattagaaccatttactacattgttgaggattaaagccgatcaagaatttgtttggggggagaagcgcgacagagagctttagatagtattaaggaatatttgagttcttctctagtcttgattccaccatagaaaggagtaacctactagctgtatttatcagctgatgaaaaaacaatcggctcagtgttaatccaggagtttgaaggcaaggaaagagctatattttatcttagtagaaggattttggatgctgaaacaaggtataccccagtggaaaaattgtgcttaagtttgtatttttcatgtaaaaagtagaggcattatctacattcaaatgagtgcacggtgatttgcaaagccaatgttgtcatatatatgctatcggctcctgtgtggaagggaaggattggaaagtggattttagctttgacagaatttgatctaatatatgaatcggccaaagctgtaaaaggatgggcaatagccgatttcattgtggagcagtgaaatgattcaattggtacattaaattagtgccttcgactttatttcttgatagattagttcgcactcatggttgtgttatcggcttagtaattatactgcctcggggggggggggggggagggagggcaagttttgagtttgctttcacaattataccatattatactaacaatcaagcagaatatgaggcaattttgaagggattacagttgttgaaggaagttgaaggtgacgctattgaaattatgggtgattcattattggtgatcaatcaattatgagagtatgaatgcaagaatgatgtcttgagagtttataatgtgaaatatcacgagttgatgaaggagttcaagatggtttctatgaagcatattcccaaggaacataatgttgaagccaatgatctagctcaagtgcatctgcatacaagcgatgttaaaagatatagagattgaaattgctgctatacaagtcgatgattggaggtacggaatttttgagtatttaaaaaatccttctcaataagcttcaaggaaattgaaatacaaggctctcaaatatgtgatattggatgatgatttgttttatcagatgattgatggagttttgctcaagtgcttcaaattagaagccaaagttgttatgtgtgaggtacatgaaggaatttgtggaactcatcaatcggctcataagatgaagtggtcgattaggagagttgggtatttttgtccgacaatgctagaggattgtttcagatattacaaaggatgtcaagattatcaaaagtttgggtcaattcagaggacacctgcatcggctatgaactcaataatcaagccatggccgctcagaggatggggaattgatatgatcgtccagataaatccaccatcaagcaaaggacataaatttattttggtggctacagattacttaccaagtgggttgaagcaattccattaaagaaggttgattctagagatgtctaccaattttaatctaatcc

SEQ ID NO: 81704 - DNA, 431 bp, Oryza sativa
  unsure (1)..(431): unsure at all n locations
  Clone ID: PAT_MRT4530_81203C.1
tttnntttgtttttctttttttttttttttttttttggggtttttttattttttttttgggggttttttttttttttttttggaaactggattaaacactttacttgaaccccctactttgcctggggaaccatttttatacagtttttttgggaaatcctaatccccttttaaattttttaaaaaggaaattttgcaaaaaaaaaatggtaattaagccatttccaaggtcttcctttggtctccaatggccccggggggggggctcctcgttggggggcgccccccttttccggcgccgggggcgggccccccgcacgggggggctggcccagccccatgagttgagcaccttgttggaggggatcccccccataaggccccaggcgaagggaatggggagccgcattagcccccggggggggaaaccc

SEQ ID NO: 81705 - DNA, 405 bp, Oryza sativa
  Clone ID: PAT_MRT4530_81204C.1
gggacaactttgtcccaaaaaatttttttattggttaaacccaaaaaaaaacaaaacccctctagggtccattaaaaccgggaaggaaccccaattttgacctatcttaacaaaaaatgggcaaaaaaaaaattatccccccacactaaaaagggggggggcactccggccacaccagcccctagccccccattattgccaggaagcctgttcctggccggtccaaaccccttggaatgggcccaccccctccggccaaaaaaacccccccaaggggagctttttattttttaaaaccgaaggaagaaagggggaaacgggggccgcccctggcccccaaggggggggccccctcaggcaaaacaaaaaaacccgggaagacttggggggggccttaaaacaaaa

SEQ ID NO: 81706 - DNA, 3758 bp, Oryza sativa
  Clone ID: PAT_MRT4530_81205C.1
ccggaccggaacggccgggccgagcccagagcgaccggtcgtgcgtatacgcgggcttgctgtatatgggagcgtggtgagcatatcatcgctgttgccatgaagcttccgcgggctagcccttctgttgatcttcttgctgattctatcgctacagattgcgaaaagagatggattgctgtagataggatacgcatactggggctcttgccccctagcttctttcatatgctcgagcgcgttcagattgcacccagaggtgactacgctaggggagaataatccatggcagggatgtctacaattatgatggtggatctgtgacagaaacctttctcggttggcaatatcttgcaacacagtattgcagacccgtccggccgggcaccatgtcccaggccttccttctcgtcatcgcgccactcgtctcctctgctcgccttggcccagccacaccccgcggcgccgccgccgcaacacactcccccacatctccccttcccttccactcctcctcctcctcggatcgggaggcggagcgagcaatcccccaaggaatttgtatttgtagcgtgatttgcaaagctagtcaagatggtgaagttcacagtagaagagctccgccggatcatggacaagaagaataacatccgtaatatgtccgtcattgctcatgtggaccacggaaagtctacacttacggattctcttgtggcggctgctggtattattgcccaggaagttgcgggtgatgttcgcatgactgatacccgtgcagatgaagctgagcgtggtattacaatcaaatccactggtatctctcttttctatgagatgagtgatgaatcactcaagttgtacaagggtgagagagatggaaatgagtacctgatcaaccttattgattcacctgggcacgttgatttttcttcggaggtcactgctgctcttcgtattactgatggtgctttggtggttgttgactgtattgagggtgtctgtgtgcaaactgaaactgtgcttcgccaagcccttggtgagaggattaggcctgtccttactgtgaacaagatggacaggtgcttccttgagcttcaagttgaaggtgaggaggcctatcagaccttttcccgtgtcattgagaatgccaatgtcattatggcaacatatgaagacacactccttggtgatgtccaagtctaccctgagaagggaactgttgctttctctgctggtctgcatggctgggctttcacactctcgagctttgctaagatgtatgcttccaagtttggagttgatgaatttaagatgatggagaggctttggggtgagaacttctttgacccagccacaaagaaatggaccaacaagaacactggctcagctacctgcaaaagaggtttcgttcagttctgttatgagccgatcaagcaaatcatcaacacttgcatgaatgatcagaaggataagttgtggcctatgttgcagaagcttggtgtggtcatgaaggctgatgagaaggagcttatgggcaaggctctcatgaagcgtgttatgcaaacatggctgccagccagtaatgctcttcttgagatgatgatataccaccttccatctccgtccaaggcccagaggtaccgtgtggagaatttgtatgagggtcctcttgatgatgtctacgcaactgctatcagaaactgtgatccagaaggtcctcttatgctgtatgtttccaagatgattcccgcatcagacaaaggtaggttctttgcctttggtcgtgtcttctctgggagggttgcaactggcatgaaggtgcgtatcatgggtcccaactatgtccctggccagaagaaggatctgtatgtgaagagtgtccagcgtactgtcatctggatgggaaagaaacaagagtctgttgaggatgttccctgtggtaacactgttgctatggttggtttggatcagttcatcaccaagaatgccaccctgactaatgagaaggagtcagatgcctgcccaatcagagcaatgaagttctcagtgtcccctgttgtgcgtgttgctgttcagtgcaaggttgcctctgatctgcccaagcttgttgagggtttgaagcgtctggcgaagtctgatcctatggtgctctgtactattgaggagtctggtgagcatatcattgctggtgctggagagcttcaccttgaaatttgcttgaaggatctgcaggaagatttcatgggtggtgctgaaatcattgtttccccacctgttgtttctttccgtgagactgtccttgagaagtcgtgccgtactgttatgagcaagtccccgaacaagcacaaccgtctctacatggaagctcgccccttggaggagggattggctgaggccattgatgacggtcgtattggcccacgtgatgatcccaaggtgcgctccaagatcctgtctgaggagttcggctgggacaaggatcttgcaaagaagatttggtgttttggacctgagacaactggccccaacatggtggttgatatgtgtaagggagttcagtatctgaatgaaatcaaggattccgttgtggctggtttccagtgggcatcaaaggagggtgctctggctgaggagaacatgcgtggtatctgctttgaggtgtgcgatgttgttctccatgctgatgctattcacagaggtggtggccaggtcattcccacggccaggagggtcatctatgcttctcagctcacagcaaagcccaggcttcttgagcccgtctacctggtggagatccaggcccctgagaatgcccttggtggtatctatggtgttctgaaccagaagagaggacatgtgttcgaggagatgcagaggcctggtacccctctgtacaacatcaaggcttacctccctgtcatcgagtcctttgggttctcaagccagcttagggctgcgacatctggccaggccttcccccagtgtgtgttcgaccattgggacatgatgacctctgatcctcttgaagctggctcgcaggcttcaaccctggtgcaggatatccgcaagaggaagggtctcaaggagcagatgactcccctctccgatttcgaggacaagctctaaatttttggccgccgcatgtgttgtgccgttacccttacatgttctagttggtctactgctaagagaactgctttcgttgtcgtatttcatttcccttttgtcgaatgcatgtgtttcacatcaacaatcctatgttcgcgtgctactgagaaactatttttactctgtcgtgatgtaacggatgtggaacctggatcaaaaaaaaaaaaaaaaaaaaaaaaaaaaaaaaaaaaaaaaaaaaaaaaaaaaaaaaaaaaaaaaaaaaaaaaaaaaaaaaaaaaaaaaaaaaaaaaaaaaaaaaaaaaaaaaaaaaaaaaaaaaaaaaaaaaaaaaaaaaaaaaaaaaaggggggggcctttttaggggacccatttttattcccgggggttgggaagttaaatttttttttttggggcccccaaatttaattcacggggccgggttttaaaaagggggggtggggaaaaccccgggggtccccaatttaatggccttggaaaaaattccctttttccccggggggggtaaaacaaaaaggccccccccggttccccttcccaaaagttggccccccctgatgggcaaagggacccccccttttgcgggcccttaacgcgggggggggggggggg

SEQ ID NO: 81707 - DNA, 518 bp, Oryza sativa
  Clone ID: PAT_MRT4530_81206C.1
ggcgggaacaactccgaaactgtccatgtttattcttcattgtttttaaaaaactctgactttcatcgactactaaagctagaatgtacatatcaaatgaaatttattgttacagtccatgcaagtcgcagttacttatacacaatatgaccatttattaaatatatataaacactgttgatagtatttttctcttcgtcgaatcttgaccaccaagttgcaggtgtcattgtaggacatgcttctggtatgaagagtgagtatatgggtatcaacacatcgtcattcgccttaaacattgtacgacatatgttttacagtaggaagtgatacattgcctccttgcaagccacctctgcctctagagtgtctacagagacatatcttaggaattttgttccgaatgtccgcctgaatgctcctcatcgatttatcgaaactgtagtatgtcctaattatcaaatttataatattatgaaataattttgtgttctacatacaaaatatgcacaacaata

SEQ ID NO: 81708 - DNA, 181 bp, Oryza sativa
  Clone ID: PAT_MRT4530_81207C.1
ggagtagtaaaaatgcaattcaccagatcgtccggtgaatggatcaaccggagcgacacggattgctggggaggacgatgactaggatgtcttggtcgcaataagcctgttctaggttttaagatgatggaggtcttggcgatcatggaggtgactatgtatgggtccatgttggactcct

SEQ ID NO: 81709 - DNA, 716 bp, Oryza sativa
  Clone ID: PAT_MRT4530_81208C.1
ggcaagcagttgttctaggctgtatactgcatataacgtgtagaatataccatatttatagaccttcagaagaacactcacttgattttatggtttactgtttaggtatccaggtgtttacactagctaaatcatgccttttttttttgaagtaaaaggtagagagtctctaccttatggcattagaggaacacatctatgtcattagaggaacacatctatgtcaaaagggattttttttaaagataatggatagaaaaactggtggatatagatggccaactgaaagcaacacatacagtatcagagacggggaaggcagagtctcttatcctgatatggcttcaagctcttcaattgtagtacactatcttccatcttcacgtcaaaagagcccttggaattttctccatcaagtgtgactcgcctgccatcagcgatgactaaccatggaaaaaagcagggtgatgttctcagattccaatcaccttgtctgtctgcttcaactgatgtgaacagctctaccattcctctctcaaagaagaaaagttaattcttctaggcatcaatgtttattttttggatgtttgcatcataacctgagtacgggcagttcctgatatatgggacaagactcaaaatatcaggcatcgtggtcatggctgctattccaacttcaacatctccagtctgttctttccatcaagctgttgtgt

SEQ ID NO: 81710 - DNA, 1122 bp, Oryza sativa
  Clone ID: PAT_MRT4530_81209C.1
atgcacaagatcttctcgaatgccatcgtggtcagctattcacacttaatgccagttgtgccatacaacgccttcaaccctcctccaccggaattcgctttgatgaaatctgatcctccgattattcaacgccgctcacctcgccggcacactagccaagctagtggagggcagaagatccagtcggatgtccaacccaacccctcgaggtcaactaatcagccagattctcatgagaggaagttggtttcaagtgacgatgaaggtgacgacgcaaaaaagacaggcaaaaaagaggggactgagaaacagccaaagcaagccaatccgaagaagaaaacatccagtcatcccatgccaaaaataaggaagtcatccaggaaaccatctgacatagatccctctggaaaagaccccacgccgattggcacggagactggtccttcagcagaaactgggccgactgccgtccgggagcccccgactggaaaccagtcgggtacaaaacaaaataaaaatatcccagaagtggaaactcaagccaacagccctcacaggacggacattggtgctgaccctggaactaactctcctgtcaggatgcaaggacctacttgtccccgaccggaaattataacagtagaaaacaacacagtgcaagctgccaagatatccgagctagaaaaacgaatcaaagctctggaaaaagacaagggcgaactagccaaacaaagagactcggctctgaaagatgtcgaagatcgcaaaatcaaatcccaggctcaattcaacgtcttggtcaacaaaatcaagaagcttgaaggggctagagatgaggtcgccaatgccgctacaccacttattcaagccatgtttttcaataacagtggtccgagttcgtttgatgctgttgaaatcttcgacaagctaagaaccggttcggatacatattttaagaacatcaaagaggccggaagtatgggggcgagtctggcattggcgatgaccaagtccttgtacccaaagattgacattgatgctgtcgatggctttgcagacgggacaagtgaagaagccgccctcgacctcattagtgatcacaaaaagctcctgacaagatag

SEQ ID NO: 81711 - DNA, 1578 bp, Oryza sativa
  Clone ID: PAT_MRT4530_8120C.1
atgacaatgtgcgccgcggtggcggtgctcctcgttctgacgtcgacaatggcggccgccgccggcgatggcgatggcgatggcggtggcttcgactacaagaaggcgctgcacagcgggctgctctacttcgaggcgcagcggtcggggcacctgccgtacaaccagcgggtgcggtggcgcggccactcggggctcgccgacgggctgcagcaaggggtggacctcgtcggcggctactacgacgccggcgacaacgtgaagttcggcctgcccatggcgttcacgatgacgatgctgtcgtgggccgcggcggagttctgggacgagatcgccgccgccggcgagcggcggcacgtgctggaggccatcaagtggggcaccgactacctcgtgaaggcgcacaccgccgccgacgagctgtgggccgaggtcggcgacggcgacaccgaccactactgctggcagcggccggaggacatgacgacgtcgaggcaagcctacaaggtggaccgcgacaaccccggctccgacgtcgccggcgagaccgccgccgcgctcgccgccgcgtccatcgtgttccgccgctccaagccccgctactcccgcctcctcctccgccacgccgagcagctgttcgacttcggcgacaggtacaggggcaagtacgacagcagcatcggcgaggtgagggcgtactacgcgtcggtgagcggctacggcgacgagctgctgtgggcggcgctgtggctgcaccgcgccaccggccgccgcggctacctcgactacgccgtcgccatggccgacgagctcggcggcgtcggctgggccgtcaccgagttcagctgggacgtcaagtacgccggcctccagatcctcgccgccaaggtgctcatggacggcggcgaccacccggcggcgcacgcggcaacgctggagcagtacaggtccaaggcggagcactacctctgcgcctgcctcggcaagaacgccgccgccggcgacaacgtcaaccgcaccgccggcggcatgctgttcgtccgccgctggaacaacatgcagtacgtcaccaacgccgccttcctcctcaccgtctactcccgctacctccgcgactccggcggcgacaccatccggtgctccggtggggctatggcaaccggcgacgagttggcggcgatggcgagggcgcaggcggactacgtgctgggcgacaacccggcgggggtgagctacatggtcgggtacgggcggcggttcccgcggcgggtgcaccaccgcggggcgtccatggtgtcgcaccgcgcggacgggcggttcgtggggtgcgtgcaggggtacgaccgctggttccggcgcggcggcgcgaacccgaacgtggtcgccggagccatcgtcggcgggccggacgaccgcgacaggttcagggacagccgcgacaactacatgcagacggaggcgtgcacgtacaacaccgcgcccatggtcggcgtcttcgcgcacctgcacgcccagaagatggcggcgaggactgctaataataatgccgatcgatcgatgattaaacgagtggattga

SEQ ID NO: 81712 - DNA, 207 bp, Oryza sativa
  Clone ID: PAT_MRT4530_81210C.1
atggaggaggcgacggcggcggcggcggggggttcgagctcagaagcctccaaggagcgggatgatcatgcgtccaagtctctgtttgacctccacattgggccctcagtcacaacaccatctgcaactttagctgacccgttctgtactaggagaagagtccctgcttcacctcctttcacctgccaggttgataagcaagggtga

SEQ ID NO: 81713 - DNA, 261 bp, Oryza sativa
  Clone ID: PAT_MRT4530_81211C.1
atgaggatcccgatggcatttgcggatgttccagaaatgcaagatacacctttggctaacaatgtcaggttagtcaattttcatgttactattgccctcctgcatccttatctttggagagttccttatcttctctatcgacaagacggggtaagggttgagggtcattgccaagcgctactggctctaggtttagagggggaggtcaaggtgatggaggaccagcaatatggaaggtgtaaacacaacgtgatgagatga

SEQ ID NO: 81714 - DNA, 392 bp, Oryza sativa
  Clone ID: PAT_MRT4530_81212C.1
aatttggcgtgtttcatatgacctaagtagcaaaaagataggcattagtacaattagacatggcttgtgggtaataaggcttagctatatggtcattaacttagctataaagttgttacttgaccagatcagctatctggcagaactaagacttacaactggcacatcacttcagagaacatacttgcttagacctgcaacttgcatgtaccatattcttcagatacgttggttgcccatataaaatggggtcttaattcctttacgtgcaataattcataaagtctgaattcatcttcaacagtgctttggtcacaaccaattgaaagctgtagatatttcttaccacacacattccttatggtagggttcaaataaaataaatttactct

SEQ ID NO: 81715 - DNA, 335 bp, Oryza sativa
  Clone ID: PAT_MRT4530_81213C.1
tggtaatcgtcataactaacccttctatgggatgttattttacccatctgtgaaatacacagaaccatacggaggaaagtaggacatacacgaggtagtcattcgacgtgacgggggacagaactcaggcatactagagcgggatggagcagcactcaaaggacgagctactataggaggagaactttagtgcactctgcaattgacaaaagggtgtgcgaacgagcgggaggccttggaacatcatggggagctcatgttaccgtaagagcccagagaacatgctcaagggcaaacactacacctggggtgaacgaaccggaggggaccatatc

SEQ ID NO: 81716 - DNA, 413 bp, Oryza sativa
  Clone ID: PAT_MRT4530_81214C.1
tcaaattattacattgtggcaaaaggagttgttatgaagcatcagagtttcaggaccatgaatcactgtatgccactggtggagtgataccagaaacagcaaccaaagcagatgattcaaccttaaaatctggttttgcttccttcaatggattgccagatacagcagcacaggcatcaaaaccaaagaaatcaagaaccacaagtaaaaagaacagtgagaattttgactgggataaattgcgaagacaggcttgtggtaattatcagatgaaagaaagaatttttgaccgaagagattctgttgattgggaagcagtaaggtgtgcagatgtacaaagaatttctcatgccattcgagaacgaggaatgaataatgtcttagcagagcgtatccaggtttgcactacttga

SEQ ID NO: 81717 - DNA, 407 bp, Oryza sativa
  Clone ID: PAT_MRT4530_81215C.1
agggagggggtcctggagggccggcgctggacctgtcgccacccagggcggtgaggcggccggggctagtgatgtcccactccgggaagcggctggaccagtcgccggcggcgtcgccgtcgccgtcgcggccggtgctggtgatgtcccactcgagcaaccggctggaccagtcgccggcgcggccggtgctggtgatgtcccgctccagcaaccggctggaccagtccccggcgtcgtcgccggcgtcctccaggggccccgtgctggtgatgtccggctccggtaaccgcctggacagctcgggcccgtccccgtcgccgtcgccgaccgccgcggcggctgctgcgccggtgctggtgctctcgaactccggcaagcggatggaccaggcggggcggaagaag

SEQ ID NO: 81718 - DNA, 261 bp, Oryza sativa
  Clone ID: PAT_MRT4530_81216C.1
ctagtggatcccccgggctgcaggttctcatgtggacaaatttaggacattgatttgcattcttctgcttattagctgctgttctgatgctttggtaggcattttcaataggctaatcttgcaatatcctaaatttgtccacattgagaaaacaaagagccgattgaaatctaaactctaaaacagttttcttctagaaaccataggattggtacagtgtcagattgcaacaggacagcattggtttctctagttgatatc

SEQ ID NO: 81719 - DNA, 2494 bp, Oryza sativa
  Clone ID: PAT_MRT4530_81217C.1
actcggcggtacccggctcgcgggtcttcggcttccctaccttcacttcttcttgggctgccaggcgccatcacgacagcccaagaaatatgagcaggagagaccaattgatcatatgcgggactgatggaagctacttttgctgctgctttgtgttagtgctataactgtttcgtctctttctgatgattacatcgcttagttcatcggtttcacccgctctaagatgcgttggtttcttgaagttatggctgacgggcacctcttgtaggtggccactatgtttgtgggctctggcatgtgccttggtgcttctttctttctgttagactatcttgagagtccactactatgagtggagtttggccagggtagcgctcactgccgctaagtttgtgcattagcacaaacgtcttcagacggccgggttttcagccaataatcctgtctctcacgtaatccacctagacacacagtgcaatggggtgataggcctccgcttaccgccccgggactttaacttgctatttaacactggatgctcgagcctgtccctaccttctgcaatacggtatatctggtttgtctgcatctttctttcttgctttcctctaccttgactttggcttccccactctctcttcttcttgggaggctgggagctaccagcacaacacaccaaggaagctgaggtgcgttgatttcttgatatcatggccaagaggcacctcttgttggtgacaacttgtttgtgggctctgtcatgtgccttgctgcttcatgcttcctctgatgggttcctgagagtcaacctcaacaagaagagattggacaaggaagatctcactgccgccaagttggcgcagcagggcaaccgtcttctgaagaccggcagttcagacagtgatcctgtccctctggtggactacctcaacacccagtactatggggtgattggcctcggctcaccgccgcagaacttcacggtgatatttgacactggaagctccaacctgtgggttccttcagcaaaatgctatttttcgatagcatgctacctccacagcagatacaactcgaaaaagtcgagctcttacaaagcagatggagaaacttgcaaaattacatacggttctggggcaatttctggattcttcagtaaggataatgtgttggttggagaccttgtagtgaaaaaccagaagttcattgaggcaacacgcgaaacaagcgttacctttatcatcggaaagtttgatggaattcttggtcttggctaccctgaaatctctgttgggaaagctcctccgatttggcagagcatgcaggagcaggaactgcttgcagatgatgtcttctcgttttggctgaaccgagacccggatgcatcctctggtggtgagctcgtctttggtggcatggatccgaagcattataagggggatcacacctacgtccctgtttcccgcaaaggctactggcagtttaacatgggggatctccttattgatggccactcaactggcttctgtgcaaaaggctgtgctgctattgtcgactccggaacttccttgcttgctggtccaacagctatagttgctcaggtgaaccatgctattggggctgaaggaatcatcagcacggaatgcaaagaagtggttagcgagtatggagagatgatcctcaacttgctcatagcacagacagatccgcagaaagtatgcagccaggttggtctgtgtatgtttgacggtaaacgctcagtaagcaatgggattgaatctgttgtcgacaaagaaaacttgggttctgatgctatgtgttcagtttgtgagatggctgttgtgtggatagagaaccagctacgcgaaaataaaacgaaggagctgatattgaattatgctaatcagttatgtgagcgtctaccaagccccaatggagaatcaactgtcagctgccatcaaatctcgaagatgcctaatcttgcattcaccattgcaaacaagacatttattcttacaccagagcagtacatcgtgaaactggagcaaggagggcaaaccgtctgcatcagcgggttcatggcgttcgacatacctccaccacgcggtcctctttggattcttggagatgtcttcatgggtgcttatcatacggttttcgacttcggcaaagacaggatcgggttcgctaaatctgcatgaagagtgtatgtagatcactcttcagatcacggagattagcctgtatatttcataagctgaaaccaaacatgtatggttttatgatatatagtagctagtacacggacaaacctctttggttgcttctttctgaagaaaaaagaagaacagacatggatgtatgatctacctgatgtgtataaattgaatgatgcagtctgagaaataatcctctgatcatattgtggattctgaaataaaaccgagttacttttttcaacaaaaaaaaaaaaaaaaaaacctgcagcccg

SEQ ID NO: 81720 - DNA, 504 bp, Oryza sativa
  Clone ID: PAT_MRT4530_81218C.1
atgcagcgtgcatttacctccaggatcgtcacgttgacgaagccggccatctgccaactgcgatgtgccgctgcaggaatattttggtcagttaattataactggctgtgcctctgtacggagtggaagtgcaggccggaccgccggagaaggggcagtctgagccaaagcgatgatgtctttcaccccccctcggcttttccggtgagatcggcgggcaagaacgatggatgcagcgtgcggcgcagccgcgcaggcctacctacgccgcgcggcgccactgccgctgccgctgccggctacgggaggacgagggagggagggagggttggaggggcggcggcctcagaatctgcgacgcttgtcacaagtggcctggggaccctcctcctcaccctcgagatctgcaccagcaatgattcgccgcgtggtagggccaacgccgcactgcttgccattcgagcctggaattgctgtgcatacgtccatacgtccatacgttag

SEQ ID NO: 81721 - DNA, 334 bp, Oryza sativa
  Clone ID: PAT_MRT4530_81219C.1
gtgtcaaaccgacggacctacccagtagtcgcactaattcttgtaggttgtactaccccaattccttgtcgctccacccttgtggtacttcagtatccgtgctctctgagcgcgcataccaaatatcccacatacaccgttgatttgtcgaaaacttgggaaatgggtttgtgaagccttgaaaacccgacatgtggtgtctactaggctttccgagtgaaagcgaaatgttgtgctgctgggcagctagactctgggagtccgagaaaatgaataaggctctgggagccgcttaatcaagtgaaatggctctgggagccaagaagtaatgatc

SEQ ID NO: 81722 - DNA, 194 bp, Oryza sativa
  Clone ID: PAT_MRT4530_8121C.1
acgcgtgggtgaagtgcggatttgacgagaggtgcgcacgcggcgtgaggaggccagagccgcacatggtcaccgcgcgcggcggtggctgcttttggtggctggtggtggtggtggcagttgtctgcctgtcatgcgccgccgccgccgtgaggtcttcagcagggagggcgcaccggaacctgaaggggctt

SEQ ID NO: 81723 - DNA, 332 bp, Oryza sativa
  Clone ID: PAT_MRT4530_81220C.1
gatcattatctctcggctcccagagtcattccacttgattaatcggctcccagagccttttcattttctcggactcccagagtccagctgcccatcagcacaacaatccgcttccacttgggaagcctagtcgacaccacatgtcgggttttaaaggcttctcaaacccatttcccaagttttcgacaaacaatggtgtatgtgggatatttggtatacgcgctcagagagcacgaataccgaggtaccacaaaggtggagcgacaaggagtcagggtagtatagcctacaggaattagtgcgactactgggtaggtccatcggtttgacac

SEQ ID NO: 81724 - DNA, 453 bp, Oryza sativa
  Clone ID: PAT_MRT4530_81221C.1
agctagtaaccaataattgggcaagattgcttagtagttttgtttgcctaaggtaatgttctccggtgacactaaattatatgggttatgttgggctcacagctcctggccattgtgtccaaaaatcttgtttatgaattgccataagtacccatatagtccctagaccatacaattttcttcttgttgtgtgctatactatagagaatccagcaattatgccgcataggatgcaaccatattataaaggaccaatgcttctccaagtgacggcattttattatgtttccctttctttgaatgaagtagtggacataatctgattttggatctggagaagtaatgaagtattatgtcaatttgtattttgaagggtggtccaatacactaagtttgtcaatggatttgagttttaatttgggggaatttcaggtggacccttgaattactggc

SEQ ID NO: 81725 - DNA, 334 bp, Oryza sativa
  Clone ID: PAT_MRT4530_81222C.1
gatcattacttctcggctcccagagccattccacttgattaatcggctcccagagcctttttcattttctcggactcccagagtccagctgcccagcagcacaacaatccgcttccactcgggaagcctagtcgacgccacatgtcgggttttcaaggcttctcaaacccatttcccaagttttcgacaaacaacggtgtatgtgggatatttggtatacgcgctcagagagcacggatactgaggtaccacaaaggtggagcgacaaggaaatcagggtagtacaacctacaggaattagtgcgactactgggtaggtccgtcggtttggcac

SEQ ID NO: 81726 - DNA, 708 bp, Oryza sativa
  unsure (1)..(708): unsure at all n locations
  Clone ID: PAT_MRT4530_81223C.1
gatcattacttctcggctcccagagccattccacttgattaatcggctcccagagcctttttcattttctcggactcccagagtccagctgcccagcagcacaacaatccgcttccactcgggaagcctagtcgacaccacatgtcgggttttgaaggcttcacaaacccatttcccaagttttcgacaaacaacggtgtatgtgggatatttggtatacgcgctcagagagcacgaataccgaggtaccacaagggtggagcgacaaggaatcagggtagtacgaccggcggcggcgcgcgactgcgcacggcggcggcgggagcaaggcaccggcaagggcgcgatttggaggacgaacgcacaaactaccatgccccagtgctgtttaggagtcgccatgagcgggaacggcggggcggatggagtcgcggcgaggcagacgtgacggcgggccggcacaaccagttgagggggttcgttattggcttacgagcagatcaagcaggggtatgtgctcatgtgcatttcgtacacaaagtaggattgcgtcgtctnctcccacaaggaagaggaggtgcactagatagagtccatgtcgatcgcgggtcgtgattcctgatcctgatgtaaatcaaaatgatgttgttccaatatggcccgttatcttattgcacaatcctccgtagttgatgtgcttatttgttc

SEQ ID NO: 81727 - DNA, 499 bp, Oryza sativa
  Clone ID: PAT_MRT4530_81224C.1
tcaagcatcttcatcatgagcgcggtcaatggcggtcaaactgctgttatggttggcacgccaacctggccacgcggtgatatccttttggatcccctgccgggcccacaaccccagctcgaggagtcgtgaggcgccatgtcagaacgatctcaggaaatcaatacctgatatagcaccgggggctactgtcggagatatggtcccgggggtatgtgaagtagaggggaattactttccttccggccacgtgactctgcaagttagccccattcgcgcgtcacgcgagtcgtggaagccgcgggggggagggggggggcctcggggcatggcgtcaccccctcgggctatcccgcgtcttcgccccgaggccctcacccggctgccacgcggcggagggaaagagcgagagcacaggctgaacagctataaatgtgcgacgccccaactgtccctcaccgcatttaatgcggtaagggcagacgtgcggcgcgcctag

SEQ ID NO: 81728 - DNA, 630 bp, Oryza sativa
  Clone ID: PAT_MRT4530_81225C.1
atgccggcggtggcggacccggctcttctcggtggcgtccaagatggccttgttcttgtcatcttggcagcacggggcatgggtcagacggtgcagacgcggggcgcgaacggtggacggcggagagcaggacgtgccgcgcgtggcgaaaaagggacggcggcgagcgcgcggatgaggcacgcctcctgtcgaacaggttgcgggcgcgcggcggcgagtatggctccccgcgggcggagcgtcacggcggaggcgttgcaggacggagtcaccgccggggcgacaagcgacggcggcggaggtcgtttcttgggcccggtggtgggaaagtgcccgacggcaaaagaagacggcgtcacggtgggaaccggcgatcggcgcggtggagggcgatttcttggagctcaagacccagaacacgaggttgttattataaccgccttctgcacggccgcctcgccgccggaaatccgtcctcattcggacgccagcttcggcgtctgggttcatccgcattgtttcacagccgctcggtcggtcgcacctggtgcgcgtgcggctcaaccgaagcaagccacagcaatggcgccgccgcggctgcgctccaagcttcgagcaggggcatga

SEQ ID NO: 81729 - DNA, 674 bp, Oryza sativa
  Clone ID: PAT_MRT4530_81226C.1
gtgacaaaccgacggacctacccagtagtcgcactaattcctgtaggttgtactaccctgattccttgtcgctccatccttgtggtacttcggtattcgtgctctctgagtgcgtataccaaatattccacatacaccgtcgattgtcgaaaatttgggaaatgggtttgagaagccttgaaaacccgacatgtggtgtcgactaggcttcccgagtggaagcggaatgttgtgctgctgggcagctggactctgggagtccgagaaaatgaataaggctctgggagccgcttaatcaagtgaaatggctctgggagccgagaagtaatgatctgacccgggaggtcggtacattgctaaatgagctgttgaaaagcatctcttaaagtcgaatcgagacgcaagtctcttttcgcccaaacatagaaagaaataaatcacttagtgatttcaaaattgctgagtacgaaagtactcacccttgctctataaatatatatatagttcctccgccctgaagagaagataaagtgaagtgaagattagggtttcgtcctggttcccagccgtcgcctgtggtgttgggtgttagtccgttggttccgctgctgctgctgttgttggtgtttcctcgtccgtgtcgtcggttgtattctcgggctgtctgagctgca

SEQ ID NO: 81730 - DNA, 384 bp, Oryza sativa
  Clone ID: PAT_MRT4530_81227C.1
agaggaagtggcacacgcatgtacttctgcagaatccttacactacagtttactactactaccatttacacaatggcttaatgatgggtatttcagccaagacacagaacataaaggaagctaaagttgcttccgctacttgggttcttcctaaagtgtgaatgattatcacaccaaccacatacagcagaacatctaggatactagttactactactactactacaaataaactgctcctgagcaagtagagtttgcaaagaggataatgatgataatagcactgttctgaggtcttttcaagtggggcagattagcattcttcagttcattccaggctccaggagtggtagctcatctctcagctgaaactcaacgggattg

SEQ ID NO: 81731 - DNA, 500 bp, Oryza sativa
  Clone ID: PAT_MRT4530_81228C.1
agctggtagcagcgtcgccaactgcttggtggatttagcggccatccgtttgctgataccactactacaaaaaccatctttcgtggcggccattttgggtttccgctggtggaaatcgcagccgccacaaagcaaaggccagtgaaaatgtcgatcttcacagcccgagaatgcaaccgacgacacggacgaggcaaacaccaacaacagcggcagcagcggaaccaacggtctaacacccaacaccacaggcagcagcagggaactaggacaaaccctaatctttacttcacttcaacttcatcttcagagctggcagaactatatttatatagagcaaggcccgaatcacccagcccgtgcagaatggccacgtctggtgacctaagggctttcatgacaaggcatttcgagagcatacacagggttgccatatgccgacgagaggggtcccagaccaacaacaggttaggtcccagaccatactatgccaggaagcc

SEQ ID NO: 81732 - DNA, 537 bp, Oryza sativa
  Clone ID: PAT_MRT4530_81229C.1
actgcttcttcgaattctatggctgcgacgggcggcgcactggcgcccctcgtgtctggccgagtcgccgggcatgacgatgatgacgggtgcaacgacgccgccgccgcggaggacatcgagttggcgcaggcgggcggtggtaacagcgaactcgttatcgactcgttggtggagggagtgtcgtgggcccccctcccctcgccgagatgccgtggacgaggacgatctccgccgagcacgacgggcacggcgcctttccgctcctcctcctcccttgccacggcaatgttgacgagccctggcgctgccgggcggcgtagcagcaggcaccccgaggccgccgccgcctgcgagatgtccaccgcgatggccgtgctgaagaagaggaaaaggagggaggggagggacagcgaaccagtggtggcgtctccagattggcgcgcgcgccatcctcccgccggcgccgcctacatccttgcaccgcttctgccggcgctgcctctatccccccgctgctcgcgccgctcccgctaa

SEQ ID NO: 81733 - DNA, 173 bp, Oryza sativa
  Clone ID: PAT_MRT4530_8122C.1
atgggtcaccggtcaccaccctgtcttcctcctcatttctcccccaaaccaaaaactagggtttgttggtgccctccttccacctttgttaactccgatgagctggatctgaggtcacgagcaccgccacgtggcaaatctggcacccaagagctcaagctcgaccaaatcag

SEQ ID NO: 81734 - DNA, 316 bp, Oryza sativa
  Clone ID: PAT_MRT4530_81230C.1
gagatgtgaaacctttggggatcccacaaagttctcactagtcttccactggcccaaagttgcacgagcggcacaccgtttttcaaaccacttttagggctttggtgtgtgttaggctgctgtaacagacaatccacagtcttacctaatgttttgtctcatccggtggggtatggttctggtggaaaccttgtggcacggtaaaaaatggattgtgtgccagatggtacgcccaccacttagaacccaaccacgaagggagggagatatgctagcgatgggtttttgtttgggtggggttccagattgttgcctc

SEQ ID NO: 81735 - DNA, 243 bp, Oryza sativa
  Clone ID: PAT_MRT4530_81231C.1
acggaaacattctttattttttggggagatttttaaacaaatgcggttttccaaacaaaacaacttcgtaaaatttttattttgattaataatttaaacaaagattacaaaactttttgcagccacaaaaatacccatctatctccaaatatttatcaattcgcttaatgattttaacacttctttcaaaaaagacatttttattgggggcccaaaccttaaaagcacttttcttaaaaggga

SEQ ID NO: 81736 - DNA, 352 bp, Oryza sativa
  Clone ID: PAT_MRT4530_81232C.1
aaaaaaaaaaaaaaaaaaaaaatgggaggggggggggggaaaaaaaaaaaaaaaaaaaaaaaaaaaaaaaaaaaaaaaaaaaaaaaaaaaagccgggcccttttaaaaaaatccaaccttccttccccttccttccaacatcatacctcttttttagtgtcccctaatttcaattcatttgcgggtttgttgcggcgtctttcctggaaaacccctgcctttccccatcttaatccctttccaccacatccccttttccccacctggcttactcccaaaaaggcccccaccaatcccccttcccaacacttccccagcctgattggcaaatgcccccccccctttccccccc

SEQ ID NO: 81737 - DNA, 464 bp, Oryza sativa
  unsure (1)..(464): unsure at all n locations
  Clone ID: PAT_MRT4530_81233C.1
agggctcctactccgacgccggcgtcgcgggctacccgaacgggcaaggctacgctctctaccaatattccattgaggatgatccaacctcctgcgccgtaatgtgatgtgcagagcagaggaagccatgaatntaagctccggcagaggacgcagcctgtgcttgatccatgaccctgcatctgcatgattcctcgaaccgatcgatgaggctttatttttctctcgcgtatttcgggtgcccggaaatccatggattatgtgatggttcttacattacgcatgtgcattaatcgcgacatcacgcatccatttgggtagtagcatctcgggattgtaatgttgcgtgtttggatgtccgtgtaattttttcgccggacgcatgtctggtgttgttaatgactgtaggctcctatagtagcaaatgacaacaagttttttttactaaaaaaaaaaaaaaaaaa

SEQ ID NO: 81738 - DNA, 563 bp, Oryza sativa
  Clone ID: PAT_MRT4530_81234C.1
gggcaaatgcgtctttttacaatgaagttaacggtcaactgacggtggactgacggcaatggcataaaagggaggagaaacttgaaccggtggcataaaaaggagaagccaatttaaagtggcatataagggagccggttaatttagagtggcatataagggattctctctttttgttttggagtgaaagaatctactgtattttcttatgtacatattttctttgtgttgttctaaagtcttctcatattgcttagcataatttgttggtggcaagcttttgtttccaaataattgtttccgtccaagatcgtgcactcacacatgatctgaggacatactaatctggtccagtttgttccccaaataattgtttggtggttcattctctgaagtaccccctccattcttaacccggcccagattattccccaaataagatgttgctttagaaattgtgcaggcaaaccatgaaatcttagctcactaatatatgccaaaaatatatataattcaagatttgatatgtgaagatgccatcgatagatttacaatgatttttt

SEQ ID NO: 81739 - DNA, 1194 bp, Oryza sativa
  Clone ID: PAT_MRT4530_81235C.1
aagaggaagataacaacgattgattgcttttacaagccagtggctccaagggcaggctctgttgaaaaatcctaacccaactaatgtggaagctgttgatccggttaatctgcaatctcctaatcagaacagtgctgaacctttagagctgaacaaggaattgtaactacggcatttgaaagggacccaggtaaacatgttcaaatctccgcactccctattaaccaacgagatgatggtaggagattttatatatctgaggggccataccaatttatcttggaagagtacccactgaatggtgcattccatgctcgtcgattccaaagtaattggtttaaacaatttagttggctagagtattcaccacacacagaccgtgcttattgcctgccatgttttctcttttcaaagaaccagttggcaagttcggcttagttactttcacagtgaaggagtttcaaaatggaagaaagttaatgatggaaaagaatgtgcttttgtgaaacacatggggaatgccacttctgctcataacttttgagttggttgttacaataatataaaaaactttatggctcacattgacgaggtgatggttaagcagaatgatatattggtggaaggagcaagactaaggcttacgactaccattgaatccattaggtggttaacatttcaagggtgtccatttagaggccataatgaatctctaaattcgttaaatcgagataattttctcgaaatggttaagcttttggcttcatatagcaaagatgtgcgagaagttgtgctagaaaattctccaagaaatgaaaagtatacatcatccgatgtccaaaaagaaatcctaagcataattgctcaaaaagtgcaaaaatcagttagagaagaaattggtaatagcaagtattgcataatggttgatgaagctcgagataaatctaaaaaagagcagatggcaatagttcttcggtttgtcaacaaaggacttataaggacacttcttcactgactcttaagaactcaatttgtgctgtcttgtctgacattaactttttacaagacataagagggcaaggttatgacggggcaagtaacatgagaggggagtagaatgggttgaaggcactaattctcaatgaacagcagtacatgtattccctcccttgccactcgattaatctcattaaa

SEQ ID NO: 81740 - DNA, 486 bp, Oryza sativa
  Clone ID: PAT_MRT4530_81236C.1
tcggtcatctcctcttgctcccgatcgctgcggcctactttgcagctcacacccaccccccacgcaaatctagaaccttctggatccgccgcttcctcgatccgatcgcctgccccgacgaccgtccgatcggatccccaagggtctccggcttgccgcccccgcaatccagatggcttacgatggcgccgggtaggcccaggagagctcggctaacccggcgtcggaggtaacagcggctgccgcggcgggggcgggggctggggcggcggaggagggggcggctgcgagtgggcgaccgccgaggcctccccacgacaagcggctcggcgtgcggcatcccttgaagcaccgcaggttccgcgccggggggaaggtgatggtggagcccggggatccgccgtccgcccaggaggtggcggatgaggaggccagcctggtggagcaggaggccggcccccggagagggaaccaccacaggaggag

SEQ ID NO: 81741 - DNA, 1744 bp, Oryza sativa
  Clone ID: PAT_MRT4530_81237C.1
tcgttctcctcttcctcccgatcgctaccgcgctcctctccagctcacacccaccccccacgcaaatctagaaccttctggatccgccgcttcctcgatccgatcgcctcccccgccgcccgcccgatcggatccccaagggtttccggtttgccgcccccgcgatttagatggtttacgatggcgccgtgaaggaccaggagagctcggctaacccggcgtcggcatcggctgctctgtcggaggcatcggcggcggcgtcggaggtaacagcggctgccgcggcgggggcgggggctggggcggcggaagagggggcggctgtgagtgggcgaccgccgaggcctccccacgacaagcggctcggcgtgcggcatcccttgaagcaccgcaggttccgcgccggggggaaggtgatggtggagcccggggatccgccgtccgcccaggaggtggcggatgaggaggccagcgaggtggagcaggaggcggcgccggtggagagggaaccaccacaggaggagggtggtgatgtagaggtgtcgtctgcaccggcagagatggaggtggtggagggggatgcaatggaggtgtcacctgagccagcagtggctgtgggggagtcggagttggaaggccgaccaggcgaggaggaggaggtgtcctcgcctgtggtttctcaaggggagaggaagcaggagactgctgctgctgctcctgtgccagcagtggaggagaagaaacacaaggatcaagagaataagcacaaagagagggaaagggagaaggagagagagagggtggatgaagtgggctacatgagtggtggatggaagagtgaggatggatttctgagttgtggatattcgagttttagaggaaaaagagcaagcatggaagacttctatgatataaaatcatctaaaattgatgataaacaaataagcctctttggaatatttgatggtcatggtggttcacgtgctgctgagtatttgaaggagcacttgtttgagaacctcatgaaacatccagagttcatgacaaatacaaaattagcaataagcgaaacatataaaaaaactgattcagagtttttggattctgaaagccacactcatagagatgatggatcaaccgcatcgacagcggttttggttggaaatcatctctatgtggcaaatgttggcgactctcgtgctgtaatatcaaaggctggcaaagctattgcactctctgaggatcacaagccaaatagaagcgatgagaggaagcgaattgagagtgctggtggggttgttatgtgggctggatcctgagattcaggaacaagaaatagatgatgaattggagtttctgattttagctagtgatgggctgtgggatgtggttccgaatgaggatgctgtttcactcgtgaagattgaggaggaacctgaggcagcagctcggaagctgacagagactgcattttcccgagggagtggtgacaatatcacatgcattgtcgtgaaatttcaacatgacaagatggacggtgattcctcaccaacaagcgataaaagctgattccatttgttgtttgttatacatgttgtcggtcgtttaacttcagctggattttcccggcttcatatggtccctacaatggcgtagctggtactaaagactcgcttcatgttcccctgtctatatatccctaattttggtgcctctggtggtttacaagttggtattgctatcc

SEQ ID NO: 81742 - DNA, 2799 bp, Oryza sativa
  Clone ID: PAT_MRT4530_81238C.1
atggcggggctaaccaagaatcgtagcacctctgcttgccgcctctgcttcatcctcctcctcgtcctatccgccaccaccaccaccctctccaccgcgctgtccggaccctactcctcccggtgcgcgtccccgtcaccagctgccgaccaacacaccggcgtggacgacgcctctgcgctcctccgatcgttccggattacctctggcatcttctccggcgaaggggcggagaccctgttctcccctcgttcctactactcaatcgtgggtcagcactcgttcaccgacagcttcgccaggcgctccttctcccttctcccccacgccgtgtcccgcaccaccgaacccagcgtcatccacctcacagccaccctcaccctgttcggcagccgcgtgcagttattcgagagcgacctcacacgtgaatccgcgaaggaaggacattccatctccttctacctcgacggatactactcgtccgcaaccacgcaactctgtatggtcggcaaggggagtgacctttccattgatggttcagtgaaacattacatggacgtcgctctccgcctccggatccccagcatttccagcctcaccgaccccttcgtcaccggcatcctcgagggcgccgacttcgagcccttctccctcctcacgtacgccgaggggagcagctacaggtacagcgagaacacatcctgcctgccgctcccggtgccggaggccgctgctgccgcgcggcgggccatccagacgacgccggacggcaacttctcgtgcgacactctcaaggcgcggctcgccgcgtcgtaccggctggagtacgggcgcgcgcacgcggtgagcttcccctcgctgcacgagccacgcctgcacgtcaaccagctgcactgcaccgcgggcggcgcggtgcgagcgtacgcggtgttctccaacgacacggccaacatgtggggattcagggacttcttctcgtcccaggaggcggcggtcgtcgcggacgggcactgggacagtgacaccaaccgtctctgcctccgcgcgtgcctggtggcgcgctcctcgccggcgacgccgtcagccagcactgagcttgaggtgcgcgagtgcgggatcgggatgagcttctggttcccggccgtgtggacggtacgggaccggagtgtcaccgccggcgtgctctggaacgcgacccagctgaacagcagcgacaaccacgcaagtgtaggctccgacgtcgctctgataaccgcgtcgagcttcgaggagtggaagggtaacctctccgacgtgaactacaactacagcttcaccatgcttgaggaggccaagaagcattacctcaagaccgggccgagcgatagcaagaagaatagcaagggttcgttcccggggaactactctcactcataccgtgacttccgtttcccgttcttcttggagggagaaacagggtctggaaccgcctacccggtcgcgatcggctcggcgatggtcgacggtgacaggctggctgccgaacattcgttctcacggcacgcggcggcgcaacttgagcagggtacactggtgaatgtcagctatggtgtgacgtactacgttgcacctaagaattggtcttcctttggccagctcaaagaccggtatatcagggcagagggtgtttacgatcctaccacgggctccctgtgcatggttggctgtggagagctgaacggctcaatggactgccagatattgataaccgttcagttcagttcgtttggtaatggtacgggattcagccatggcaggggaaggatcagcagcctgaggaatagcaccgaccgtctctacttcccaaggagggatattaccttatttggcatgtactcgcacgaggtgtccaagtcaatctggaggatggacacggagaccgtcgtggtggtgatctccacgacgttgacctgcgtcttcaccgtcctgcagatcctccacaccaagaggaaccccagtgcggctgcttccacatcgatcaccatgctcgccgtccaagccttggggctcgtcacccctctcgtagtgaattccgagctcctggtcatgaacaagaggaggcaattgggtgggctcgacggagacgggtggctccggctcaacgagctgatgctgagggtgcccacgctgatcgccttcgcgctgcagctgcgcctccttcagctggcatggtccggccggacaacggcggcatgcagcagcgaaggcgagacctcgccggcgccggcgccggccgccgagaggaaggtgctgcggacgtgcctgcctctgtacttgctcggagccgccgtcaccgccgtcgttcacgtggtgaacgtccgcgccgcgagggaggcggggctggtcgatcgccgtttcgctccggcagaggtcaccacgctgtgggctgacctggcgtcgtacgccgggctcgtgctggacgggttcctgctgccccaggtggtcttcaacgcggcgtccggctcgaggtcgagggtgagggcgatctcgccgtggttctacgccgggggaaccgtgatccgcgcggcgccccacgcgtacgacgcgttcagggctgtgagctacgcggcgacccacgtatacgcgagttcgcgcgatgacttcttcggcgtcgcgtgggacatcgttgtgccgttgggagcggcgttgctggccttcgtgctgttcttgcagcagcggcttggaggtgacttgttgcttcgttcaaggaacaggaggaggccgtgtgattatcagttggtttccactttccaaagatag

SEQ ID NO: 81743 - DNA, 660 bp, Oryza sativa
  Clone ID: PAT_MRT4530_81239C.1
ctatctctcgtttctctcgtcgcagtgctcgaaccgcttgagcatggcgagcagcatcgccttgaggagatgcgacagcaccctgtggccggcccccgtgcctcctccggcgacgccgccgaacgccgccacctccccaagccggcagccgccgccaattgctcctcctctgcgacggcgacgccgccgaatgccgccacctccccgagcaagcggccaccgtggcagaggccacagccaccctcgcagcgcgacgcccctgccaccgacgtcggcgacggtctgacgaagctccgcggcgtcgacgacggcggctatatggatgtggtggagctcagcatggcatggacgcagatgtggttgctaaccataagagtggtggaagagatacacaatgggccaagagtaaaaatagcgatgctcggtatctttctctgttccttgcggcagacgtgggaacgggatgagcggataggaggctacccagataaccttaagttcatcaataccaagctgccaattcagcttgtagctggtagcatacaaccatttacgtttaattcagcaaaccccacaacacaaatcgtagcagcaagaagggccggcggaaaaaagaacaattcaaggtgtccgccacggaagagatcagccagagattga

SEQ ID NO: 81744 - DNA, 339 bp, Oryza sativa
  unsure (1)..(339): unsure at all n locations
  Clone ID: PAT_MRT4530_8123C.1
cgagccggccggnnaaccctagtcgccgcgtccccgtagtggggggggccgggggcatctcccgtcctctccttcaagtgagctacctgcttaatcaaccatgggtacggagaagacgcacatcaacattgtggtcattggccacgtcgactctggtatgtcgaccaccacgggccatctgatctacatgcttggaggtatggacaagcgtgtgattgtgaggttcgcgagggaggccgttgngatgaacaagaggtccttcaggtccgcgcgggtgctcgacacgctcagggccgtgcgtgcgcgaggtatcaccatcgcgtttgccctgcggccgtt

SEQ ID NO: 81745 - DNA, 1339 bp, Oryza sativa
  Clone ID: PAT_MRT4530_81240C.1
tttttttttttttttccaataatatactgtacaattgctgacatgtggtgctagaagtttctcaccaagtacatagcatacgcttaatatgtaggtacttacaaaacataatcagacaattgaagtccaagcgcccccaagtaagttatgttacacgaagaaacgccaaacagaagcaaatttacagcgaaaattgcatacaccgcagttccatagtaagccggattatctacacaatagctgcacacaaactttttcatatgcgcagtgagctcatacggagctccccgctcgcatggacctctttgaccctcttatcgtactcatcttcctcctcttcctcgttctcttctggcctctcttcctcttccttctcctcctcgtctgaacccgcgtcgctccagtagcctgtcctggatgatttcggcatggttcttgcttcttgaacaatcttcatgatctcttctgaggtctggtctgagaaggaaggcacggagttgtccctcctgtagtacatggcttgcgcagtctccgtgagctccctggggaggttcttcaagaaccacgggtggctctttatttccttcatcgtgattctcctcaatggattgttgacaaaaatgcgggcaataagctgtttgcattctgcagatatgtggacgtaatctggtatcttatattgcactgacattattctctgaatggttttgcgaatgttcttggggtcgtcctggtcttcaaatgggtaggctcccacaagcatgacgtaaagagtcacaccacaggaccatacatctgcaagctttccatcatactcacggcgggatagcacctctggtgcgatatatgctggcgtccccactgctgatttgggtcttgaatgcaatactgatgacttggagtagccaaaatcacatatcttaagccgtggagctgggctgccatccaagagaacattctccaacttcaaatctctatggcatatttgcatgtgatggcagtagctcactccacagatcagctgctgaaagaaatacctggcctcatcctcactgaaccgtccacgatcacagattcgatcgaacagctccccgcctgctgcgaactccatgacaatcataagatgcgttggcgtcagtatcacctccttgaagcgaatgatgttggggtggcgcagcgagcggtggttgatgatctccctgtacacattctcatctatccggtggccgcgctcgatgcacttgacggcgacgagctcgcgggtctcgcggttgcgcatcagccgcgccaccccgaagttccccgacccgatgtccctcaccgcctcgtacttctccat

SEQ ID NO: 81746 - DNA, 1461 bp, Oryza sativa
  Clone ID: PAT_MRT4530_81241C.1
atgccctcaactcctcccacctcaatgtccgcactggccactacaccccactccccgctcaagcagcccatcgctaagcacctttgctacggtgtcataaacctcaacaagccatccaacctcttgtcgcacgaggtcatcacttggaacaagaacctcctccacatcgagaagactagccacaacgggacccttgaccctaaggtcaccggtaacctcatcgtatgcgtcaatcgtgctacccgcctcgtgaagtcctggtacggcgtgcggctgctctgtgttctgtttaaacgtgttggttacattgaatctttaagtctcatgattcgaatgttattgtattgtgagtgttttgcagcacgtgtatattgtgatggatgccattgttcaccatgtggaaacaagattgagaatgaaaacataaggaaggaagctattgaaacaattctcctccgtaatccacttgcatttcagcccaaaattgaaaatagtccaaatactgtaactgttccaaagcatgcttctgctgcatgacctccgttaccaaagcacaataagggctgtcactgcaggaagtcagagtgcttaaaaaagtactgtgaatgcttccaagcaaacatcctatgctctaagaactgtagatgtcaggactgtaagaattttgaaggaagcgaagagcgaaaagctttagttcaaatgaaaaatgcatctgatagaaatcacattcaagaagcagctaactttgctctgaatggtgccactggatctttaggatacaaaaattctccagtgcgtaggaagaaatatcaagaaaattcccttggagaacaaattttgtcagaagcacaatttcaaccggctggccctgctggggttgcacagcttgcatcctcttgcacaggatttggaggggatattgctatcaattaccaaagcaaatcatctgaaatgatctataggtctccactagcaaacactatccctcttattgaagtcaatgatcttgtcaagaatgcgttggttgcgtgcagaaaggcaccagaagcattcctcacaaaagctggcaataaagtggagatgcaagcagagaagcaatatcagacaaatgatgaaataaacaatgataagaccaaagagcaaaacttgaaggaagcttctctaaaggacatccaaaacaaggcctgtatagatcgtcagaacattaatggaacagagccccatctagctaactcttttaaagattctaggcctgcatcaccaggaacacaagcactaatgtgtgatgaaatggatactacattcggaaatgaggattatagaagtccatttgtggtgccttcacgtgatcaggatatttctgagctaaatgctgatcaagaaagaatagtattgacagggctgcgagattatcttcgtgtgcttatcacacgtggaaatataaacgaaatattgttataa

SEQ ID NO: 81747 - DNA, 1508 bp, Oryza sativa
  Clone ID: PAT_MRT4530_81242C.1
atgctctcctcctcctcctccgccgccgccgccgctgtggtgctcaccaccaccagcggccgcgcgcccctcctccaccttcccaggacgccacgccctactaccgccgcaaggatcgccgccgcgcccgactcctccagagccagagccggtggcgcgcctctcctcctcggctccgccgttccccggcggcgtggctgggcgctggtatgccgggactcctccctccctggcccacctggagtggaccccgtggcggaggaggaagagaacaggaagaagaccgaggcggtggcggccgccgcggcggcccggattgccagtagcggcggcggcggcggaggaggaggagggagtctcagcgactggacgacgtcggtgcttatcttcggaatctgggcggggctcatgtactacatcttccaactcgcgcccaaccagacgccgtacagagacacatacttcttgcaaaagctttgtaacctgaaaggcgacgatggcttccgaatgaatgatgttcttgtgcctctatggtacataatgggcctctggccactagtgtacagcatgctgcttcttcctactggcagaagttcaaaaagcaagattcctgtctggccattcctaattctttcatgcattgggggagcatatgccctgattccctactttgttctatggaagcctcctccacctccgattgatgaggaagaaattggacaatggccactgaagtttcttgagtcaaaattgactgcaggagtaacgtttgctgtgggccttgggctgattgtctatgcagccaaagctggtggtgaagattggcaggaattcattcgatactttcgggaaagcaagttggaaaaatggctcttggcttctgcccttggcacttatcccttttgtgggaccttcattgtatcttttgctgaggccatcactctcttctctgctagcagcaacaggtccatcagatgataaaacacagtaattacaattatgaagctgagtattgatgaggttttggttacgaggagatgacatggtagaaaggttaagaaccacttatggaaattggattggacagatttagatgccaatctggagcattccacaaagttgacttgttagtaatgcatttgaatggcaaaagtatgaataatgtccttactcagcatggtcagcatctgaattcgtcagaaaattttcaacttggaaggcattggagtaatcagcaatgcttaaatccctggtgaacattctgcattctccccagcgtacatatacaactggtaggaccttttgctactgttgtccatgtatagaaaattttgaccttgtgacagtggtccatatgtaagaagccatggtgctagtacatgatcatgaatgataggctacaaatttattgttacagccaaagaataacaggattcttttggcaccaactacacttagaattacattgcaacaggtgtttactgctcaaaaaaaaaaaaaaaaaaaaa

SEQ ID NO: 81748 - DNA, 565 bp, Oryza sativa
  Clone ID: PAT_MRT4530_81243C.1
gtgttttttttttttagttactataataatagcatagtttattaatccgttttaggtacggttatcgtccttcacggtttaacggttatcatagtaaccatatgattggttaccgtgaaaatcatatagttatcatagtatacttaataattaagaaaattatcatacatgataactaagataaccgtaagcttttgcaaatctttatccccacgacgagcgagacggttgtgaatggttgatcagttccggagcatcagtccgttctccctcccgagcgggcgaggcgaagatctgcctcctcccaccgcacgttgcgtgtcgctgggcgctggctggctcctcccatcccatgccgcgcgggccgggggcgcgtgtgggtttggtcgcacgcaccgcgcgccgcgggccagccagggacacgccggcgcgacaccatgtgctaccgctaatccatccaagcttccagccgcgcgcgcgcgcatgcagatgggagaggggaggagggaggggagcacccacgcgtccgcggacgcgtgggcggacgcgtgggcggacgcgtggg

SEQ ID NO: 81749 - DNA, 890 bp, Oryza sativa
  Clone ID: PAT_MRT4530_81244C.1
cccacgcgtccgcccacgcgtgcgcggacgcgtgggcgacaacagcagcgccgccgccgccgcaggagccgcatcgccgggggttcgccggagggagggagtagccatggatcggtaccagcgggtggagaagccgcggcccgaggccgccgtcatcagcgagaacgaaatccgcatcaccacccagggcctcatccgcaactacgtcacctacgccacctccctcctccaggaaaagcgcgtgaaagaaatagtgttgaaggctatgggacaggctatcagcaagacagtggctattgctgagatcataaagaaacggatccctgggttgcatcaagatacatcaattagttcagtcagtattactgatgtatgggaacccattgaggaaggccttgtaccattggagatgactcgtcatgtttcaatgatatcaatttccctgtcaccgaaggagcttaacaagagttcagctgggtatcaagctcccttgcatgcagagccaattaagccacaaagataccaacaaacccagcaatatcaacaacaacagcaccagtctaggccaagccaagttcaaacaggtgaatatcttttcactaatagaagtattttcgtacgaagaggaaggggttggggtggtaggggaggctatggtggagggtatggtggatatgataacaaccaaggaggttatggtggatatggacaccagggtggatatggacaccaaggggggtatggcaaccagggaggatatggccacaatcaaggtggttatggagggtatggttacaaccaaggtggatatggaggatatggtaagtaatatgatggtcgcacgggcggaagatccacgtctccgtgaagcaggagacgtcgcgggtgct

SEQ ID NO: 81750 - DNA, 1295 bp, Oryza sativa
  Clone ID: PAT_MRT4530_81245C.1
cgggctgcaggaattcggcacgcggctcggccccccccctccccccttcgacaacagcagcgccgccgccgccgcaggagccgcatcgccgggggttcgccggagggagggagtagccatggatcggtaccagcgggtggagaagccgcggcccgaggccgccgtcatcagcgagaacgaaatccgcatcaccacccagggcctcatccgcaactacgtcacctacgccacctccctcctccagggttgtgttgagctcacaaagttcctgcctctgttagtttcgatgtgcaaaaacatgaaagatattaaagatgagttcttttttgttgcgtcaatgcctaaaggaacagcatatggggattatattggtgccgtgcaatgcattgtttttcaacagttagtatcactattcacttattttcgtgtgaagtgttatgccatttgtactgaggcatctaccaattgtcaccgtttatgtactctggaaaagcgcgtgaaagaaatagtgttgaaggctatgggacaggctatcagcaagacagtggctattgctgagatcataaagaccaagttcaaacagattcatatgggcgcggccgtggtagaggcagaggaagaggaaggggttggggtggtaggggaggctatggtggagggtatggtggatatgataacaaccaaggaggttatggtggatatggacaccagggtggatatggacaccaaggggggtatggcaaccagggaggatatggccacaatcaaggtggttatggagggtatggttacaaccaaggtggatatggaggatatgaaaatggtggctggaactacaaccggaacagaggtggtggtggtggcgggggccgtggaagaggcaactggggatatggtggtccaggaggatatgaacgttcaggtccggcatatgaacgtggtggcagaggtggaggtagcccaggcggcagaggctatgcccggggccgtggacgaatgggcggtggccgtgggcgaggcaaccaaaactattagatcgactttagttgggatgtgccagcccggtcgttgggtgctgtatgaagaacaaaaactgtggatgcgttctccataggacggaaccctagctgtttctttgtgatcaatcgactagtcttcccagcttttcgctataatcatcaatggtgtctgccattgcttcgattctgtgggattttgacaagaatgttaagttttaccttggacatattttcctgtatttaagagtgcatttttgaataaaaaaaaaaaaaaaa

SEQ ID NO: 81751 - DNA, 1032 bp, Oryza sativa
  Clone ID: PAT_MRT4530_81246C.1
atgcgcccccaacggacgccgcccagcgggcgcgggccacgcggagaaagtcgcgcaccccgtctcctccacatcccgcggggcatagcgggtagccaggcggcggcacgccgggaccccagccggcgcgcccccacaggacaggcggccgcgcctccgggacgaggcggccccgtgcccgggagaggagccggcggggtcccggtcgaggctagcctcccggagtgcagcgccggtgcaccagtaggagaaacggggggtgcagcggagtgggagaaggcgaagggttgggagaggagtcgctggaagggtaggttacacgacttaattcggtccgctccctgtgaccacgcgactcgggtaacgccccctgtgggctggggttctttccatagtacgttcatcctacttggccacgtatatatgggcacgcacgccacgcacggccacgcccatggccacgtgcactcgcacggccacggccccggccacagccacggcagcgcgccggcggccgccacctcgccggaggatgcctccgtcgccgaaacaatccggcacagggttgtctcccaggttctggagctgggaatcctggtgcactcggtgatcatcggggtttcgctaggcgcatcactgaggccgtcgtcaatcaggccactcgtcggagccctcagcttccaccagttctttgaaggcattggccttggtggctgcattgttcaggcaaattttaaggcgaaagcaacagtgatcatggcgactttcttctccctcactgctccggtgggcattgcactggggatcgcaatctcatccagctatagcaagcacagctcgaccgcacttgtcgtcgagggagtcttcaactctgctgcagcagggatactgatctacatgtccctggtcgatctcctcgctgcagatttcaacaatccgaagcttcaaacaaacacaaagcttcagctggcagtatacctcgccctcttcctcggcgctgggatgatgtctctgcttgccatatgggcatga

SEQ ID NO: 81752 - DNA, 201 bp, Oryza sativa
  unsure (1)..(201): unsure at all n locations
  Clone ID: PAT_MRT4530_81247C.1
aaaatttatgcgannatgtttattgggagaggtagatgatcacctagaggttttgtttaccattattatttagaccaaggatacgtgccaagaacagaacacatgcttacaagggaaaatactaatagcctggttggttgttttacagaataaccaaatgataaactttaaggggaaaaaatggcacggaatgaaaaacaa

SEQ ID NO: 81753 - DNA, 265 bp, Oryza sativa
  Clone ID: PAT_MRT4530_81248C.1
tcgtattatatgcctgctcagaagcactgctcagacccaaatgtatgatgctcagccgatctacgcgcagttgaaaacaagctgagagctgtactaccatacattcgaagactttccgaaacagaagatgcttctgttcttagattcaatcattgattgctggacctccatatgagcacgtgaacattacatacatatacatcctttacccatttacctaacaccattcatatcagatgctcaatgataggagctttgtatcacc

SEQ ID NO: 81754 - DNA, 1903 bp, Oryza sativa
  Clone ID: PAT_MRT4530_81249C.1
caccgctgccgcctccgcctccgcctccgccgatccccatccatccatccggcgagcgagcgagcgaggagggtcgccgtcgctcgccctgctgcttccgccgcatccgttccctacttatattattttgaagagatgggtagatctccaaggggccggaacctcccagctcgtcgacgtggatcatcttcatcttctagtgatttaccttcctgctgctggaagatgaaaggaacatgcgagcaaaatgatatagcattggtctctgagaaaaaagaatggaaaggagcttcttgcccagtttgcctggagcatccacatgatgctgtcctcctcctctgtacttctcaccacaagggttgccggccatatatgtgtggtaccaaccaccagcattctaactgcctcgaacacttcaaagaagcttacgcaaaggagaagttggcccacagtgtattaattgagtcttcacctggcctttcattatctttgaattctcagccagccagcaagcaacaatgtgcaatggaacttgcatgccctctttgtcgtggggatgtcaaagctcaccacaagggttgccggccatatatgtgtggtaccaaccaccagcattctaactgccttgaacacttcaaagaagcttacgcaaaggagaagttggcccacagtgtattaattgagtcttcacatcgccatttcgtatctttgatttctcacatggccagcaagcgacaaagtttgattgtgaaagagagcgccatgattcattggcactatcaaaaggatgcactgtgggcgaaccagctgggcagtttcttaatcgagagtaaagagggcgtaaacaacaaggcactttcttaatgagatgacttggaggagaggctcaacttcttcacatccttagatcgcactctgaatgagaggcttgacttctatgagtcatcagatagtagtttggatgacagcattgacttcttggcatccttatttggccatggcaggagaattgccagtggtgattcatacaccagagcttacagaaggtacagggagaggcctaggcgtaatgtcacagctagctcggtcgctgcctctgatatccagcatgattcagctaacactcgaaggggacgtgtcagtggtattcgggccatagggaggacttcgcggcggtaccatcctgtggtgactcatgcagcaaccgaggatacaggaacgctacagcagtcatatcagtttgttgctattgagaagaagtttggggaaagttggtactacttccgtcccaaaataagtgcagtcgtggggaaccgtgtccgacgttgaccagcatgattcagctaacactcgaaggggacgtgtcagtggtattcgggccatagggaggacttcgcggcggtaccatcctgtggtgactcatgtaaggtcaacacatggcatctaagaaagggagctaccacgggttctgttcattctatccatccgcaagggaggcaaaataacataccgcggcatttgatgcctggttttcagaggatcatcatgttcttccagtacctttttctttgctgagacaggcagcaaccgaggatacaggttggacggagatctctgttagggcactgctcatgcctatatagggcaaaaacagtgctgcttttttccggtgctgccttgcatggattttgtgaatgcccttttcttttccttccattggatcgacgcaaatgggtttttttgtttggcagcgattgctgttccaaaacatgaacatcatgaaaacttattgggcatatttgcttgtcatgtgctgccgttttgtatccatgttctagtggatcgcacgtttgatcctagcgacttattagctattattatcatcaaaaaaaaaaaaaaaaaa

SEQ ID NO: 81755 - DNA, 2208 bp, Oryza sativa
  Clone ID: PAT_MRT4530_8124C.1
atggagtttagatcagctttctgtcgttctgcgctgctacttgtcctcttggttttgctccccctttcagctagcgcatcaaccaaactctacatcgtgtacatgggggagaagaaacacgacgatccatccatggttaccgcatcgcaccatgatgcccttacttttgttattgggagtaaggatggagccatgaagtctattgtgtacagttacaagcatggtttttctggattcgccgcgatgctcaccgaatcccaagccgaggaacttgcaaaataccctggagttatcaatgtgaaacctaacacttatgggaaagcgcacacgactcgaagctgggactttcttggtctcaactattatgaaaaatcgggtgttcttaaagatgctatgtatggggaagatgttatcatcggcgtcgtcgatacagggatatggcctgaatcacctagcttcaatgacgatgggtatggccctgtgcctgcacggtggaaaggtgtctgccagaccggtgatgcattcaacaccacgaattgcaaccgaaagatcataggggcacggtggtactctgccggtgctaccgacgatatgctgaagggcgagtacatgtcaccgagagacttccacggccatggcacgcatactgcctcgacgatcgccggtggccgggtgtggaacgtgagccaccaccaaggtggccttggcgccggcgtggcgcgtggcggagcgcctcgcgcacgtgtagcagtatacaaggtttgctggggtgtgggcggaaatttcggtgatgctgcggtcctcgcggccgtcgacgacgccataaacgatggtgtggacgtgttgtcactgtcgttaggagggcctaacgagatccacgggactctgcatgctgtggcccgggggatcactgtggtattcgccggcgggaacgacggtcccacatcacagacggtgcagaacactgtaccatgggtcatcaccgtggccgctgccaccatcgatcggacctttcctaccaccatatcgctcgggaacaatgagaaattgctgggacaatctctttactacaatgcaacagtgagcagcatcaaatttcaaacgcttgtagttgttaatggatctagcgcgatcaacgtcacagcaggcaatgtcgtgctgtggccggagccgtacaataaggacaccattgacctcttggccaaggaaggcgccaagggcatcatcttcgcgcagggcaataccttcaatcttcttgaaaccctggacgcctgcaatggcataatgccctgtgcggttgttgacaaagagattgcaaatagaattgcctcctatgcgaccagcacaagacatttcttctcactttccagcatgcccgtcgtgaaggtgtctccggctgtcaccgtggtcggcaatggggtgctatcgccgagggtcgcagggttctcgtcaagaggaccgggcactaagtttcccggcatactgaagcctgacatagctgcacccggggccagcatactggcagctgtgggcgactcttacaagttcatgtccgggacatccatggcatgccctcatgtctcggcagtggtggcactgctcaagtcggttcacccagactggtcacctgccatgatcaagtctgccattgtcactacagcatcagtgacggaccgttttggtatgccaattcaagctgagggatcagcaagaaaagtggccgaccctttcgacttcggcggcggccacatagagccaaacaaggcaatcgaccctggcctagtgtatgacatcgacccaaaagactatacaaagttctttaactgctccctcgacccccaggaagactgcaagtcctacatggggaagctctaccaactcaacctcccatccatcgctgtgccagacctcaaggactcagttatagtctggcgcactgtcaccaacgttggagggtcagaagcaaattacaaggtggtggttgaagcaccagctggggtgaatgttgttgtggagcctcaggtgatcactttcgctaaaggtggtagtcaaagtgcaacatttaaagtcacatttacagcaaggcagagagtacaaggtggatatacatttgggagcttgacatggctagacgataatacacactcggtgaggattccggtagcagtacgcactataatccaagactttgtttcagataccgcataa

SEQ ID NO: 81756 - DNA, 375 bp, Oryza sativa
  Clone ID: PAT_MRT4530_81250C.1
atgagggcgcatgaggccgcctccgcggccgcccgggcgccgccgcctgagaagtggggaggagagcgcctaagaagtggggaggagaggggagggggcggatccagaggagatcagattgccaacacccaccaccgaatctcgcgcggcccactgcccgcggcctgcctcctcctccgcccgccaccacccgcggctggcgatgcacctccgcccgccgccgccgacgtggcggccagcctccacccgccgctgcccgtggcttgcctcctcccgccagctgtgctagctccgcacgacgccgccgacgcgcctccgctcgccgcctaccaccgccagccgccgccgccgcccgttgatggagaaggctggtaa

SEQ ID NO: 81757 - DNA, 474 bp, Oryza sativa
  Clone ID: PAT_MRT4530_81251C.1
gttagcccggggtcggctgggaatgtggaacaatgtgttttcattgcttgctttggaacatacagctgctgttttattttcccctgtgctaaacaaaggaagggtttctatgagactatgacagggattacaaacagcaagtgattcaaatctcatagggattaggtgatatgggagggattcacccagttcctccctggatatgttacccatggagattatttccaaagcaaccgaacatagagcgtgtatgcggagagcactgtgtcaccaccaccggtggacgcatcaaccatgcatggtcacagcataaacaagcgaaattttaccatagatgagaaagcaccttgaggtacctaatttttacactaaagtttttgataccttgagatacttactacttagaggtaccaaattttacactagaaaatatttacctctatgtatattcttaaggatgataaaattactcat

SEQ ID NO: 81758 - DNA, 477 bp, Oryza sativa
  Clone ID: PAT_MRT4530_81252C.1
atgcgtccggccatcccgccgcctgtgcggggccagggcaggggagccccgcgcccgccaagcatcgtgccggcggcgccccgtggtggagcggcgtggcgtggagtacccctctccatcggcgtcgatgcggcctctccgctggtgcccgcgaccgcgagtacgcatcggagggagatcgtcctagacgacgttgacaagcgccctcacgtggatgatgatgcggcccttcttctacatatcggagttcgacttcctgcgactgcgaccccgccaccggaggacgtcgctggcgacgacatgatcgacgcacccccgccgccgccgcccccgcccatggaggttcagctcggtgctgacgtgctgcctcctcagccggctgtggagatcgacgacgacgacgtgcgcgacgcacccctgccgccggccacggaggtcttccacgacgacggcgcagccgctgccaaggcaccatag

SEQ ID NO: 81759 - DNA, 453 bp, Oryza sativa
  Clone ID: PAT_MRT4530_81253C.1
gtattagtaatgccacaaaaacatgcagtgcgtaataatattgaggcatcagaagtgaatgctgttcatttttcagaaatagtactagacaaatgttgttcatcagaagtgattccaacaagttgtctgcccataatacaagtagatcaacgagccattccacatgccatattttctgaacaaagtacaaagttcaaattgaagtagtaagaaaaatgagtcatgtgcagctttagttcaggcctgtaaaaagctcttggcagtcggcagaatacaacttacttaaatctgaactattttggtacatggttcaaatggtctaaaaataatttcctaggttggtccatttttagtagatcttttgtagaaccatctaatgaagaaattctggatgtaaatcatgatttttgcagctattgcttgcttaatctgcagactactgatttttgcttc

SEQ ID NO: 81760 - DNA, 523 bp, Oryza sativa
  Clone ID: PAT_MRT4530_81254C.1
cagtgctcggacattgtcggaggcggcggcgtccatgtcgccggagctcgccgcggcgctggcgaaggtggccctgttcccggtcgtgcaggcgctggtgtacctcatccgtgcgccgtgggcgggcgtcttctccccggacaggacggcggcggcggggtcgaggtccctcagcttccggccgatgcggagcatgagcgtccgccgcttcctggcggcgctctccgacgtccccgtcggcgtcacggaggacggtggctcgccggcgccggcgccggcgccgccgcatcgggggcctgcagaccttgccgagtagttcattgttcagtggtttcagctaattaatgacagtagtatactcgtaatgcatttgttcatggctattgtgaagaaggaatcatttaacattagatatacttagtaagttagtatgtgctgtttgtgaattattatgatatagtttggctttgtacacattaataaatcttttattttactgtcccaaaaaaaaaaaaaaaaaaaa

SEQ ID NO: 81761 - DNA, 333 bp, Oryza sativa
  Clone ID: PAT_MRT4530_81255C.1
gggggcaggccaaccggagaacgtgaaggcggcgcaggacgcagctggcgcctgccgcagcacaaggccaactcagctggcgcagctcaggcaagtacacccaagcgacaggcgaggccagccgaggccaaggagggcatgttgcagtcaagaactgacgtgctgactgaatgcacgatccacatgccacaatgcaagacaagtggaaccggctggctctgctgctacgtgactacagctactgctatactgctagtacctcgagggcactggtagccagtgtgtcgtgcacagttacaggttgagatcgatggacaaagttaaaactatact

SEQ ID NO: 81762 - DNA, 585 bp, Oryza sativa
  Clone ID: PAT_MRT4530_81256C.1
agggctagctaccacttcggcttgagggacgacgacaacgacgtcttctctgcaacatgcaaaaaaaatgtattagtctaaatgcaaagacatttcgctcgcgttcgttctcacacttttagttcaagtgcattcacgttcgttaacgtttcaatcacgttcgttcgcgtttcattcacgttcgttcgagttcgttcactaacactcacgttcgttcacgtttcggtcacgttcattcgcgttccactcacgttcgttcacgtttcggtcacgttcgttcgcgttcgttcacgttcgttcacgtttctttaacggttcgttcgcgttcgttaatcggcgtcgagagagagagacagagagctacatcgagatagagagagagggcgggggctctcacccaagagacgcggcggcggcgtctgcggcggaggcggcgaggaccgccaggcgacggtgagagacgacggcggcgtcggcgcggggttgccctaggcagtggcggcgaaggagaagccgatgctcgatctcgatggaaaaatgtctaagtgttggtggagaagacgagggcgcaccgggaatataata

SEQ ID NO: 81763 - DNA, 541 bp, Oryza sativa
  Clone ID: PAT_MRT4530_81257C.1
gcgacgcgttctgacaatttcacctctacgatcatcgactatcagcacctaaatatggccgctgccttctcatccacgcgcggagcttctgagtccactcgaaccagcttcctggggaagaagctgtatacgcacgtgccatcggcggcaatctaccaaggcaagaacttcaccatcaacatgttcacggtgatggccacggagctggtcgagggcaagcagaccgaccatgacaggtggaagggcatcgcctacgacatctacgatcaccagcaagacaccaccagggggatcgagcttgccaagctccttgcccaggctctcacggttgatggctcccacgaggccatcctcagctcctacgagtacctgagccaaggactaacaacgtacgactccgtcaacagcatgggaggctcctacatagcccctgctttcatggacaagctcgttgtccacattttcaagaacttcatgaacatacccagatggaaggccccactatccttggggtatcaggagaagacaaagggtcatagga

SEQ ID NO: 81764 - DNA, 912 bp, Oryza sativa
  Clone ID: PAT_MRT4530_81258C.1
atgaagaagttgtaccaggggaagggacggagggtgcacccggcgccggcgcagcaggcgcaggcggatgctgctgcggcggcagcggttgtgctgccggccgctgtgctggccctggcgtcggcgctcacggcggaggagcaggaggtgctcgcctacctgctgtctggaggtggggcggccgggggacgccgccgccgccgcggggctcacccgccggagatggggtgcgggtgcttcggctgctacaagagcttctgggcgcgttgggacgcgtcccccaaccgccacgtcatccaccgcatcatcgacgccgtggaggaggcagcggcggcggcggagctggcccgccgcgccgccctccccgccgccgccgcggcggcaaacgcggaggcggcgactgcgaggaggatgcaagaggacggcgactacgagggcgatggcgacgacgaggaggaggaggaagagggcgacagcatggacggcgatgcggacgacgagacgacgttgagcgagggcgattgcagcagcagcagcagcagcaacgccgagaagagcacggtggggaggctggtgcgcttcatcggggagaagattaggagaaggaagaagacgaccaagaaggtcaggtcaagcctgactgtcactgttatcgtagtactacagtacgagatgaaggacaggaagcaggttgctgacaatttatgggctctgcactgcacctctctctgtagagagatcaacaagctgcagcacggagaggcagaggcagaggccggttggaaaaagaaacgagacgtacaagaagaaatgctgcatttgatggctactactgatgttttcgatcggcagtttggcaggcgggcgctgctctgcgaagatgcaaaggcaaaaagaaaacgagagccatga

SEQ ID NO: 81765 - DNA, 125 bp, Oryza sativa
  Clone ID: PAT_MRT4530_81259C.1
gcacgaggggcggtggatgcccggcggtcaggccacgtacctcggtaaaccggtgccatggggcacgctgacgacgatcctggtcatcgagttcgtcgccatcggcttcgccgagcaccagcgca

SEQ ID NO: 81766 - DNA, 456 bp, Oryza sativa
  unsure (1)..(456): unsure at all n locations
  Clone ID: PAT_MRT4530_8125C.1
ctcggcgcatgcgtgcctcgccgtcctcgcgcgccgggngtggcnnagcggcgtcgggcctacccggcgacgctcggcgagtacttgccccgcgtggggaagggcggtgtctccggtaacccggtacccatcataacacaaaactgggggtgctgcggggggtgcnccnccnnccnnnnngccnncatggactcccgcangcgagccgccgcggcgagttccttggagccgtgcctgccgggagctcgccgccgtgccgatgcagtgccggtgcgacgcgctgagcgtgctggtgcgcggcgtggtcacggaggagggcgaccgcgtgtgcgggatgatctcccatttttctttccggggtgcgacgccgcgacgatcgcctggatggcgagcgcgctgacggactacggccggtgcnccctgcagcacacggccggttcctttgcctgcctcatg

SEQ ID NO: 81767 - DNA, 1198 bp, Oryza sativa
  Clone ID: PAT_MRT4530_81260C.1
tcatggctctcgttttctttttgcctttgcatcttcgcagagcagcgcccgcctgccaaactgccgatcgaaaacatcagtagtagccatcaaatgcagcatttcttcttgtacgtctcgtttctttttccaaccggcctctgcctctgcctctccgtgctgcagcttgttgatctctctacagagagaggtgcagtgcagagcccataaattgtcagcaacctgcttcctgtccttcatctcgtactgtagtactacgataacagtgacagtcaggcttgacctgaccttcttggtcgtcttcttccttctcctaatcttctccccgatgaagcgcaccagcctccccaccgtgctcttctcggcgttgctgctgctgctgctgctgcaatcgccctcgctcaacgtcgtctcgtcgtccgcatcgccgtccatgctgtcgccctcttcctcctcctcctcgtcgtcgccatcgccctcgtagtcgccgtcctcctcgccatcgaagccacaggcgtggtggtggtgttccacgctggcatccgcctccttggtggcacttgcatcctcctcgcagtcgccgcctccgcgtttgccgccgcggcggcggcggggagggcggcgcggcgggccagctccgccgccgccgccgccgccgctgccctcctccacggcgtcgatgatgcggtggatgacgtggcggttgggggacgcgtcccaacgcgcccagaagctcttgtagcagccgaagcacccgcaccccatctccggcgggtgagccccgcggcggcggcggcgtcccccggccgccccacctccagacagcaggtaggcgagcacctcctgctcctccgccgtgagcgccgacgccagggccagcacagcggccggcagcacaaccgctgccgccgcagcagcatccgcctgcgcctgctgcgccggcgccgggtgcaccctccgtcccttcccctggtacaacttcttcatcctcctcacccccaactactactactcactcgcacttacttcagccggagttcgccgggttaggtgcccaccaactgctcgaccaaaagccaacctcggggacgggttggtgcgggtaggtggcgggctcccgtcggctacgaccgttgctgttcgcagccgctgctggatggcgcccgccctcctccccctcctctctcctccgtcgtgc

SEQ ID NO: 81768 - DNA, 150 bp, Oryza sativa
  Clone ID: PAT_MRT4530_81261C.1
atggcgagcggggccataccgcggcgacgcgtcgtctctggcaagagggaggcggggcggagcgcggagcgcggtgagccgagcggagcacgggatgttggtgttgccagtgcaggttttggtgcctcaggggctttggctgatgtctaa

SEQ ID NO: 81769 - DNA, 743 bp, Oryza sativa
  unsure (1)..(743): unsure at all n locations
  Clone ID: PAT_MRT4530_81262C.1
ngctctctctgctataatttgccgtggagatcagggggttgggtactggaaggtgatgagagtactcaagttgatcgccggagcagcatcagcatcagcatcagcttcaccatgcggggatcagatcatcatcaggatgtcgtcgcggcaccgcggggcggtggcggtggaggagacgacgggcaggcgcacgacatggtgatgccggggttccggttccacccgacggaggaggagctcatcgagttctacctccggcgaaaggtggaggggaagcggttcaacatcgagctcatcgccttcgtcgacctctaccgctatgacccgtgggatcttcccgctctggcctcaattggggacaaggagtggttcttctatgtgccaagggaccgcaagtaccgaaacggcgatcggcccaaccgagtgacgccatcggggtactggaaggccacaggggcggataggatggtgaaggtggagggtgaccgtcctatcggcctcaagaagacgctcgtcttctacgtcggcaaggcgcccaaggggcttcgcagcagctggatcatgaacgagtatcgtctccctcatggcgacgctgaccgctaccaaaaggtagaaatttcgctgtgtcgagtctacaaacgcccaggaatcgaagacaactgtagtgcgatcgaatctcgatctacccgtcacttggccatttgcagattaattactagttctgcactactttaattgccctg

SEQ ID NO: 81770 - DNA, 634 bp, Oryza sativa
  unsure (1)..(634): unsure at all n locations
  Clone ID: PAT_MRT4530_81263C.1
atgcatatatgcatggtgtgtgtgtgcatgtactagcagctatagatcaagataggtgtgattgagagagataggtgttnggaatgcagtttgatccaagatctgcctatatatatggtgtgtatatcatatcttgtgatatgggggatatgcaacaagtgtgtgacaggggtgggtagatctcggatcaggcttcattcctcacaccaatactctctgttgatggacaagtaaggtatgcaccaggtatgaaagtgaaaccagcccttgggtagcccatgccatggtttgaggcatgggattcaatctttagtataagatctactttgctattgtgtaattgaaattccttgtctaagttataataggtcggtcgaggtcacggctcattccttacttcaaggcattgtttccatctataagaaaacctcatcacttctggggttttgaatcggtaaagtgttgctctaagataatatgaatcggtagtagcgtcgcctactatcactaccggttattgaaccgagtaatactgttagttctctttcgtttgggtgtgaaataaatgaaagcaaaccaataatgatgagacaaaattaatagtttttttaagtgcacgatcaaacaaagaagt

SEQ ID NO: 81771 - DNA, 511 bp, Oryza sativa
  Clone ID: PAT_MRT4530_81264C.1
ccggcccgggatccttcacacaattcaaacattatagttgaagcatagtagtagaatcctacaaaaatgaagatcattttcgtatttgctctccttgctattgttgcatgcaacgcttctgcacggcttgatgctcttagccaaaggtatagacaatatcaactacaatcgcatctactgctacagcaagtgctcagcccacgcagggagttggcaaggccacctcatgcactagaggcaccccgggtgaggaccaccagataccgtaaaaccactaaaaaacgaccctcatcagcccattctctccttccagatacttggccaacagatctttcccacctccataacctttctaaccatccaaagacactctgcgcaccaacgttatgcagccgaacattaactacattggcagtatttgcctggacatcctcctggaacagatcagtcctgcactcaccacatcaaaggccctcccgtcaatttgttcactgctgaccgacccgaaccc

SEQ ID NO: 81772 - DNA, 305 bp, Oryza sativa
  unsure (1)..(305): unsure at all n locations
  Clone ID: PAT_MRT4530_81265C.1
ctgaatgcaagcaaggccaattcaatttcaagctcgccnnccatacagtgncagaggacatatacggggggtaaaacaaaaacaaaaaggaaatcatacacaacattgattcattcatccattctcttagaggagnncgcttagagaggcagaagaaaaaagaatacccacgtggcatgcatgcatatatatggtacggtgggcgagagagaanacgacnagcctagcaagcttggatgtttgacgatctcataataaattaatttgaaagggtcaatgagagcccttcttctctcgccgatgag

SEQ ID NO: 81773 - DNA, 268 bp, Oryza sativa
  Clone ID: PAT_MRT4530_81266C.1
atcccgaattccacccacgcctccggcggacagcaagatgagttgcatcacatttcccctgtactctctacttttcgtatgcctaatgaatgaattatgaatggctcaaaaaaaaaaaaaaaaaaaaaaaacaattacaattattttcaaataaaaaaaaaaataaataaaaaaaaaaaaaaaaaattctattactaatccccttactataaaaaaattaaaaatttttataatatgggccccccccttttaaagtttcaaattttat

SEQ ID NO: 81774 - DNA, 1896 bp, Oryza sativa
  Clone ID: PAT_MRT4530_81267C.1
atggtgcaatggtgggaggagtggcagctccgcgtgctcgctctcaccagcctcttcctccagctcttcctcctcgtctcggccacgttccgcaagtaccgcgtcccggcgctcctccggtcatgcatctggctggcctacctcggcggcgacgcgctggcgatctacgccctcgccaccgtcttcaaccggcacaggcaaacggccagcacagatcatggctccgtgctggaggtgatgtgggtgcccgtcttcctcgtccacctcggcggccaggacagcataaccgcgtacaacatcgaggacaacgagctgtgggcgcggcacgccgtggccatgtcgtccgaggcggcggtggccgtctacgtgttctggaggtcatggtccggcggccaggtgccggagagctccccggcgctgttgctgttcgccgctgggttcctcaagctaggcgagcggctgtgggctctccggcgagccagctttaccaggctagccgccgtgaggtcctccgccgccggccggaggacgccggcgagggaggaggaggaggacgccggcgatgatcatattccgttagagagctatgtacacctagcaagcggctacgtacagagccaggctactggtgaccatgtccctaggcccaaagacaattacgtgttccatgtccatccgctgatcgaacccgagctccaagatgtgctcatggagctcttcgtcgacttccctgcaccctatcctcgccgccttgcctacctcaggtcgttcttggcgcttgaggacgacgacgcctacgaggagctctgcgccctgctaaatcaggcgttccagttcttctacaccaagaaagaggccgcgtacaccgtcgtcggcatctaccttcgcacccttcaccatgctcctgggcatcgcggccattgcaagcttcaacgacagtcgcaaggacggatctgcgccctgctgtggctagccgattggcgattcgtcacgtcgcggatccagccggagatgcagcgcacggttgcgcagttcaacctaatcggcttcgccactcgtagacggtggccaaccatggtggtgatgcggatagcggcgttgttcagatgcaaaaagtatgtcaaccagcactggtatcttgggcatctttcgtcaacccccataatcatagagttcatcggcaaagacttgaaatctagatgggtggatgatctaaccaacgccgccgcctaccggagattcaatgaccggagaggccagtggactctccggcgagagaggtgctaccaagagttgggatggagcgtgaccgagctgccgtttgacgaggccgtccttgtctggcacatcgccacggacatctacctcgattgcaataatggcatcgaaaatccaccggctaccgccgatgagcgcgccgccgtgaaatgctcgcgtgagatatccaactacatgatgtacctgctcttgttccaaccggacatgctaatgcccggcacccgacagagcctgtttgctgtggcctgtcgcgaaatcaagcacgcgttgagggaccagaggcagcggctcgatgagaggggagttgcacgttggatttctgaaaacccaaatgctgcacaacctggagaccatctcgcagctgcacgtaggcttgccgaagcgatgatgcagatgaacgatgcaggaaggatgttgaaggttatcagtggggtgtgggtggagatgatatgctactccgcgagcagatgcaggggattcctgcacgccaagagcttgggtgccggcggggagttcctcactgtcgtctggctcctactacatagaatgggcatggaggtcttggccgacaagctccagaagccggagattcctcgacatgtacaaattcttccttag

SEQ ID NO: 81775 - DNA, 573 bp, Oryza sativa
  Clone ID: PAT_MRT4530_81268C.1
atggccgaggacgagctcctcctccccttgccaccgcctactgcgtcgcccccacccctcagccaccgcccgcctctgtcctcgacgtcccaagcgtccttcgccaccacccgtcgccatccgttccacgcgcgccaccgcctctccgccatggccaccgccgccagtgcccgagcatcgtcctccactcctccgtcgccatccttgtccacgtcaccctcatcccctgttgtcgccgccgctgctctgtcccccgcctaccacccgagctcggccttgttgcggtgcgtggagcacacaatggggcaaaaggccgagaagcccgacatccacactcatccaccaccgtcgggcccccggcaaggcggcaacaaccctttttatccgcgccgcgccgcgccgcatgcacgcccgttgctatccgcgtctgcggatgttgccgccgccggcctcaccctctctcaccccatcggccacctctttcgtgccgaattgtcgcggtctacctcgtgcctgcccggggcgctgtccggcgtgtccgcgcgcgctttccccgcctcaaagtctcaataa

SEQ ID NO: 81776 - DNA, 1136 bp, Oryza sativa
  unsure (1)..(1136): unsure at all n locations
  Clone ID: PAT_MRT4530_81269C.1
cggacgcntggncggacgcgtgggcggacgcgtgggcttttgtttgtatgggattttagtggggtgtggattttgacggtcgaaccgagcttaggtgatttttgcgggtggagttttttaagtttttggatttcctgtttcgcatctgacggttcggctgttcgattggttggttttgaatcggattttggaaatttttggacgaatttgggcggaaagggagtgtttttgtgagggcttttggtcagtttgagtgaactttcctaattggagcccgattttgtggccgtagagctgcctttgaaaaggcgacgcctttactttgctcctctagtctagtgattgtgccaaagataaaaaaaaagtaaccttcgttttgatgatccaatttgtgagaagattttgaggatttttttttcgaggtggttttgtttgcctctagtgtttatttctttcctctctctttcacttggcagatccaagaaacaccgaaattttgcttgattttgccgcggattttttacttttttaatctgatctgatccgagagaatccaaagaattttttgatccaagaaaaagagaagagaagggaatttcttgctgtgtgcgggcgccatggccatggggctgaaccgattcacccaatggctgtggccggcgagcacggcgcgcgcggcggcggcggcggcgacgacgcacgagctccccaccaccgccgccggcctgacgagcgcctccttcccggacttcccttccgggttccgggagccggacaccgtcacgttcgcggcgaccacgcgccgccgcggcggccgccgcagccgccgcgaggaggacagagtggacagggagttcgacatggtgatcgtggcgtcggacgacggcggcggcggcgggtggctgtccgggtcggagtcggacgactccgactgggccatcgggtggcaggagaagctctcgccggagctgcagaccgacggcgaccccgacggctgcttcgccgtcctcgtccggtgctaccgccacggccagcccgagccggcggggaggcccgacggcggcgcccacttcctcgccaccgccgcctccctcgccaacggcggcggcctctccgatgggaggaattttgtgtaa

SEQ ID NO: 81777 - DNA, 204 bp, Oryza sativa
  Clone ID: PAT_MRT4530_8126C.1
atgggctgcgtcgacttcgatctccgacgaatggttcgtgccaacaaagatccgacaccattgggtccgtgccagcaaagatccgataccattggccgagtgcggaattttcgtcaacatcagcatgttttaggtacgaaccatgagcgaattatcaaaccacatttgctaatttcccctggacatagccataaggagataatc

SEQ ID NO: 81778 - DNA, 394 bp, Oryza sativa
  Clone ID: PAT_MRT4530_81270C.1
gtgaccccaccacaacaaccactacaacagctacatgaacttcatgcaccagaacgaggaggcaaactactttatatccggatactatcctggcaagcacgccccacgatacaacattcccttcggcacgctcaccaaccggcacaagaaggttgagagtgccaacgagaacaacttcaagcaaacaggagagaggttccgatcatgggatccggcaaggatagacccggtcatcaagaagagaggatcgacacactgtgtgaccctgctctgacccacgagatcagaagcatatggctctcctactggtctgaggctcacaggtatctgggtcagaaactgtctagccgactaagctctaagcctagcatgtaaggagatcgagcagcgcatc

SEQ ID NO: 81779 - DNA, 438 bp, Oryza sativa
  Clone ID: PAT_MRT4530_81271C.1
atggccgtcgccgtcgcgaagaagcccttgcgcgcattggctgggctctcgctcatgtcatgcctcctctcgacgacgacgacggagacggcgatctctctagatgggagggcgccgccggcctcccggtccccgtcctctcggcgtctgcgccagctcggccgccacgcccgcccgccgccgcggctcctgccgggcgccgctgctaccgcccggcttgccgccaggcccgcccgcccggccgccgccacggctcccgcccggcttgccgccgcgcccgcccgcccggccaccgccgccgctcgcgtcgggcgccgccgctcctgcctggtgccgccgctaccgcccggccggccgccgctccagatcgaggggaaggggaggaacggcaggggaagtggagaggaaggggatgaaggggagaggaagagggggtga

SEQ ID NO: 81780 - DNA, 254 bp, Oryza sativa
  Clone ID: PAT_MRT4530_81272C.1
tccgcattgaggtgatccgcagcccaaccccagccattcccgggctaaccgaacaaggcctaagggagatgtcaatttttgcattcaattggaaggggaaacaagcgggaaggcagatcgaatcggtggcagcgctagggttcctcaagcagaagaggattgacaggcttggtgggctagccggggcatggccgtgtgaggaggagggaggcctcggccttcacctagaccaagcaagggagaggggcgcatga

SEQ ID NO: 81781 - DNA, 870 bp, Oryza sativa
  Clone ID: PAT_MRT4530_81273C.1
ggagagcagtcgccgcagtagggcttacgtcgccgccgacgagctccatggcgaggggaaagttcaagggcaagcccaccggggagcggagcttctccagcgaggagcagatcgctgccggtacttcagcaggtcgtccaaagaactttaagaagaagcaatctgaaaaggaggtatatgatagaaggcaagaatcagatgaggaatatgatagaagccaagaatcagatgaggaagaatctgacaacttccagaagaacaaacataaaggcactgaaggtcttatcgagattgagaatccaaacctggtgaaaccaaagaatataaaagccaaggacattgatattggtaggacatctgatctctccaggcgtgaaagagaggagcttgaaaaacagaaatctcatgagcgtcacatgaagctccaggagcaagggaaaactgaacaggctaggaaagatttagagcgtcttactttgatacgccaacagagggcggaagctgcaaagaagcgtgaagaggaaaaggctgccaaggacgagaggaaggctgaggcgcgcaagtgacctgccaagctattggaacaagaaagaattttgacccgagctgtgatagctcaacgttaccttcctatgcttctgaattctgatatcacttgaactcccctatatttatttaccgtaggaatagtatgcagtagttatgtaaagtggttgtggtcgaccgccacgggtagatgcgacttttgagcttggagaggtagtaggaacttggtggtagcaactttggtgaacaattgtctactatttgtcctcatgccgcggtattttcgttatggtattttagactgttaatgatcaatctttcgat

SEQ ID NO: 81782 - DNA, 2119 bp, Oryza sativa
  Clone ID: PAT_MRT4530_81274C.1
caaggagctttggctggtccaagctacattgtaaggccagccgcaagcgcaagcataaggaatagcttcatccttcacccgacctttacccaagtctttcgccacaatgtcagcaagttccgacaacaagcattggaaaagatgttgcctttgagttgggggttgcgaaatcacccaattccaccacatttcgagtattaaactataacaagatattcgggcaaatcagaaccaagcgagatcttgccgttccacaagtcaacgatccaaacagtccacggggacgagaacaccaaggtgaaggtcgcacatcttgtcctagacagcttcgcccgatcgtggtatttcaacattcacccaagcaacatttactcatgggagcagttgcgggatgtcttcgtaatgaaatttcatgggacgtatgaagaacccaagacccaacaagacctgttcggaattcgacaaaaacctagcgaatccacaagggagtatatgcgaagattttcgcaagcaagatgccaagtccaagacatcacagaagtttcagtcataaatgccgttcggcagggcttcgaccaagctaacggacgtggaaaatcactgggagaaaccccaaaccatcggccacctttttcatatcattgacaggtacacgcgaggcgaataggatacgaagtgccaggtcgaaatataagcccagtatgacaaagctgtagttcaggccaaagcggtccaacaagaagcaagcggaagtcaaccaaggccggcttaggtcccaatggcatggcaaaaattttgaacagacaagtcaagcctataacaactatcgaagaagtcgagaaccttcaaaaaaaacttcaatgccaaaacaagtcatcacatgggggaaccccgagggccacatgtcgaagtgccagcagaacgtacataaccatgggctccagggggagcggagaaccggaataccaggcatccaaaatatccttcgacccagctgatgcggagggagtacacttcccacatcaagatccccttgttatttcggccgtagtagctggatgcgaggtgcgtcatatattggtggatggaagaagctcaatggacatcatcttcttcaacgcttacatgaaaatggaccagcctacgctagcactttcgcaagctaccgcccctctccaaggtttcgatggcatatctctgtaggcattgggtcaggtccaacttagggtgtccttcagccctgaagaaaacaagcgcaagtaactcatcatgtttaacatggtggacatcccgtaccactacaatgcgatcttcagcagggccacgctcaacaagttcgacatagttgtccaccacaactatctccattggttacgaggcaggcaaagaagagaagcgaagcatcatgcgtgtaatcatgaacaatctcgatatcttcgtcttgagccctgacaaagtgggcggtgtttcgcccgacatcatcctacaacatttggcggtcaagcccgatgcaagaccccaaaaatagaacgttcgcaagatgtcagtagatagatcgccaagaagcagctaaaactaaagtctacaagttactcatggttggagtaatacggaaattgaccatccgagtgctcggcaaatccagcactagtaaaaaaggcaaatgacaaatggcgaatgtgtgtcaacttcaccgacttgaacaaggcttgcccaaatgacgacttcttacttccacggattgaccagccgatagattcaatagctgggtgtgaactcatgagtttcctagccgcatactccgattaccaccatatattcatgatgctcgaaaattgggcgaagaccgcattcattacacccttcggcaccgtctgctatgttagaattcccttcggcctaaggaacgtaggagcaaacctttgtccgattggtttacaaggttctcaagaggcagatcgggcaaaacatttattcttatgtcgatgacatcgtcgtcaagagtcagaaggtgaacgatcacgccgccaatctataggagaccatcgacaacccgagggtggccggaatcaagttaaaccccgaaaaatgcgttttcgcacccctgccactatccaga

SEQ ID NO: 81783 - DNA, 249 bp, Oryza sativa
  Clone ID: PAT_MRT4530_81275C.1
atggagatagttgtggtggacaactatgtcgaacttgttgagcgtggccctgctgaagatcgcattgtagtggtacgggatgtccaccatgttaaacatgatgagttacttgcgcttgttttcttcagggctgaaggacaccctaagttggacctgacccaatgcctacagagatatgccatcgaaaccttggagaggggcgagggattagccttctcggtgaggttaacctggtttcggcatggttga

SEQ ID NO: 81784 - DNA, 448 bp, Oryza sativa
  Clone ID: PAT_MRT4530_81276C.1
gctggatctcgagggccgctttttttttttttttttttggaactagggcttggagcccccatttccattaagagaaatgataaaaggtctctacaggaagccattacagcaaaagaaaaaaaaggatggaactagattgagacagaagctattcagaatagcctagggaaaccaccttttaccggaagtaacagtttttaaaagaaacagaagaactgctgacagattgataaacaaatcactacggtagaaaggtactgctagatcaactttagtctttgaagcagggacatcaacaactcctccttcttcacatcttcagtcttctggcacctggtctccagctgtgtcttgaactaaagacctcacttgccatctgctttatgagtctggctcccagtaccaatcttcttcgatttgcttccaactttttgtaaaacccggccgg

SEQ ID NO: 81785 - DNA, 1395 bp, Oryza sativa
  Clone ID: PAT_MRT4530_81277C.1
atgtcgacgaagcaatcggcggaatggatgagggagaggaccaacaaattgaaagaggaggtatgcacactatttacaccctctaaggacatgttaagaaggatgtacttagtggatgaaatagtgcatctgggaatcgatcacctctttgaaaaagagattgaaactgcactaaaagacatccatgaaagcgaattcgctagctctaacctccacgaggttgctcttcggtttcgtttgctcagggagcgtggtttttgggtatctccagatgtattccagaaattcaagggagatgatgaattcgaggaaactatttcttttgcaaggaaccatctcgaatcaatgatttgggatagtgttttgaagggccctttagctgatcaagtgaagcatgcgattcgcttgccactgccaaggactctcaagagagtggaaatgttacattatatgtttgagtatgaccaagacaatgggcacaatccggttcttcttgaactagcaaagttggatttcaacctcctgcaacatgttcacttgaaagagcttaaggaaatttctaggtggtggaaagatgtttctggatatatgggtctaaaccacatccgagaccgtgtgatcgagtgctacacctggtcctacgcagtgtaccatgaggaagaattgtcgtttgcacggatgctctttgctaagatagttgtgataattaccctattagatgacacatatgatgtctatgcgtttacctccatcgaggagtgccggacactaaacgcagccattcaaggatgggatgacagcgctgtctcccttgtaccagaatacctgagaaagttttatgaaataatgttgagcacctttagggagtttgaggatcaaatgctaagcaataagaggtacctagttgctttcaacaaggcagagttccaaaagttgtctagttattatctggaggcagcggaatggtcccaccggaattacaagccaagcttcagtgagcaggtggctctcgcgaccgagaccacaggcgcgcgattactagctgcgggtgtaatgctcggcatgagcgatgcagcaacaacaagagaggctttcgactcgatcgggtcgcagaacaaagccgatatgccatgcgcggtggagacttacatcaacgagcacaaggtcacggtcgacgttgccatcgccaagataaatgagctggtggaagatgagtggaaaacaactaaccgggctcggatcgacaaccaggctgttcttccagtggcgcagcgccttatcaacttaacgatggccatcccgatgttctacggctatgacagtgatgctttcactttcggcgagcaacttcgggagattcttgagaatctctatgtcaagcccatgcccatatag

SEQ ID NO: 81786 - DNA, 197 bp, Oryza sativa
  Clone ID: PAT_MRT4530_81278C.1
atgctgtccattccctccatatttaaacgcaccccccgacgtggtacacacatgacactgacggtgggcccatacctaaccgccgcagaactggggcccacccggcagtcacccccgtccaaggtcattcatttggaccccaactcccaaagggtggaactcaagtttccttccaagttccaagaagcagcacaaag

SEQ ID NO: 81787 - DNA, 152 bp, Oryza sativa
  Clone ID: PAT_MRT4530_81279C.1
atggctggcaggccgggcaaaacgcagaccactggaagcctgacgactacaactaacaggacaagcccaactctaggaaacaactcgactacgttcgggaggcaagctaggcagggggatcctctagagtcgacctgcaggcatcacactga

SEQ ID NO: 81788 - DNA, 1195 bp, Oryza sativa
  Clone ID: PAT_MRT4530_8127C.1
cgcgaactaatggcctagggccattaactacggaacggtaatgtaaaaaaggaaaccaaaaggggaaggttgaagttaagtcaccgggtacccccacccccgcttaggcccgtcagggggtccattccaataattggcaatttggaaggagcccccccgcctttcctatgcgccctccccaggggcacttctcggggcgcgccttgcgttcccacggctcccggtccctcggctttaagccggccctgggcgccggccccctcgcaccgggcccgagcgccgccggccccccctcggggttgggtccggccccgatcagaacagacttaaaactaagtctagcttgtttgtttgcttatttatttattcattcattattaatcacatctcggacggcctggtaccgattattacttcaaaaattcaaataataaatacaacaacccacaatagcttgaatacagacaatgagtataaacacagacaagaccaagcagtctataagaagaaattaacacttggaatagaatacaatggtgaaccgtgtcttgttcttccaaaaccctctaatccgctcgagattggcccgcacgagacgagaggatgataccaacaatcaggccatacagagcaagagcttctgcaaagataaggatgaggatcatgcccacgaacaactttggctgctgcgcattggccctgactccggcgtcgccgacgatgccgatggccatgccggcggcgagaccggcgaggccgcaggcgagaccggaggagaggtgggcgtaaccgtcgaagaggaagtagggcttggccttggggttgatgccggtggagatgatgacggcgatgatgaggccgtagataccgagcactccggccatgacgacggggacgatggacttcatcaccagttccgggcgcatcacccccatggacgccacgcccacgccgctcttggcggtgccgtaggcggcgcccatgcaggagaatacgagggcggaggcggcgccgaggaagccgaagaaaggggcggtctcatcgccgctgaaggtggaggaggacatggtggtcgctcgccgtcgtcggtgagggtgggatctctctcgccggccgccggaggccggaggagtcagagattggtattggtgccgtatctcgttcccggccgggtgggtcgacccgggaattccgg

SEQ ID NO: 81789 - DNA, 273 bp, Oryza sativa
  Clone ID: PAT_MRT4530_81280C.1
atgccgaaggggcccggcactgcaaagagggcgctgacgaggatggaagggtggcggtggtcgggggtcgggggacggagaaaggaggaggagagaagacgacgagctccccgcctccccggcggcgtcgagaactcctggggcgccggcgccggcgccgccaatgacacggccgacgacgaggaggatgtttggtttaatccacatgccacccaattcaagcgcctgagcctgagcaaccacgcctgtgtccagcaccttctcaggacttga

SEQ ID NO: 81790 - DNA, 224 bp, Oryza sativa
  Clone ID: PAT_MRT4530_81281C.1
atgggctatataggccgcaccgattgtgcaggcagcattctagtccgtttcgtactccgccccgaacccttctccgactccaactccggctccggctcgccgtcggtcggccacccattaaaaccctcgcgcgccgccgccggagtccggaccacgcacgcacgcagctccgcgaaaagcacacgccgagcgatggcgtcgccgtccgccgcgcccaatccacg

SEQ ID NO: 81791 - DNA, 1238 bp, Oryza sativa
  unsure (1)..(1238): unsure at all n locations
  Clone ID: PAT_MRT4530_81282C.1
tcatccctctcccaccgtcatgtgggccccacacgggatcgggccccaccctccagtgggacacacgcgcacgccaacccggtagtagtaggtcggcggcacgcgtggtgcgaggggccagagctgacgtggatcccttccccccaccacgcggggtgcggctagtggacagtataaaggtgtcccgtgttttggatcccttccttctcccactcccacacctcttggcctcgtctcgtctcggaccacatcgagcgagccgccgagccggactcctcctcgaatcgaatcgaaacgcccccgatttgaagcagcaaaaagatatccgaaatcgaatcgagtcgagtactcgagtgacgccttcgcctcgggtgtccaggaatagctcgagcttccgccacgccacgcgcgagggaaggagcgggtcgcgcgggggagggggggcatgggatcggaggggcggagctggagcggggcggcggcggtggggggcggcgtggaaggggaggcggcgatcgcgcggccggtggcgcctgcgccgggggacgtgccggcgtcgggcgcgtccgtggacatagcgctgccgctcccggagatgacgccccgcatcataggtatctgcaaggaattggtgagggggtggtcatcgctggacagctcgcgcttctcgatcgagacggtgtctggcggcatcacgaatatgttgctgaaggtgtccgcagaagatggcaagggtaacaagtcttctgtgacagttcgtttgtatggcccaaatacagacttggtgattgatcggaagagggaattgcaggctataccacatctctcagctgcagggtttggggctcagctacttggaacatttgaaaatggaatggtccagtcattcatctatgcacgaacattaactccttcagacatgaaggaacctagaatagcagctgagattgccaaagagattcgcagattccatcaagttgatataccaggatcaaaagaaccacagctatgggatgatatattcaagttcatgaaaaaagcttcgatattggagtttgaggataaggagaagcagaagagatatgaaacaatctcttttagaaaaatacaagatgaagttaaagaacttaagggatctgtcagaccttctgcatgctcctgtagnttntttcacacaatgacttgcttttcaggcatttgatgttgaatgatttggaaagaaagctctacttcattga

SEQ ID NO: 81792 - DNA, 1104 bp, Oryza sativa
  Clone ID: PAT_MRT4530_81283C.1
atgttcgcgcgattgtgcagaggtatctgcaaggaattggtgagggggtggtcatcgctggacagctcgcgcttctcgatcgagacggtgtctggcggcatcacgaatatgtgtgagtccctgctccttggcagtttcatggcttgtcgcgttgtcctgaatttttttttcttcttcctgtttcacctgagcaactcgttaaaattatataaccttctgtcactgaaaatactaccaatttaccaaaaacttagtggaaaccacaactgtaatttactgcttgcagtgctgaaggtgtccgcagaagatggcaagggtaacaagtcttctgtgacagttcgtttgtatggcccaaatacagacttggtgattgatcggaagagggaattgcaggctataccacatctctcagctgcagggtttggggctcagctacttggaacatttgaaaatggaatggtccagtcattcatctatgcacgaacattaactccttcagacatgaaggaacctagaatagcagctgagattgccaaagagattcgcagattccatcaagttgatataccaggatcaaaagaaccacagctatgggatgatatattcaagttcatgaaaaaagcttcgatattggagtttgaggataaggagaagcagaagagatatgaaacaatctcttttagaaaaatacaagatgaagttaaagaacttaagctctacttcattgatttcgagtatgggtcgtacagctaccgtggttatgatattgcaaaccatttcaatgaatatgcaggctatgattgcgactatagcttgtatccagataaaaattctcaataccacttcttcaggaactatcttcaacctgataggccaagtgaggtccaactgcaagatctggatgccctttatgtggaaacaaacacctatagattagcatcacacatttactgggcgttgtgggctcttattcaggcaaaggtatcccccattgatttcgactatcttggatacttttttctacggtacgacgaatacaagaaacagagggagtcatgcctctccttggcagaaagctccctctccgcattgaaaaatggctag

SEQ ID NO: 81793 - DNA, 1575 bp, Oryza sativa
  Clone ID: PAT_MRT4530_81284C.1
atggagatcccgaacgacctgctgatctgcgaggtgttgacgaggctgcccgtgaaatccctcctgcggttcaggtcggtgtgccgttcgtggcgcgacgccgtggcggaccccgccttcgtgcgccgccacctcgagctctcccgcgccgcgacgccgccgtcgacgacggtgctcgccgtccacacgcgcatggaccatgacccagacgacagagcggcgcccgaggacgtggtcagcttccaccgtgtccgtccaggacagtctcctgccgccgccgccgccgccatcgtcgagctgatgcacgaggaggctatggagtgcgccggcatccacctgttcgcctcgcactgcgacggcctcgtcgccgtcgcggctacacgcggggaagatcttcgtgtgcaaccccgccaccaaggagttcttcctcctgccgccgggagccgcaacggcccgagcaaggagacggcggctctcggcttcgacccctgcaccggcaggtacgtcgtcgccagatgcttcttccggcgcgacgtatactaccgcgacgaggacaccggcgtgctgcagtatctggagtacgacattaacgacatcgtccaccaggtgttcgtccttggcccctccggctccggcgactgggaggccaccgtgacgccgccgtgcatcatctacacaaacctgccggcggcctgcgcgggcggcgcgttctactgggtcgcccacgacaagtccgacgggacgttcgccgtggagtgccccaactgccttgtccggttcgccatgaacgacgggacgttcaccattgtcccgctcccccagggtgtcaccttcatggacgtcgacttcgactccatatccgagcttggtggcgagctgtgctacacccagagaacctcggggacggcttacaacatctggacgctgcagctgccgggggacgaggaggaggagggccaccggtggtcgctgcggtggcgcgtcgacttccgccgccgggtcggcgtcgtcctgccgctcgccgtgtcagacgacggcggcacgctgaccgtgtacgagcacagggtggggatccaccggctcgacggcggccgggagagccacccggagaaggtggtggacatggctgccgtgacgcggggtcttgtcggccaatggatcgctggctatggttgtgctcggcaatgtggcggatcaggcgatcatgatcgcgagcaatgcgacggtggtggtgctgctcatgatcgcatgcagtgtggcgacggcgactattactgcgagcgatgcggcggcgacggcgattattgtgagcgatgtggcgccgacgacgaggatgattgggagcaatgtggtggtgacgatggtgatggcgatggcgatggcgatggagtcggggagccattgggtttgggccaaggtgaccatggagatcatgacggtgacgaatatgacgacggatacgattatgatggtgaggaggaatattggtacctacaaggtggcagatacaaaccattgcgacctgccctgcgaagtcttttcgcttacgtgccaagtctggtgaagatagactag

SEQ ID NO: 81794 - DNA, 417 bp, Oryza sativa
  Clone ID: PAT_MRT4530_81285C.1
atgacgaatggtggcctgaggtggcgaatatggcaacggcctcaggttgatggtggaagaggttgcttcggtggtgttttgaggaagtgcggtggctgccttggtgcggcacggcacggcgaagccggtcatggtggttgcgaggcgcggcgacgactaggacggtggtggcgcgcggctggtgtcacggtggtggcagtggcacgggtttgcggtggaggcgtggtttcggtgggatttcgtgcaagggaactggtggccgagattcgcacaatggctgtagtgccgtggaaggcgacgccagccgcgcccgccgccgccttctccgcgccgtccccagcctcgcccaccgccgtcgttgtcagcgccgtccccagccgcgcccgccgccgccgtccgtgccgtcgggagtgctaa

SEQ ID NO: 81795 - DNA, 645 bp, Oryza sativa
  Clone ID: PAT_MRT4530_81286C.1
atgcggcgaagcatgtgggcgaagatcaagggcctggctccgagcttcgcagttcgaaagaccacatgggcaaagggtatatggcgaagggcatttagcgaagcatatggacatcacccaagacgggccctgggcggagaaggcccaatgggccactatgcgcccgggggccctttcgccatggctaggccaagcttgacccacctgtcagtgccctgcccgaagctagaggcctgctgggccggcctaagttcggctgaactgccgaaccctaatggcgacggctcagcttggccctccactgactactgtgacgacatgggtatcaagctctgcttcacctcacccgcccaccccaagagcaacgttcaagcggagcgtgccaacacggaaatcctcaatggcctcaagacgaaaacttacaacgtcctcaagaagctcggggactcatcgatcttggagctgccggcaatcagcttcgacacgacgacctcaactaccataaagagcgaaggcaacgtgcagcccttcgggctacccgttaccaacaaagcctgcggcgctaccatcagtgcaacgtccgggcctggtcactgcaagtcaaagaactcgtcttgtgccacgtcccaacgcgtgcaagattga

SEQ ID NO: 81796 - DNA, 345 bp, Oryza sativa
  Clone ID: PAT_MRT4530_81287C.1
aaacaaaaaagcaggggacttttttcccaactcatgcatttgacgaaaagtactgtttatggttctgccccaaccaaaaaactaaaaacaggggattcccccccataaacaacaaaaagagaaaaactcccccgcccacaaaagcctaccaaacaaaaaggggagttttaacttgagagctttgtcttccccttggatcgctaaaaaaaaaactgagctttttttttttgcctacaaactttttttataaacaacgctaaaagggggggggaagggggtccccccaacccactgtttgttggttgtttgcaaccaacgaacaaagaaaagctgcctttaccgggg

SEQ ID NO: 81797 - DNA, 459 bp, Oryza sativa
  Clone ID: PAT_MRT4530_81288C.1
atgcctattcttgagcctatcacatggctatcccttgtcctccccatatctggcggctgcttcatcatcggctcatcgtcgagggtagctaatgctagggagaacccatcacttgctcgcccgctcagatgggggaacaatattactagaaagtggtcgaggtatgactacgactggtcctcgaccagcagcgtagcggtcctcgtaccacgacttccaatggacgaggggacaccaagagcggataaggatttgttagatgctgagagccagacgaccatgtcagatctggtcatagataagcctagacaaacccaatatggtgtctgcggaggccaagaagagggatctagcactacctctgatctcaccgagtgcggattcgaggaggaagactacccagttgtcgactacatgcgggccataagtggctctgcctggaaccaggcgaatgctggg

SEQ ID NO: 81798 - DNA, 428 bp, Oryza sativa
  Clone ID: PAT_MRT4530_81289C.1
ctgaacctagctataataatattatctacttaatttgcagctagcaatatataattcacaattttcacacagcaatgatatatatctcctacctaactaattacaaactaggtagctagatgttcatcgattcttttgtctgtatagacaccacatgctactatgctagcatgaaattaacaaacaaataatactggagtaattgagagatgacgaagtaattaattaacaagacgcctagctagctagctcgctagcgcttggaatggcctcgacctgtgcgccggcgccgaggtcgacgaggaggatggcttggtgttctgctgcagcaggcgcagctgcggcagcacgtcgtcgggcatggcggggcggagcttggggtcgtggtggaggcagcggagcgcgagcgccgccatgtcctgcgcctg

SEQ ID NO: 81799 - DNA, 1465 bp, Oryza sativa
  Clone ID: PAT_MRT4530_8128C.1
atgcatccctccggtgagtactccccttactaccagccctacccctcgcccacctccgcgccgctcgccacctacccctccgcctccgcgccgccctacacgccgtaccccgccaccgactacgccgcccccgccgcgtaccccacctacccgccgccgcccgccgatcccccccagtacgcgcctcccccggccgcgccgcagccgcagccgtactacccctacgagccgcccccgcacaacccggctccctcgccttacccgtcgctagatcgggccggaagctacacctacgtaccccgatcccaggacctgtacccgcgcaagcctcccgggggcgggtcgtggaaagacggggtgtacgcgtttagcggcggcgagggcgagccgccggagccgtacggcgcgagggacaccacgacgaggtcgaattcccccctgtttggtgactatggaaggacgactggttcgacgaggaagacagctggggctggtggtggcggtggaggcagttcggcgagccccaaggtggtgcgggcagtgcccaaggtggagacgtcggaggacacgagtggtggtgtgcagaagttccgggtgaagctgctgccggagggcgcgggcagccccatggatgtgctctgccaggttggtttggatgggattcggatgcttgatcccaatactagtaggacattgagaatatacccccttgaaactgtaactagatgggatgtattagattcttctatctttgccttttggtctaagagctcagttgattttgaagcaagaagaataaggctgaagtcaaacagctatacaaccaacaccattcttgacactgtgacagccgcgagtgtgcagttcaaggaaatgggcggaagtagcatttcgagaagtagagcaattgctgatgctgccaaacctcctgaacaacaaaatgataggaggaaaaatttccttgattggaggaacttaatgaagcccatgaacgaggagaaagaccactgggtcccagatgaagccgtcactaaatgcacagcatgtacagcagatttcagtgctttcaatcgcaggcatcactgtcgaaattgtggtgatattttctgcgacaagtgcacccagggaagaactcctttaactactgatgctgatgctcaaccagtgcgagtttgtgacagatgcatggatgcaatggatataaataagaagtcatcttcagcctcgtcaaggtctacggatggttctagcaggcgaatgagggaggttgcatgccccacctgcacagtccaccttcaggtgcaagtcccaacatctggttcagagaccatagaatgtggtgtctgccagcaacctttcctcgtcagtgctcgatgatgaggaaactggttaaaccccgcctcaccgcgccgggatataaaccgatagactcgggataacccagctgtacaacacataaaccaat

SEQ ID NO: 81800 - DNA, 1343 bp, Oryza sativa
  Clone ID: PAT_MRT4530_81290C.1
cccgcggcgtcgccacggaagcgcagcatagacagaggcagcagcagcagcagcagcagcgttggtggtggtggtgtgtcatcaccaacattttcacgagaggagaaggatggaaatggcggcggcggttgggggcagcgggaggagggacgcggaggcggagctgaacctgccgccgggcttccgtttccacccgaccgacgaggagctcgtggtgcactacctctgccgcaaggttgcccggcagccgctccccgtcccaatcatcgccgaggtcgacctctacaagctcgacccctgggatctccctgagaaggcgttgttcgggaggaaagagtggtacttcttcacgccgagggaccggaagtacccgaacgggtcgaggccgaaccgcgcagcggggagagggtactggaaggcgacgggagccgacaagccggtggcgcccaaggggagcgcgaggacggtggggatcaagaaggcgctcgtgttctactccgggaaggcgccgaggggggtcaagacggactggatcatgcacgagtaccgcctcgccgacgccgaccgcgccccgggcggcaagaagggctcacagaagctggacgagtgggtgctgtgccggctgtacaacaagaagaacaactgggagaaggtgaagctggagcagcaggacgtggcctccgtggcggcggcggcgccgcgcaaccaccaccatcagaacggcgaggtcatggacgcggcggcggctgacaccatgtccgacagcttccagacgcacgactccgacatcgacaacgcctccgccggcctgcggcacggtggctgcggcggcggcggcttcggcgacgtggcgccgccgaggaatgggttcgtgacggtgaaggaggacaacgactggttcaccggcctcaacttcgacgagctgcagccgccgtacatgatgaacctgcagcacatgcagatgcagatggtgaatccggcggcgccagggcacgacggcggctacttgcagtccatcagctcgccgcagatgaagatgtggcagacaatcctgccaccattctgagatggatggagcaagaaaaaggttgctgtagataaagggcggaaataggagtgatggctagaaaattattagatttactagaacgaaaatgattagaaatctggcaagcatgattctgcaaatgtggtggtagatgcttgcagtatgtaattcatttgttcagtatatgcatttggtaatctgcaaaacaaaaaaaaaaaaaaaaaaaaaaaaaacaaaacatatatgattttatccttcattagtctgaattctgaaatatatgcttgatggtttt

SEQ ID NO: 81801 - DNA, 518 bp, Oryza sativa
  Clone ID: PAT_MRT4530_81291C.1
gggaaccggaaacaggcagggatcaaaaattcacatgggaccggcccctctcaaaagcaaatgaacatggcccacccatgcaggggcccggggggctgcacaaaaatttttcacgcccacatgccgaacttcaccggggggccgggcggtttgaaccatgggtcggggggcaaaaagttctgcacggggaacttgggggccccctttttggggaacacctttttgaaccccggccaattaacccggccggggggggggggcccggcccccttgttcccgaaccccgggaaccaaaagggtttgagccccaagtccccgctccacgggagggaaccggccttggctacaaagggggggatggcggagttcaagaagaacgggcgcgagaacccgcgccacgggcgggcgaagaaactgcggacgggggggcggaaggcgtccccgagcgccgactcggggggaaaacggtagggctggaacacaaaaccgggggccccgcgggggtcggggcggccctg

SEQ ID NO: 81802 - DNA, 236 bp, Oryza sativa
  Clone ID: PAT_MRT4530_81292C.1
gagaactagttcgcgacctgcgattaacatgacagttcgttgtgctaagtttatgtaccgacgcaggtatgctacacaaaggagaccacgcgcaggcagcttgctggagctcggacacaccatatctggcttgtggagcaccagtatcgccataggtatagagaacggctaatacaccccggtacttacataccgtgtgtcgcgggacatcccttatgggagtcagaggacttcca

SEQ ID NO: 81803 - DNA, 517 bp, Oryza sativa
  Clone ID: PAT_MRT4530_81293C.1
aactagtggatccccgggctgcaggaaatttctgaacaaacaataattttacctttcaataatatagtgcccgcgcatacgcgcgggccaccttcctagttcatatagatgctaataaatctaggcacacatatttgtctaaattcattaacatatatataaatgtggacaatgctagaaagtcttataatatgaaagggagaaattacttctctgacttctaccagaaaaccacagcaggccaaacaataatatacatttcaataatatagtgcccgcgcatacgcgcgggccaccttcctagttcatatagatgctaataaatctaggcacacatatatgtctaaattcattaacatatatatgaatgtggacaatgctagaaagttttataatatgaaacggagaaattacttctctgacttctaccagaaaaccacagcatgccattttaaaaagacgtggatattagggaatgacctaatatgacataattagaaagggtgagacgtcgaac

SEQ ID NO: 81804 - DNA, 1830 bp, Oryza sativa
  Clone ID: PAT_MRT4530_81294C.1
cgggctgcacgagtgcggcccccgggctgcgatctcccacccctaaacaaatccaaataaaagccccgaaaaaaaaggcttgctcatttatgtctcctcatttccgcgagctgattcgcaatcaatcgctctctcgctggttcggatgatgcccgcggtttccctcttcgccaccgcccctttaaaaccctccccctcgcctccgggctcccaccaccgccgccactgagccagtccgccgccgccgccgccgctcctgaagccctcgccgtggcatgagaagatggccgcgtgctccagggggctcgtggcgcggccgttcgatctgaccgcgaggggggcggcgcactggccgtgccccgccccgcgacgccgcgcgatccgatgctgctgccgcgcgcagcaggagccgcggaggcgcctctccaaggccgcggcggccgcgccggagcgcaccgaggagtggcgcatcgacgggaacaagcccgccgctgccgcccggggcaggcgtcgcgccagcctcaccgcaatgccgtcactccccttcccttctcctcgttctaggaggcagtggaaacaacagaatttctatccacggtgcacgccaagagggccagctcctcaatcccgtgatactccgccgaagagagacactggtattgctagtgagaaggaatggggaatcaaccttctggatgaagcagtcaaggagtctgggacaaatgaagatggaagcacctggtacagggagagtggagacgatcgtggtgataatgggtacaggtgtcgctgggctaggatgggaggacagagtcatgatggtaccactgaatggaaagagacgtggtgggagaaaagtgattggaccggatataaggagttaggtgcggagaagtctggaaagaatggtgaaggtgattcttggtgggagaaatggaaagaagttctttaccaagatgaatggagcaatcttgcaagaatagagaggagcgctgaaaagcaagcgaaatcaggagcagaaaatgctgggtggtatgaaaaatggtgggagaaatatgatgccaaaggctggacagaaaaaggtgctcataagtacggaagattaaatgaacaatcctggtgggagaggtggggtgaacattatgatggccggggttttgtattgaaatggacagataagtgggcagagacagacttaggcaccaaatggggggacaaatgggaagagaaattctttgctggaattggttctcgacaaggggagacatggcatgtatcccctggtggagatcgatggtcaagaacttggggagaagagcattttggtaatggaaaagttcataaatacggcaagagcacaactggcgagagctgggatttggtagttgatgaggagacgtactacgaggcggagcctcattacggatgggctgatgtcgttggagactcaacacaacttctgtcgatacaacctgtcgaaaggccaccaggagtgtacccaactattgacttcagcgcttcatctccagctccaccttcggatgatccaccaggcatgcctccttcgcctctggaatgagtcatacctgtgccagtacaaaagagaagcttttctgcataggtttccaattttgcctgtaaggggaacattctttgtagaaaggggatcaaccgcagtattgcgttcattggttcattcattctttcgtagcatgttttccttcccgcggcttagcgttttatcgttccggactgctgtttgatcaattaggcgaaataatcagtggctcgcgatcatatagtctctaaaaaaaaaaaaaaaaaaaacta

SEQ ID NO: 81805 - DNA, 527 bp, Oryza sativa
  Clone ID: PAT_MRT4530_81295C.1
aaaatttggagagtttgattgatccattcttcactcagtaaattgataatctcatctctatgctcccaattgataaagctcctagatcagatggttttaatggcctatttgttaagaaatgttggcctataattacacatgacttttaaaggcttgctgcccactttcatgcagaatgcactgatctgcaatgcatcaacacatcctacattactattgttcctaaaaagctttctcctcaaaaagtaaatgattatagggcccatatctttgatgattataagtttgaaaatcttaacaaagctgatggcagatacgatgcaaggagtgatcctcaagcttgttcatacaaaccaatatgggtttattaaaggcaggacaattcaagattgtttagcttggtcttttgaatacattcatcagtgcgagcagtccaagagagagataattcttcttaagcttgattttgagaaagcttttgacaccatagagcttcttctgcttgtgttgcttatcagatatatcgg

SEQ ID NO: 81806 - DNA, 678 bp, Oryza sativa
  Clone ID: PAT_MRT4530_81296C.1
atgcacgcacgtccgtgttggacgaacggccgacgacgagcttcggtcctgaatgacgaaggaagggccggcgacgaggttcggccgtggacgacgaacggcctacgacgagcttcggccgtggacgacgaccggccgaagacgtcattcgcggccgaggacgtattcgctcgtggacgacgatcggccgatgaagccgttcggccgcgagcggaggggtgggcgacggtggtggcggggccggcggcggccgtgcgcgcggtggagtggcgccggcggtggccgtgcacgcggtggaggggcctgcggcggtggaggagccggtggcggaggagagcgctctcgacggtggcggtggatgagccggcggcggaggagagctcgacggtgacggtggatgagccggcggcggaggagagctcgacagggctgcctcggtggagcgtggtggacgacgacggtcagctgcggtggaggacgacggtcggagagcgaaggtcgcaggcggggcggcggcggaagacggcggaggcgtgcggcgggcaaagatcttcgcaggcggacagcccgcatgcgaagataatatcttttactatcttcgcaagcgggccgtccgcctgcgaagatctcttttactatcttcgcaagtgggccgtccgcctgcgaagatctttttaa

SEQ ID NO: 81807 - DNA, 507 bp, Oryza sativa
  Clone ID: PAT_MRT4530_81297C.1
gcacgaggctctcgttgcccttgcatcctaccttgcttgttgctctcgccatggcttccgctcatgcatgacagccagcccctagcgaccacttagcacagtagagacactgctcattgcctccacgttgccgtgtgccccagaagagcttgcccagggacggcgtgcaagctcgtcggtgacttgcacaaagaatcgtgcacgaggtgaagaggagcatttgcaaacgaggagagcggggaccgcctctgtaaatctggtcatttgcacgaggagtaaggtcttcttgattttctgggggtgcatgctgattgtcttgcatcctcagcgagggattgctttgcatgccatcatatcgtgtggagggagcacttttcaccattgcctgcgggtcgttgccagaggttaggagacgttgcctgtcaccggggctggtttgacagaggtctcattcagcctttgaggatcccggggctgtgagtgcccttgacttgtggtggccggcta

SEQ ID NO: 81808 - DNA, 1704 bp, Oryza sativa
  Clone ID: PAT_MRT4530_81298C.1
atggacggtggcgccggcgatggcggctggtccaccctgagctacgacgccgacgtgctccacatccaccaggtttgcgcccattggcgcgcctccacggcccccttggctgccgcccggccatggatcgtggccggccacgagacgtcgcgcattgtcagcgccatcggcgaggactactccttctggctcccccatggcggcggccagaggatcatcccctgcttcggcgacgcgccgccggcggggctcccgtactgctgcggcacgccgcgcgggtggctcgccctggcggacgcgccgcgctccccgacgcggctcgtcctctgggagcccgtctccagggcggagatcgcgatgcccccgctgccccgcgcggggttcgccccgcagatcttcctctccggcgaccccctcgccgccgcggcctcgccggggtggatggcgatcgccagccagcccttcagcgtcgcgggcaagtggcagacgctcttcttctggcgccccggcgacgccgcctggacgccgcagcgcgagccgccgatggacaggatcgacagcgcggcgttccacggcggcttcttctacctcaccgtcaggtactggtacctctacgcgtacgacctccgccacgacgccggcgcgccatggccaccgccgcgcgtccgctccaccttcgtctacctcgacgccgaccgcgcgtgcgagctgtccaggcaaggccgcagcctgcgcgccgcgcacgtggtcgccgccgccgacggcgtcgacctgctgctcgccgtgctctactgggaatgccaccgccggagtgtacagatggtcgccaaggtgttcaggatggagtgggcggcggcggcggcggacctcgagctctcgccggtgacggacctcggcgagcacgcgctcttgctgggccgcggcgacgcgctcgcgctctccgctgcggagttccccgcgatcaggaggaactgtgtctacttcgtcgagcacgacaatgccccgcatcggcattgggctatcgccatggatttaggggcaaatgcttcggagctgattccgcatccacaatttcaggaagatgagccaagcgaagaagatggcaaatgcgccgccgatcgctccttgttgccagttaagagtgctttgccggtttgccagtttgggagaatgcggaagcatcagcatctactcctgccaatttcaatttccatggggtggctcaggaagcaatggattctctccctcagaatctcagatgttaaagcgggttttgaaaccatgttcaggtcagcaattcccaagaggatctgcttcggtggtatgaagaaaaaaaatgccaagggccatcctattatatctcatgcaactgagaggtgtgctgctggtgtcttgcaacctgctgggcacttcaaattaggcttctacctcaacgccatggactttggcgttgaggctcaacatcttagcgccatatttcacggtgtcaatgtcaatgggcttgacattgacatggtgggccgaagtgccaaggcctacggcgctgagcttagggaatatggggataatggaacgtgccatgaattgaagctcaggttattggagaaaggaggaaggtcgatgtcaagctacggtggagatatcggcggatttgaggtgtcacaacgtcttcccagcacggggaatccatttgcaacattgtga

SEQ ID NO: 81809 - DNA, 279 bp, Oryza sativa
  Clone ID: PAT_MRT4530_81299C.1
atgtggatgcatgaaattgggttaggatataccgacataatcatcggagtgcttatatgtaggatgtgtgactaccttcgtagggatctaaatccagatcttatttttccttgcaataaccggccaaaagctggtgataatggaatatttcagtactcaataaaaccatccaggcttggcatcgaggacgatgtacacaaccaacaacgaaaaagcaaaagaaagataaaagaaaacctagacatcatgttcttgcggcattttgctctattacaatca

SEQ ID NO: 81810 - DNA, 785 bp, Oryza sativa
  unsure (1)..(785): unsure at all n locations
  Clone ID: PAT_MRT4530_8129C.1
cacgcgtccggccgcgagtgtgcagttcaaggaaatgggcggaagtagcatttcgagaagtagagcaattgctgatgctgccaaacctcctgaacaacaaaatgataggaggaaaaatttccttgattggaggaacttaatgaagcccatgaacgaggagaaagaccactgggtcccagatgaagccgtcactaaatgcacagcatgtacagcagatttcagtgctttcaatcgcaggcatcactgtcgaaattgtggtgatattttctgcgacaagtgcacccagggaagaactcctttaactactgatgctgatgctcaaccagtgcgagtttgtgacagatgcatggctgaagtttctcaaagactgaacaatgcaagggaagcggcaaatcggcctattgttcacagccatgaggatcttgccaaaaaacttaaggatgcaatggatataaataagaagtcatcttcagcctcgtcaaggtctacggatggttctagcaggcgaatgagggaggttgcatgccccacctgcacagtccaccttcaggtgcaagtcccaacatctggttcagagaccatagaatgtggtgtctgccagcaacctttcctcgtcagtgctcgatgaattccatcatcacgcaggctctacattgatccacanagagaaagattctgttgctgtcaaggttgctgcttcggtcattcattgtcttgatggggtccgttgctcctctgtatatgatgatgatctaatttagtacaatcatattcagaagtaagga

SEQ ID NO: 81811 - DNA, 261 bp, Oryza sativa
  Clone ID: PAT_MRT4530_812C.1
atgctgaggacggtgatgctcaaggccgagcggtggacatggcgaaatcttgtggtggggggacgacgttgtcgtctggggaatcaacgttggagccgtggaggcatcaacggtcctcggcgagcttggtggcaacacggccagcagagctgctacttctatgcctcacgggatgacggccgggaggcgcgtgtcgtccccgcgccgccgtcgttggcctcggccgggagatgggagctcgtcgtccactaatggccataa

SEQ ID NO: 81812 - DNA, 1665 bp, Oryza sativa
  Clone ID: PAT_MRT4530_81300C.1
atggaaaaggacgagattcgtaggtttgattcatttgaggcgtttgaagagatatgctcattagcagagcagaataaggttgattttgtgctacttggtggtgaccttttccatgagaacaaaccttcacgttcaaccttagttaagaccattgagattctacggcgttactgcttgaatgaccagccagtgaagttccaggttgtcagtgatcagacaatcaactttccaaacagattcggccaagtaaattatgaagatccaaacttcaatgttggattgcctgtgttcactatccatggaaaccatgatgatccagctggtgtggataatctctctgcaattgatattctctcagcctgcaatcttgtaaattattttgggaagatggaccttggtggctctggtgttggtgaaatagcagtctatcctgtactcgtaaaaaagggtacaacttttgttgcgctctatggccttggaaacattagagatgaacgattaaacaggatgtttcagacacctcatgctgtacaatggatgcgacctgaaactcaagatggaatgtcagtatctgactggttcaatattcttgttcttcatcagaataggataaaaacaaaccctaaaagcgcaatcaatgagcatttcttaccacgttttctggactttatagtatggggccatgagcatgaatgccttattgatccccaggaggtacctgggatgggttttcacatcactcaaccaggctcatcagttgcaacctccctgattgatggtgaagcaaaaccaaagcatgttctcttgttagaaatcaagggaaaccagtataggccaaccaaaatacctttgagatccgttaggccctttcactatgctgaggttgtgttaaaagatgaagtggatgttgatcccaatgatcaggcctctgttcttgaacatttggataaaattgtaagaaatcttattaagaagagtagtcagccaacagccagtagaccagagaccaaacttccactaattagaatcaaggtagattactctgggttttcaacaattaatccacaacgatttggtcagaagtatgtcgggaaggttgcaaacccccaggatattcttatcttctcaaaatcagcaaaaaagcgtcagactactggagtaggcaatattgatgactctgagaaacttcgtcccgaggaactaaaccaacaaactattgaagctttggttgccgaaaataacttgaaaatggagattcttccagttgatgacttggacattgcattgcatgattttgtgagcaaggatgacaagatggcgttttatgcctgtttgcagcggaatcttgaagaaaccagaactaaattgaattcagaggcagataaatttaaaatagaggaagaagatataatagtcaaagttggcgagtgcatgcaggatactggaggtagatctgttacagctcaaagtaacctgaactctttcagtgatgatgaagacaccagggagatgcttctcggtgcaagaacaactaatgctggaaggaaagcatctggatttacaagaccctctaaagatgctaccgatgttgccaaaactggaacttccagaaggggcaggggaagagggacggcctcaatgaagcagaccactctgaatttctag

SEQ ID NO: 81813 - DNA, 238 bp, Oryza sativa
  Clone ID: PAT_MRT4530_81301C.1
gcacgagggctcatcgattggaggccctaaagaaacaaaggaaaaaaagaatattgtggaggtttttcctgcaaagaggtcggctaaaatcaaggggcgttcacttattttgtctggtcctgatggcttccacacaaccattaagcttctgaattgcacagtatttgctgtttcagcatcaagtatgccctctcgcaaatgggcaataaaaggaatagaaaaaccatatttgttcttg

SEQ ID NO: 81814 - DNA, 1884 bp, Oryza sativa
  Clone ID: PAT_MRT4530_81302C.1
tccccttttttttttttgatcaaggaaaaggctttggccaccctttcattaaacattatgcacggcacaatgcgtttgcacagttaaatggctatacgccgttggcagtttggcaccatctcattcgaggggatcacacaatggaccaccatttacgtctttttatgctgctctaactaatgtattttgggtatccacttgtcaccctgtatgaagctggcgacgctgtacacgtcgacgtggtccctgggcacctggctgctccacccgatcctgctcccgctggcgccgtcgccgccggggccggcgctctcgtactcgccgtagtagagcgtcttgagcgcgaagtcgccgttccacgccatccacccgcgcggctgcacgatctcggagagcgtgcagccgacgtacaccgtgcgcgagtactccttccagggccggcccaggtagacgtggtgcacgtcgggcttctccctgtacagcgccatgtagtcgtcgctgccgttgacgacgcagccgcggagcacgatccccgtgggctgcgccgggtcggtgcgcccctgcgcggtgacggcgtcgttctcgcccttctccgggcggagctgcctcgggaggacgatgagggcggtgtcgcggaggacggtggccgagttgccgaagacgaagtcgacggtgccagagacgcggcaccgggtgtagaactgccgcatggcgtgcgcgtacagcgtgtcctggtggcccaggagctccaccgtgtccagcaccgtgcggtcgcccgtcgaccggaacgccaccgcctggtgcgcgtcgggcccggccgtgttggagatcgtcaggtcgcgcgccatgaagccgtccgcgagcacgccctgcggtaaccgcgtggttaccgacggtaatgtaaaccctacggtggccgtgttgaacgtggagacgcccggcgtgtcggcgttgaggtcgccggtgatgaccgtcttccccatgccgtccccgacgaccaccacgttcgtcttctccaacggcacgttcaccgtctccttgtacaccccctccttcacgtgcaccacgaacatctcgtcgccgtagtccggcgccgccgccaccgcctcccccaccgtcttgtagtggcaccccgcgccgcacaccgtcacgttgggggggagccccttgggcacgccgagcgcgtcctcgtcggcggcggaccccgccgccgcgggcggccagtagccgtcgcgctcggtctgcggcggggcccaccggaaggtgtcgtcgccgtagcgctgcagcgcggcgagcatggagatgtagttactgttgacggcgatggtgtcgtcgaggtaggccatggcgtcggagatggtgcgggagaagttgacgtacttgtaggcggaccagcagtcgtagaggtggaggagcgcggtggaggcggagaggagcgacggcgacgacgtcgagggcggcggcgagaggcggtgggtggagagggagaggaacgtgaggcagttggtggcggcgttggtgaggttgacgttggaggaggcggcgaggacggaccgcgccgtggagacggccggcgggatgcgggccctgagcgcggagagcgtggcggcgaggaggtccggagtggacgcgtcggcggaggcgttggagagcgtggagacgcaggcgggctggaaccgcgtggcgttgcaagcgaggaggacggcgagtggcgccgcgtaggaggccggcgccggcttggacggcgacggggcgtggtggtggtggcgcgaggagagggaggaggggaggtggagcaggaggaggaagaggaggaggcgaagcggcggcggcgacattggagacaatgtctggatggagtcgagtgggaaatgcctcgtgccg

SEQ ID NO: 81815 - DNA, 450 bp, Oryza sativa
  Clone ID: PAT_MRT4530_81303C.1
atgggtgtcggtgctccggcgaccaaacgatggtattttaaggagaaaacacacccggcatacaaggaaacacacctctggccaatcagacacaagcacacggattggagggcccacaagtcaggtgaaactgccatggaacaagacataactgccataaccaccatcagggcccaccaatcagtgaccccgccaaaggagaggccaggaggtggggcccacggttcggccgaaccaccacaaactcccctcatcctggccttccacgtgtacattcctgacgaagtcccaatgatggttgagggcattttggacatttcccatagctataaccgttatatagaggctataaatagagctcctctccctcacttcaagacacacaactttgagctgaattacaagaggctctattgtatcttttgtacattagaaatagatggagagtga

SEQ ID NO: 81816 - DNA, 471 bp, Oryza sativa
  Clone ID: PAT_MRT4530_81304C.1
atggcgcctcgccgccctcgcttcctccagttgaatctcttctccgtactcttcaggctagttgagacatggtggcataagtgtggcttagaaatagttggccacaagtgtggcaagcttagcttcaaatttgagatgtgttattggaatgagggtcttttggacttgctcttgcctagagcaaccgctgatttttccctcattatgaacatatcaggaatggccaattcatcactgaatattttcttgatgttcatgattcctaacactatgaagggatggctgacaattttgactttggagggattgccaacttgcaaaattgatttgattgataagaaatccacgtcccattttcaatggctcaatgcgctcaagagtcaagaatctgtgctggtttcaatcatttgctccctttatgttctgtgcacttttcatacagtatttatcaagaatttagataagatttag

SEQ ID NO: 81817 - DNA, 1839 bp, Oryza sativa
  Clone ID: PAT_MRT4530_81305C.1
cagacatttagtagcttcgttgaggctcaaaagttttggaaccattatgggggtcaaattggttttgatgttagaaaacgatgtgagaatactagcaaacttgatggcaaggttacatcacttggatttgtttgcaacaagaaggcttaagaagaaaggataaaagagatcatttgataaagactcctcgagttgagactagaactggatgcaaagttcgtatgggagttaccctgaatcgagtgctaggaaaatatgagatacatgatttggttcttgagcataatcatatacatcaaacccctgaacccatcacttgatgccatcacaatgacgaataactgaattgcaggcattcaagattaaaatagcagatagtactggtattcagcctagaattgctcatgaattggctagtcatcgtgttggaggaactgctaacctaggctacacatgtcgtggccacaagaactatctgcgcactaaacgctaaagagagctaaagtatggtgaagctggaagcttgctatattattttcataattagagtgtggagaatcatatgttcccttatgctatacaattggacagtgtagaacagataacatatattataggctgatgctaaaatgcttatttgattatgctcactttggtgatgttgttacatttgacactgtctttggaactaatcaagatatctgacatttgaaccaaggtaggagtgataattcaaatcttcttcgtgattttactgcatgcatgtactagtatgagagcgaagaaaaatttgaagatgtatttgctagtataagaagtaggatacagaaacaaacatggttgggtagcatttataagctaaaaaagaaatgggctaaatgccacatgaagaacttgtacacactaggaatgcgaagtactcaattaagtgaaagtttgaacaatgacttgaaagaataccttaattcagaattgtacattattcgcttctttgggcactttgagagggttgtccaagcaaagagagagagagaaagaaatacagtcaaagtgtgagtcaagacaaaggttgccatgaatcaagatgagaactccaatgttgttgcaagcaagcaagtgatacacaacacagatatttgaagcctttcaaagttaatatgaaagatgcatggcagcttatacaaggccatcaagtgaaggaaatacatatattgttagaaattgatctcttggtgaggattttgtacttgaggatgacatatagttcttagtaatagttacgagcgcacagtttcctacacttgtaaactatttgagagaactggaatattgtgcagccatgcattaaaagctcttgttttgatgaatattaagcagctacctgagcagtatgtcctgggtagatggacacaggtggcacatcctagagctgcaaaggatgcaaatgggaaaaatgtataagaagatccaatgttagatgtgacacgtcgctacaagttcctttcacacagatttctcattggcctctcggacagctggatttgaagaatgttttttattagttgacaatgtaattgatggcttatcaactcaagcatctagtagctttgcacatgttgttggcctcaagaaaagacagacacgacaagtgggtcaaagagaaagaaaaactggctcgacaaatatcacaaaaataaccagcaaagatcagaaaagaacaatccttgcaaacaaactaatgaggtatgccaattactaaatcaacaaatagatgatacaagctgcttattggaagataagtcgaatagctagtccaaattacgagagattgtcattaag

SEQ ID NO: 81818 - DNA, 1050 bp, Oryza sativa
  Clone ID: PAT_MRT4530_81306C.1
atggagaaggaggtagaggaggaggaggaggaggaggaggcggaggcgagtagaaagaagggagaacgcggattaggggagggggaatgcggggcgccgagtagcaagaagagagaccccgaattggagttgcgcatgaagcagaaggcggcggagtggcacaggaaggcgagggaggagaccctgaaggagatagccaaggagatggccaagtaccccaacgaagactggtccgacacaccgggcgtcaaggctcgcgagtaccgcgaggactgggaataccgttgcatattgatagtaattcattgggagtacataggaattgattggattgggttctttagggttgatcactactttgttaggattgcattatctactgatcgatatttattactgacaggtcctacgcgtgctgttgtggtatctgaccctgtgtattttgaggccccgctgaaagtgaagggctctgtcgaatctgaggataaagatttaagctttttagctgtcccgctcaccggtgcttctgatagaggtgaaacgcgcttggttaatagagagtacactagcaggcttagcacgctggagttgacatttggctttgttgttgagtccttggaggcctcaatcagtgtgcgtatcattgatgggtcatggaaagatggttttcgtggtgcattcactgcccatacccccagtctaaaagacaataaagtcctgctgcttgattctggatattgtgagatggtgcctgttactgctgatcgcatgatcaagctttcacgccatgttgtttccgtggaaggtgagggagacctgaccgtttcagtgctggcacttggaactgataatgtgatagaagatgagaaggatttcacgcctaaggaagccggtatgagccagagctctcttgacgtgggcttttgtaaattggaagtaactgtcaactggtcacttctttccttgcttcctgatggctatacttaattaagtacattgcacaaaaaaaaaaaaattgtgatgttcctttggatctgttgcttctgaact

SEQ ID NO: 81819 - DNA, 811 bp, Oryza sativa
  Clone ID: PAT_MRT4530_81307C.1
cgggctgcaggaattcggcacgagggccggctgttgccctcgccgtcaatctctgatttccacccaaggagtgttacaccggccttgacacaattaattgcaatactactgtttctgctgacctgctttggtctagtgggagatcaagtgttaatgtttccgatttgtggtatctccaggacagtgactgaaagtacacaaagagctgaacaaaagagctattgggtatatttcccttaacagtttgttgggaacatttgccaaataggtggttcagaattgcctccaaacccatgtgtttcacacacatctgatcacacccaatagtcgctccccgggctgccggctctcgtttgcaatgggtcctcgcccacctggtggttcttcagataaaaaaagttgtcaaaatgtcacaccgaggataaagacagctctatgaatttctgccaccaacaatatccgcagcacctattttcacaaccaccatatgcaatgaatttcccattcccaccatttcctcactaccctccatacacacaaaatttgcaatatgctgttccaccacaatatgctccatacacattaccacctcctgctggagctatgccatcaacatttttacctgctccagttattccatccaaggcaccgtctgaccaaggcaccccgcgttcaataactggtccaggagaacaaggcactgacaatgctgaacctgagaaggctactaagcgactatattggacagaacaggaggacataagattgataagcgcctggttgatttattaccagactgacaggtactggg

SEQ ID NO: 81820 - DNA, 387 bp, Oryza sativa
  Clone ID: PAT_MRT4530_81308C.1
aaaaaaacgcttaaacttttttaacccgggttaaaaaaaggggaaaaaaaaaaattggggcgaaagcaaggccaaatggaagaattggggttaggggggggctttcggggccaaaaaaaataaaaatttggccagggaaaaaaaaggaccccgggcccccccccccaagcccttaaaaaaaaaaccgggggtccggggcggaaaaaaaattttttttgaaggggggcccccccccaaaaattggcccccccggggaaaattttttggggccaaaaccccaaaaaatccggaagagacaaccaaaattttggccaattcccccttttatggggaaccgtgaaaaaaaagcctttaaaattggagggggtgaaaaaaatcccccccaaa

SEQ ID NO: 81821 - DNA, 367 bp, Oryza sativa
  Clone ID: PAT_MRT4530_81309C.1
atgagttcagatccactgaaatacacgccggccgtgtcggttgctctggccatcgtgttcgtggtgatcaatgtcggaatcgccaccatcaagctgatgagagggcagattccgatgcctaagctgttccctgatgttcatgactggagctccacctggagacttcacactgcagctccagttcttgtgagttgtgaccgcctacatttgccattacaacgcttcttcgacttcctcctcttcggcgaggcgacgctggacgacatgctcgtcttccccatcgtgttccacgcgctgcgattcaacatggacgggctcctcttcccctcagcgaggcccctctcctgcgaggctgcgacaaccggag

SEQ ID NO: 81822 - DNA, 119 bp, Oryza sativa
  Clone ID: PAT_MRT4530_8130C.1
cggccggattctgggtcgcccacgcgttttattttccctcgcggctggagagtgagagattgtcgatggccagcatatagatgctcagaagccggtggaggacggtggaggcgccacca

SEQ ID NO: 81823 - DNA, 3378 bp, Oryza sativa
  Clone ID: PAT_MRT4530_81310C.1
atggcatgttacatctcttatggacatgagataaagttggatgggagacaaaccatagctgctacatcaccttccgcagatgcacgtgatgaaagtactttggtgcaacaaatgctaagttctcaaatggagaaagcggagcaaaggcagtatcacgaattatttgaaacaatgtttgtggttaaggatagagcatgtcgtgttataatcgatagtgagagttgcaataattttgtgagttcagatttggttgaggaacttgagttgtctatacaactgcatcctcatccatattacatcaaatggttcaactcgtgtgatgatcttgaaaggttgaagaatagaatcaatgagactttcagagatatttggaatgatactaatattgcgatgcctttaactaagtatgagttattaccaaaccaacgtattgttgtgcctattgctttgaatactaatattttgcaagcatctgagaaaaaccaaggtaatgaggaagagaagaaagatgaggaggaaaaaaacctatccatagcttcatgcatgcttgaggaatgtttaattgaccaagcgcctacaatttctgaagatgagaaaaatggtaaagataacggtgctacaactgctcaagaggaccacatgcgtataagtaattctctatctagttcctctagctgtttaaatgagttacatgttagtctgcaagaaggggagtgtggtggtttttcgactaccaagatttcaggatccaaccatatggccatcgaaaaatgttcctcaccggatgttgagacagataatgataagttcaatacgctctatgacaaggtaaaactgaggacggtttcaaatcaagaaggggagaatgatgaggacacaactagctcgaatataaccatgactaccttgcgtattaatcaaccaaagcgattagccttcttggggagaggaagaagcagcggaagaagacacggacaccgctgcacctgggagatcaaggaggcctcgccgtgccggggggatcaaatgggtcgaactagtatttccttcattgttcatactggttgtacaactggtggaagctctaggaaatctggtggggaaaggatttgttcatcgatttatcttttagacagggattctctgaaatttatcgatttggaggagtcattgcttatacatggatatcaaaaaggagatggtgtatactacttgaagccttcttatgtccctccacaaggtcttgtacagattctaaatgatgaacaaatcaagatgatgttggatgatcataagacggaaacagagtgctcactgtacttttttgcaaggcctcgggaattggtgactgataatggaagcacatcaaggtttgtaagcccaagtagtatcccattaattggacatcataatagtgtcccaggtgattttgataaagatgatttgatattgcatgaagagtatgtacagcaacagttgagggaaaagaaaaaaggcaaggaacctgttattggcaaggagccagtaatgttcttccaaggagactctgatactgaggacctatatggtactaaccaggtagatgtagaggttaaccaagcagaaccacatcggggaaaaactacacaggaaaaagaactagtagggaaaaaaactaacaagagaaaagagaaggatataggccaatcagctgaggtggattatttgtcagatgagcccaatgatgacacaatagatttcaatgacgaagcacctatctatgtgcacagatcaagaggaattgaagatataattttttatgagtccaccctacggcgtccacacatgcaagttggcatgttgttcagtaatgttgatctttttagagctgctttgaagaatatgatcatcaacatggggagggaggtgttcaagggcaagaatgataggaatcaagtttctgtcaagtgtaaggcagataactgtccttggtacatatatgcttcaaaattgcctggtgaagacacctttaaaataaagaagtatgtttcaaaacatagctgtgggaaatcacacaatatagcacagcttgactggagatggcttactaatgaatacatggaattctttagatctgacaagaaatgggatgcacatgcctttcaagattgtgtcaggcgagataccaatgtagaagtcagcataagtaaggcgtatagggcaaggagggaggcctacaagaaagttatgggagatcatgatttgcagtttaaaagaattcaagattatgctcatgctgtgctatctgctaatccgggaagcaaagtttttgttaagtgcgaagtatcacctgagccagaaataaggcctaggtttcaaaggttgttcttgtcatttgatgctcaaattactggcttcttaggtggttgcagacccttcatcggtatagatggatgtcacatcaaactcaacaatggttctcaaatactagcagcacaaggtagggatgccaacaataatcttttccctattgcctttgcggtagtggagtctgagtgcacagaatcttggacatggttcttactatgtttggagaaggccattggaaaaggagaagagtttgggggctgggtattcatgtcagatagacaaaaggctaacaatttgagggcatgggagtggctaagcaaggttccaactaagcattggtgtagatatatgttcagttctagagcaaagacagatcttcttcttaacaacataagtgaaacatacaattcaaagatactgggagctagagatgaacccataattaccatggttgagcacataaggacaaaaatgaagggtgatttcaataataagagggaaggtgcagaaagggacaattggcaaatcccaccaaatatattaaagaagcttgaggcagagaagaacgaggcaagatattgcaaatctgtctattcgagctcggtacccttcatgcaaaggccagagagctatgttgatgacatattgacaaaggatgcatatgcgagaacatattgtgggatgatttatcccgttcctgatgagacacaatgggaaaaaactccatttccagatgtagacccacctgtggctaggacacaaccagggaggccaaaaacaaagagaactagagcatctgatgaacctagggttcaaggaaggtcggttgcaaagacaacaattagatgtagcgtctgcaaagagtttggtcataacagcagaaagcatggaaaagacaaccaaagttcttcatctcaaaatcgtcatgtcgtcctacccgtatggctcgcagaattaaaagcggatggagatgcgcgcacttttgccgccaaggtggcacgaggcaactccatccatgggttgcgctga

SEQ ID NO: 81824 - DNA, 3384 bp, Oryza sativa
  Clone ID: PAT_MRT4530_81311C.1
atggcatgttacatctcttatggacatgagataaagttggatgggagacaaaccatagctgctacatcaccttccgcagatgcacgtgatgaaagtactttggtgcaacaaatgctaagttctcaaatggagaaagcggagcaaaggcagtatcacgaattatttgaaacaatgtttgtggttaaggatagagcatgtcgtgttataatcgatagtgagagttgcaataattttgtgagttcagatttggttgaggaacttgagttgtctatacaactgcatcctcatccatattacatcaaatggttcaactcgtgtgatgatcttgaaaggttgaagaatagaatcaatgagactttcagagatatttggaatgatactaatattgcgatgcctttaactaagtatgagttattaccaaaccaacgtattgttgtgcctattgctttgaatactaatattttgcaagcatctgagaaaaaccaaggtaatgaggaagagaagaaagatgaggaggaaaaaaacctatccatagcttcatgcatgcttgaggaatgtttaattgaccaagcgcctacaatttctgaagatgagaaaaatggtaaagataacggtgctacaactgctcaagaggaccacatgcgtataagtaattctctatctagttcctctagctgtttaaatgagttacatgttagtctgcaagaaggggagtgtggtggtttttcgactaccaagatttcaggatccaaccatatggccatcgaaaaatgttcctcaccggatgttgagacagataatgataagttcaatacgctctatgacaagcgattagccttcttggggagaggaagaagcagcggaagaagacacggacaccgctgcacctgggagatcaaggaggcctcgccgtgccggggggatcaaatgggtcgaactagtatttccttcattgttcatactggttgtacaactggtggaagctctaggaaatctggtggggaaaggatttgttcatcgatttatcttttagacagggattctctgaaatttatcgatttggaggagtcattgcttatacatggatatcaaaaaggagatggtgtatactacttgaagccttcttatgtccctccacaaggtcttgtacagattctaaatgatgaacaaatcaagatgatgttggatgatcataagacggaaacagagtgctcactgtacttttttgcaaggcctcgggaattggtgactgataatggaagcacatcaaggtttgtaagcccaagtagtatcccattaattggacatcataatagtgtcccaggtgattttgataaagatgatttgatattgcatgaagagtatgtacagcaacagttgagggaaaagaaaaaaggcaaggaacctgttattggcaaggagccagtaatgttcttccaaggagactctgatactgaggacctatatggtactaaccaggtagatgtagaggttaaccaagcagaaccacatcggggaaaaactacacaggaaaaagaactagtagggaaaaaaactaacaagagaaaagagaaggatataggccaatcagctgaggtggattatttgtcagatgagcccaatgatgacacaatagatttcaatgacgaagcacctatctatgtgcacagatcaagaggaattgaagatataattttttatgagtccaccctacggcgtccacacatgcaagttggcatgttgttcagtaatgttgatctttttagagctgctttgaagaatatgatcatcaacatggggagggaggtgttcaagggcaagaatgataggaatcaagtttctgtcaagtgtaaggcagataactgtccttggtacatatatgcttcaaaattgcctggtgaagacacctttaaaataaagaagtatgtttcaaaacatagctgtgggaaatcacacaatatagcacagcttgactggagatggcttactaatgaatacatggaattctttagatctgacaagaaatgggatgcacatgcctttcaagattgtgtcaggcgagataccaatgtagaagtcagcataagtaaggcgtatagggcaaggagggaggcctacaagaaagttatgggagatcatgatttgcagtttaaaagaattcaagattatgctcatgctgtgctatctgctaatccgggaagcaaagtttttgttaagtgcgaagtatcacctgagccagaaataaggcctaggtttcaaaggttgttcttgtcatttgatgctcaaattactggcttcttaggtggttgcagacccttcatcggtatagatggatgtcacatcaaactcaacaatggttctcaaatactagcagcacaaggtagggatgccaacaataatcttttccctattgcctttgcggtagtggagtctgagtgcacagaatcttggacatggttcttactatgtttggagaaggccattggaaaaggagaagagtttggggccctgggtattcatgctaacaatttgagggcatgggagtggctaagcaaggttccaactaagcattggtgtagatatatgttcagttctagagcaaagacagatcttcttcttaacaacataagtgaaacatacaattcaaagatactgggagctagagatgaacccataattaccatggttgagcacataaggacaaaaatgaagggtgatttcaataataagagggaaggtgcagaaagggacaattggcaaatcccaccaaatatattaaagaagcttgaggcagagaagaacgaggcaagatattgcaaatctgtgtgtgctggtaggggcatttggcaagtgtccccatttggtaatcaatatgtagtggatttgaacaagcacacttgtgggtgtagaaaatgggatttaactggaatcccatgtttgcatgctgtttcagctattcaaggtttcatgcaaaggccagagagctatgttgatgacatattgacaaaggatgcatatgcgagaacatattgtgggatgatttatcccgttcctgatgagacacaatgggaaaaaactccatttccagatgtagacccacctgtggctaggacacaaccagggaggccaaaaacaaagagaactagagcatctgatgaacctagggttcaaggaaggtcggttgcaaagacaacaattagatgtagcgtctgcaaagagtttggtcataacagcagaaagcatggaaaagacaaccaaagttcttcatctcaaaatcgtcatgtcgtcctacccgtatggctcgcagaattaaaagcggatggagatgcgcgcacttttgccgccaaggtggcacgaggcaactccatccatgggttgcgctga

SEQ ID NO: 81825 - DNA, 456 bp, Oryza sativa
  unsure (1)..(456): unsure at all n locations
  Clone ID: PAT_MRT4530_81312C.1
gaggcccccaaggaaaaggaggcgaaaccggtgaanctgggaccccaaggaagttnccccaggccgtcgaaatgttcgacctacttcctcgccctgctccantcgtgggcgccgcagctcgagatcaacaaggtgagggttgcgantcggttgtcaatccgtggccggcctctcgctgtttttggccgcgaaaaaaagtttcttgctttattgatgactcgcgaagtcacgatgtgtgttgttgtagctaaactttggtatgataaaagttttatccttgtagctgtagtgataagctggtaggttatttaattagctttagtggtgtataatggtgcccgtattaggtagtactttgcctttgaaaccggtganccaancggctaaataattcgacatgataatctgagtgttcgccttgtntttaaaaaaaaaaaaaaaaaaaaaaaaaaaaaa

SEQ ID NO: 81826 - DNA, 3510 bp, Oryza sativa
  Clone ID: PAT_MRT4530_81313C.1
atggcgctcccggccaccatgaaggtgctcagtctcgtgctgggcctcatcctggtgatgctcgccgcggtgctcacggacgcctccatcgagctcctcgtccagttcagccgcgctgtgggcgccacctcgtacggcgaggccatgggcgacgccttcgatccactgaaatacacgccggccgtgtcggttgctctggccatcgtgttcgtggtgatcaatgtcggaatcgccaccatcaagctgatgagagggcagattccgatgcctaagctgttccctgatgttcatgactggagctccacctggagacttcacactgcagctccagttcttgtgagttgtgaccgcctacatttgccattacaacgtgcacacaattcacaacgagctcaaggaccactcccagatcaggccaatagtgcgggcgtcactgctgctctgcttggtcgtgtacaccaccaccagcttcttcgacttcctcctcttcggcgaggcgacgctggacgacatgctcgtcttccccatcgtgttccacgcgctgcgattcaacatggacggcctcctcttcccctcagcgaggcccctctcctgcgaggctgcgacaaccggaggttcggcgcgatcacggcggcgctcctcacggtcatcttcctcgccgccaacttcgaccccaacatctgggacgcgttccagttcactgggagtagctgcatgggcgacgacgtcgactgcggaggcggcggcgacagctgcctcgcggccatgggtcgaactagtatttccttcattgttcatactggttgtacaactagtggaagccctaggaaatctggtggggaaaggaattgttcatcgatctatcttttagacagggattctctgaaattcatcgatttggaggagtcattgcttatacatggatatcaaaaaggagatggtgtatactacttgaagccttcttatgtccctccacaaggtcttgtactgattctaaatgatgaaaaaatcaagatgatgttggatgatcataagacggaaacagagtgctcactgtacatttttgcaaggccgcaggaattagtgactgataatggaagcacatcaaggtttgtaagcccaagtagtatcccattaatcggacatcataacagtgtcccaggtgattttgataaagatgatttgacattgcatgaagagtatgtacagcaacagttgagggaaaagaaaaaaggcaaggaacctgctattggcaaggagccagtaatgttcttccaaggagactctgatactgaggacctatatggtactagtcagatagatgcagaggttaaccaagcagaaccacatccgggaaaaactacacaggaaaaagaactagtagggaaaaaaactaacaagagaaaagagaaggatataggccaatcagctgaggtggattatttgtcagatgagcccaatgatgacacaatagatttcaatgacgaagcacctatctatgtgcacagatcaagaggaattgaagacatcatttttgatgagtccaccctacggcgtccacacatgcaagttggcatgttgttcagtaatgttgatcttttcagagctgctttgaagaatatgatcatcaacgaggggagggaggtgttcaagggcaagaatgataggaatcaagtttctgtcaagtgtaaggcagataattgtccttggtacatatatgcttcaaaattgcctggtgaagacacctttaaaataaagaagtatgtttcaaaacatagctgtgggaaatcacacaatatagcacagcttgactggagatggcttactaatgaatacatggaattctttagatctgagaagaaatgggatgcacatgcctttcaagattgtgtcaggcgagataccaatatagaagtcagcataagtaaggcatatagggcaaggagggaggcctacaagaaagttatgggcgatcatgatttgcagtttaaaagaattcaagattatgctcatgctgtgctatctgctaatccgggaagcaatgtttttgttaagtgcgaagtatcacctgagccagaaataaggcctaggtttcaaaggttgttcttgtcatttgatgctcaaattactggcttcttaggtggttgcagacccttcatcggtatagatggatgtgacatcaaactcaacaatggttctcaaatactagcagcacaaggcagggatgccaacaataatcttttccctattgcctttgtagtagtggagtctgagtgcacaaaatcttggacatggttcttactatgtttggagaaggccattggaaaaggagaagagtttgggggctgggtattcatgtcagatagacaaaagggactacgcaaggcagtggctgaagttttcccaggagctgagcaccattactgccttaggcacctacatgccaatttttcccaagcaggatttagaggggaatatctgaagggtttgatggaacgagcagcatatgcatatagacaatctgagttcaatgctgctatgcaagaactaaaggttaacaatttgagggcatgggagtggctaagcaaggttccaaccaagcattggtgtagatatatgtttagttctagagcaaagacagatcttcttcttaacaacataagtgaaacatacaattcaaagatactgggagctagagatgaacccataattaccatggttgagcacataaggacaaaaatgatgggtgatttcaataataagagggaaggtgtagaaagggacaattggcaaatcccaccaaatatattaaagaagcttgaggcagagaagagagaggcaagatattgcaaatctgtgtgtgctggtaggggcatttggcaagtgtccgcatttggtaatcaatatgtagtggatttgaacaagcacacttgtgggtgtagaaaatgggatttaactggaatcccatgtttgcatgttgtttcagctattcaaggtttcaagcaaaggccagagagctatgttgatgacatattgacaaaggatgcatatgcgaggacatattgtgggatgatttatcccgttcctgatgagacacagtgggaaaaaactccatttccagatgtagacccacctgtggctaggacacaaccagggaggccaaaaacaaagagaactagagcatctgatgaacctagggttcaaggaaggtcggttgcaaagacaacaattagatgtagcgtctgcaaagagtttggtcataacagcagaaagcatggaaaagacaaccaaagttcttcatctcaaaattgtaaaacacaaataactaggaggaagaagaggagcaattcccagcctattagttctagttcaagagatgatattccaacaacatccacacagccaccagtatatatggacaatgcatttggtgttggtctctaccatcatgtgccagatgggccttatatcggtcctactggaagaaagctgcaaattaggagaaactga

SEQ ID NO: 81827 - DNA, 434 bp, Oryza sativa
  Clone ID: PAT_MRT4530_81314C.1
ggggacaaaggggtttttttaaaggggggaaaattgggggggggaaaaacaaggggaaagggattaaaacctctggggggggggggtcattaccccttgggaaaaaaccgggggggaagttttggggaagggggggggtttaagaggggaaaatcattctgggggggaaaggggttccccacccttagccaatgacaagtatgaaaaaatttttccaggagattatacgagcttttttcctgggaggaggtcaaaaatttaaatataaaagttttaaatgggaaaaaaaaaaaaagaccgacccccggtttcttattttttaaaaaaggccccattttgggatccccctttgggggttcggtgtaaggggttttggctaaaaaattctggaggaacccgaaaggatgggggggggggaccatgggggggaggcc

SEQ ID NO: 81828 - DNA, 1092 bp, Oryza sativa
  Clone ID: PAT_MRT4530_81315C.1
atggacggcagcaggctggcccctgcacggcgcgacgccggcggctttcccggccacgagcggcggggtgaggagccgcgcgcgtccttctccggcgcggtgttcaacctgtccaccaccatcatcggcgcgggcatcatggcgctcccggccaccatgaaggtgctcagtctcgtgccgggcctcatcctggtgatgctcgccgcagtgctcacggacgcctccatcgagctcctcgtctggttcagccgcgctgtgggcgccacctcgtacggcgaggccatgggcgacgccttcgatccactgaaatacacgccggccgtgtcggttgctctggccgtcgtgttcgtggtgatcactgtcggaatcgccaccatcaagctgatgaaagggcagattccgatgcctaagctgttccctgatgttcatgactggagctccacctggagacttcccactgcagctccagttcttgtgagtttgcacacaattcacaacgagctcaaggaccactccctgatcaggccaatagtgcgggcgtcactgctactcggcttggtcgtgtacaccaccaccagcttcttcggcttcctcctcttcggcgaggcgacgctggacgacatgctcgtcttccccatcgtgttccgcgcgctgcgattcaacatggacggcctcctcttcccctcagcgaggcccttctcctgcgacaaccggaggttcggcgcgatcacggcggagctcctcacggtcatcttcctcgccgccaacttcgtccccaacatctgggacgcgttccagttcactgggagtagctgcacgggcgacgacgtcgactgcggaggcggtggcgacagctgcctcacggccgtaatccttgtggcggcagccgtgtctccgatgaggccgcgctcctccagcgcgagctcgacgccggtggcggggaagaaggagaaaacggcgacgcggtggtgctcgcaatccaccgcgccccgatgtgaaaaggctgcggcgggtcacggaatgccgccgccagcgccgccagcccgccaccaccaacgcccaactctgtctgggccatcgctggcgacgtga

SEQ ID NO: 81829 - DNA, 1917 bp, Oryza sativa
  Clone ID: PAT_MRT4530_81316C.1
ccacgcgtccgcttattttctcgccatcgatagcctgcctcggcgttttccggtcgcgaggttaaaggggaagaactgaagaaggaagggaacccatcacctcatcaaatctgcctgtcttgattgtgcattttggactcttcgatccatgtctgcgtgaagaattttcagcttctactcagtaagagatcaaaacgcgatttaaaaaaactggaattccgtccgcgcaaatccacgcgtggatcagcgaggatggtgatgccaatgccgacggagggcagcgagccacttctcccgaggaagcagagggacggcggtgacgacggcgccgcctcgtcgcacgaccacttcgacggcgcgtccttctccggcgcggtgttcaacctgtccaccaccatcgtcggcgccggcatcatggcgctcccggccaccatgaaggtgctcggcctcgtgccgggcctcatcctggtgatgctcgccgcggtgctcacggacgcctccatcgagctcctcgtccggttcagccgcgccgtgggcgccacctcgtacggcgaggccatgggcgacgccttcggtgctttcggcagggggctcctccagctctgcgtcgtcgtcaacaacgtcggcgtgatggtcgtctacatgatcatcatcggcgatgtgctctctgggaagtcatccagcggcggcgtgcaccatcacggcgtgatagaaggatggttcggtccaaaccggtggaacggccgcttctccatcctcgtcatcgtcacgctcggtgtgttcactccactgacatgcttcaagcgagtcgattcactgaaatacacgtcggccttatcggttgctctggccgtcgtgttcgtggtgatcactgccggaatcaccaccatcaagctgatgagagggcagattccgatgcctaaactgttccctgatgttcatgactggagctccacctggagacttttcactgcagctccagttcttgtgaccgcctacatttgccattacaacgtgcacccaattcacaacgagctcaaggaccactcccagatcaggccaatagtgcgggcgtcgctgctgctctgcttggccgtgtacaccaccaccagcttcttcggcttcctcctcttcggcgaggcaacgctggacgacgtgctcgcaaacttcgactccgacctcggcatcccctacagcttggtgctcgacgacgccgtcagggtcagctacgtgctccacctcatgctcgtcttccccattgtgttccacgcgctgcggttcaacatggacggcctcctcttcccctcggcgaggcccctctcttccgacaaccggaggttcggcgcgatcacggcggcgctcctcacggtcatcttcctcgccgccaacttcgtccccaacatttgggacgcgttccagttcactggcgccactgccgccgtcgccattgcctacattttccctgctggaatggcactgagggatcgccacggcatagcgacgaagggcgacaagtatctcgcggtgttcatgattgttcttgctttggtggcaaatggagtggccgtgtacagcgacgcttgcttggggacgttttagttggcgatcgcacatctccgtggtgatctgtgcattagttagtgcgatatgaaaaattcgttgtttgcacgttgaactcaaccattttgagttccatttataataagtacatatgtacaaattgcctgcaggttctgcagagataggtgtagataagaatgcagcggtgaaaaaaaaattctaaaccgtgaatttgtagaccttttcttgttactgacaaattggttgttctatacatgtccaaacggtactggacaagaactgatcagttcatgttgattttggtgataattaaagtcactgggattcgattggtgt

SEQ ID NO: 81830 - DNA, 2460 bp, Oryza sativa
  Clone ID: PAT_MRT4530_81317C.1
atgggtcgaactagtatttccttcattgttcatactggttgtacaactggtggaagccctaggaaatctggtggggaaaggaattgttcatcgatctatcttttagacagggattctctgaaattcatcgatttggaggagtcattgcttatacatggatatcaaaaaggagatggtgtatactacttgaagccttcttatgtccctccacaaggtcttgtactgattctaaatgatgaacaaatcaagatgatgttggatgatcataagacggaaacagagtgctcactgtacatttttgcgaggccgcaggaattagtgactgataatggaagcacatcaaggtttttaagcccaagtagtatcccattaatcggacatcataatagtgtcccaggtgattttgataaagatgatttgacattgcatgaagagtatgtacagcaacagttgagggaaaagaaaaaaggcaaggaacctgctattggcaaggagccagtaatgttcttccaaggagactctgatactgaggacctatatggtactagccagatagatgcagaggttaaccaagcagaaccacatccgggaaaaactacacaggaaaaagaactagtagggaaaaaaactaacaagagaaaagtgaaggatataggccaatcagctgaggtggattatttgtcagatgagcccaatgatgacacaatagatttcaatgacgaagcacctatctatgtgcacagatcaagaggaattgaagatatcattttttatgagtccaccctacggcgtccacacatgcaagttggcatgttgttcagtaatgttgatcttttcagagctgctttgaagaatatgatcatcaacgaggggagggaggtgttcaagggcaagaatgataggaatcaagtttctgtcaagtgtaaggcagataattgtccttggtacatatatgcttcaaaattgcctggtgaagacacctttaaaataaaaaaatctgacaagaaatgggatgcacatgcctttcaagattgtgtcaggcgagataccaatgtagaagtcagcataagtaaggcatatagggcaaggagggaggcctacaagaaagttatgggcgatcatgatttgcagtttaaaagaattcaagattatgctcatgctgtgctatctgctaatccgggaagtggttgtagacccttcatcggtatagatggatgtcacatcaaacccaacaatggttctcaaatactaacagcacaaggcagggatgccaacaataatcttttccctattgcctttgcagtagtggagtctgagtgcacagaatcttggacatggttcttactatgtttggagaaggccattggaaaaggagaagagtttgggggctgggtattcatgtcagatagacaaaagggactactcaaggcagtggctgaagttttcccaggagctgagcaccgttactgccttaggcacctacatgccaatttttcccaagcaggatttagaggggaatatctgaagggtttgatggaacgagcagcatatgcatatagacaatctgagttcaatgctgctatgcaagaactaaaggttaacaatttgagtgcatgggagtggctaagcaaggttccaaccaagcattggtgtagatatatgttcagttctagagcaaagacagatcttcttcttaacaacataagtgaaacatacaattcaaagatactgggagctagagatgaacccataattaccatggttgagcacataaggataaaaatgatgggtgatttcaataataagagggaaggtgcaaaaagggacaattggcaaatcccaccaaatatattaaagaagcttgaggcagagaagagcgaggcaagatattgcaaatctgtgtgtgctggtaggggcatttggcaagtgtccgcatttggtaatcaatatgtagtggatttgaacaagcacacttgtgggtgtagaaaatgggatttaactggaatcccatgtttgcatgctgtttcagctattcaaggtttcaagcaaaggccagagagctatgttgatgacatattgacaaaggatgcatatgcgaggacatattgtgggatgatttatcccgttcctgatgagacacaatgggaaaaaactccatttccagatgtagacccacctgtggctaggacacaaccagggaggccaaaaacaaagagaactagagcatctgatgaacctagggttcaaggaaggtcggttgcaaagacaacaattagatgtagcgtctgcaaagagtttggtcataacagcagaaagcatggaaaagacaaccatagttcttcatctcaaaatatggggcttatatcggtcctactggaagaaagctgcaaattagaagaaaatgatctcctatttttatgcagtggtattatttacatcaaaattcttagctacaattag

SEQ ID NO: 81831 - DNA, 526 bp, Oryza sativa
  unsure (1)..(526): unsure at all n locations
  Clone ID: PAT_MRT4530_81318C.1
ccacgcgtccggttgcgacattgcttcgtgcgttgtgcggagagttcacgcgcggtgcggcgcggcggacggaccacgtacgcgtgcaacgcctgcgcctaggcgtccggacgtgagcggcgcagcggcggtagcggaggaaggcctcggcgcccgcttggctcgtcgcgtgacgcgcgtttttcttttctttcttcggcttcggttttccgttcgccggttgccgatcaaccgcgcgctgccaaattcgtgacgaggctgggtctgttgccgccttgtccctgtctgagtgacggcctcttcatcgacaattttggccgatcgaccgaagtctgggaggttgagaagacaaaccagcgccggaggaggagggcacggcggcggatgggggaaggggtgggggcaggaacaggaggagagctcctcggcgaggatggcggagagcgagacgtgcattccaccgctcatcgtgcggggggggtgtttcttgtcgtcnttcgtctcaacggacaactggcggcgagcg

SEQ ID NO: 81832 - DNA, 651 bp, Oryza sativa
  Clone ID: PAT_MRT4530_81319C.1
cgagaagcacactgcccaccagaccttgctgaacagtactaccaaaagttacagggaaatgatatgaaggcattcaagtcattttatgaatcacttgtcatgaaaataagacaacagcagaatgggagtcttgtcttcagatagcgtcattcaattattttaaatctgtttgccagtgaaagattcctcagttctacaatttgaatatagggtagttgtatcatctatgtacataaagctctaccatttctgagatcagaagatgtatactgcgggaatatttttaccgagcctggctaccgtggcaaagttccttgatcaaggcatgttagtgagatgcaggggatacatccccagagtttctgctgtgagcatacagggtttcattatgtttgttttgatatttctctggaagtgatcattgttctgctccgagcttgaaattttttgtaaggcgattcgggtgaagctaaacagatgggataggcaaaagagtgatgtgtgggccgtgtttttcctgacagaaacttgctcaccgtctgttgtcgtgtttccaaattttggctatggtttttcaccacttggttaactggggctgctgtccaaaattcttttattttgtgtccccccccccccccccccccccccccc

SEQ ID NO: 81833 - DNA, 133 bp, Oryza sativa
  Clone ID: PAT_MRT4530_8131C.1
ctttttgtttttttgggtttttttacagaattgtatacatttcttgtttaagcaaatcgggttattcttaaaagcaatcggtctgcagtttcaagacatgtacattcggaacccgagcccggggaagcaaaca

SEQ ID NO: 81834 - DNA, 594 bp, Oryza sativa
  Clone ID: PAT_MRT4530_81320C.1
atgttgtatcacttccaagtttagttcatggttgttaaggcagtaaggcaacctaaggcgaccctagactgccttagcggcaaggcataaggcgaggcgacggcttagacactagtacacaactggatgtaagtgtgggaaggaacagatggtgcctggggaggaagagcatagaagagtacaacagcaggggatgtaagcgttgggaaggaacataggggaagacaattagtacaggaagcaatagatccgcaaatacaggaaggggagagtacacgagagaatcaattggatcgtggtaggattgtcgccatagttattagaaccggactggactgccggtccgaccagaataaaccggaaccaatgctcttactggtctggttcgattaaaagaccgctgtgcaatcaaaccggtaaacaaccggttaaaccggtatgtctgattcctggtaacactggagacaccttaacaaccatggtttagttttgacacgatactctacctgtttcagagcctatgtgtttttcagttcacccgtacaaagagagttggtggcccaaataaaaaaagattcaaatgttagagcacgc

SEQ ID NO: 81835 - DNA, 3406 bp, Oryza sativa
  Clone ID: PAT_MRT4530_81321C.1
cattttattaatcacctgtcatgaaaataagaccacagcagaattggagtcttgtcttcagatagcgtcattcaattattttaaatctgtttgccagtgaaagattcctcagttttaccatttgaatatggacgacctcgagcaggccatcctgctcgcctcggattcccccgccgcggccgccgcctccccggccgtgcgcgccgaggcgctcgcctactgcgcgcgcgcccgcgacgagaccccgccgtcgtcgctcctccacctctgcctctacggcctcgcctcctccccgcacgcccacgtccacttctggtgcctccagaccatccacgacgcgctcctcctccgccgccgcctcgccctccccgacgacctcgccctcctccgctcctcgctgctctccctcgccgtctcctccaacgccgcctcccctcccttcctccgcaacaagctcgcccagctcctcgccctcctcgtccgcttcgagtacccccatgtctacccttcctacttcctcgatctcatcccgccctcgccgccgctgccgggacccaccgacatgttcgcccgcgtcctcgtctccctcgacgatgacctgctctcccaggactacccgcgcaacgccgaggaggcctccgatgccgggagggtcaaggacgccatgcgcgcgcagtgcgtgccccagatcgcccgccactggcacgaggccgccgtgtccctccgcgccgccgaccccgccgtcgccgcagtagccctcgatgcggcgcggaggtgcatctcctggatcgatgtctccctggtcgcgaatgacgtgtttgttcccttgctctttgacattgcgctgtccccggggagcgtggctcctcttgctgccgcggcggtggggtgcctctctgctgtggcagcaaagaggatggacgcgagggcaaaggtggcgttgctgaggtcgctcatgtctgcccagaaggggtttggtagccctgacagcggtttgaaaatggcacatttggtgacggcatacgctgtcgaggctctcgagtgttatcgcaagcttggctctagtgatgctgatggagccgcggcattggaaatgctggaagaggtgctgccagctgtatttgcggccgcagagagcggcgatgatgatgaggttgattcgggctcggtgcttgagtttttatctgggtatgtgagtacgatgaaggcaccgacagagaagcaacttggacacttgggacagatactggaggtggtgcggatgcagatgtcatatgatccagtttataggggtcatcttgatgtccttgacaagatagggaaggaggaggaagacctgatggcagagcagcggaaggatttaattgcactatttcggagcatttgtcgtgtggcaccaggtgccactcagctgttcataagagggttgcttgtgacggccctttcatctgcagaagttagtgttgaggatgttgaggtcgcgcttactctgttttaccggcttggggaaatagtgggtgaggaagagatccggactggagctgggttaattagggagcttgtcccaatgctcctttcagcgagattctcatgccacacacaccgcctagttgcattagtgtacctagacacaattagccgctatatcaagttcatgcaggagaatgaccaatatgtgccacatctgcttactgtgttcttggatgagcgtggcatacaccatcagaatgcccacgtgagctgccatgcaggatacttgctcatgagagctatcaggctgttgaaggctaagctagtgccttacttggataccattttgcagagcttgcaagatgccctagtgcaattcactgctacggactgggcaaacaaagatattaagttctccagctcagaggatggcagccaaatattcgaggctgtgggactgttgatcggcattgaagaggtgtcaccagataagcaggttcagtgcttgacagctttacttaatcctctctgtcaacagatcgagtcacttgttatggatgccaaagcacaaggacttgaagaatcatctccaagagctataggtcttcaacagattattgttgcattgactatgatcagcaagggatttaatgaacggcttgtgatgggaagcaggccgacacttggcgttatgttcaagaagacccttgatgtagttttgcaagtcctcatctcatttcctaatgtgaagcccctgcgatctaagatcatatcatttctccaccgtatggttgagatattaggcatttcggtgcttccatgtattccaattgcactgcgacagttgctcgttgataatgaggcaaaagatatgtcggaatttctgtacttaataaaccaaataatatgcaagtttaaatcttcagcaaatgccttattggaggatgtgtttcctgccatcgcaagtcatttatctgtgatactatcacacgatgccttttcaaatggttttgcaagcaatactgaggaaatgcgtgagctgcaagagctggaaaagagattttacgcattcttgcttcatatagcaacacatgatctgtctacagttctcctaactcctagttgtaggcattatctagagaacataatgcagttgcttttgattacttcatgcagccataaagagatatcacatcggaagacatgcgtacagacttttgtcaaccttatcaaagactggtgtagtagctctgaaattgaagataagcttcctggcttccgagtgtttatgattgagaagttcgctactggttgctgtttgcagagtgtccttgacaagtcatttaacttccgtgatggaatttcgattgccctgtttggtgaaatcatgatggctcaaaaggttatgtatgaaagatttggcgagaactttgttgtaaattttgtaacaaaacttcgagaagcacactgcccaccagaccttgctgaacagtactaccaaaagttacagggtagttgtatcatctatgtacataaagctctaccatttctgagatcagaagatgtatactgcgggaatatttttaccgagcctggctaccgtggcaaagttccttgatcaaggcatgttagtgagatgcaggggatacatccccagagttttctgctgtgagcatacagggtttcattatgtttgttttgatatttctctgaaagtgatcattgttctgctccgagcttgaaattttttgtaaggcgattcgggtgaagctaaacagatgggataggcaaaagagtgatgtgtgggccgtgtttttcctgacagaaactgtcacaccgcctgttgtcgtgttaccaaattttggcagtggtttttcacccctttgttagctggggtgctgtacagattctttaatatagttgcgtcgttcgcatt

SEQ ID NO: 81836 - DNA, 463 bp, Oryza sativa
  Clone ID: PAT_MRT4530_81322C.1
ctggcttggttcttcatcagctagtaggccccatctgaattgctaccttttgtctactttgttcatgccaatttggctaatctatgtagccaggcttttacaggaaatgcgtgagctgcaagagctggaaaagagattttacgcattcttgcttcatatagcaacacatgatctgtctacagttctcctaactcctagttgtaggcattatctagagaacataatgcagttgcttttgattacttcatgcagccataaagagatatcacatcggaagacatgcgtacagacttttgtcaaccttatcaaagactggtgtagtagctctgaaattgaagataagcttcctggcttccgagtgtttatgattgagaagttcgctactggttgctgtttgcagagtgtccttgacaagtcatttaacttccgtgatggaatttcgttggccaatgggatgcaatga

SEQ ID NO: 81837 - DNA, 339 bp, Oryza sativa
  Clone ID: PAT_MRT4530_81323C.1
ggatttaatgaacggcttgtgatgggaagcaggccgacacttggcgttatgttcaagaagacccttgatgtagttttgcaagtcctcatctcatttcctaatgtgaagcccctgcgatctaagatcatatcatttctccaccgtatggttgagatattacgcatttcggtgcttccatgtattccaattgcactgcgacaggtgctcgttgataatgaggtatttcatgtccctgtctcctggttattgggtttgcaagctattgcgatctctaatagtaactgtagcacctgtgttccctttttcggtaactgtcctgttttagctgtatttctctga

SEQ ID NO: 81838 - DNA, 528 bp, Oryza sativa
  Clone ID: PAT_MRT4530_81324C.1
atggcttgggtctccatgacctggtgttggcacaggagcttcttgctcatgatggcgtgcgtctgcagctggtcgatcacttgctgcaaatcagacgaagcagcagcaggagccttccatggtcagaagaggagcactgaagacatcgtcgccagagctatcatctgcttcagcgatcgatatatcttcagcgggtgccaggggcagtacaggctggggccggagggcgcgctgcgcgtgccggcggcggcggcggaggcgttctgcggcgggccgtgcctggcggagacgaggctggtgctcggctgcgtcgacggcatcatggacagcttccgcttctacaacggcgcctccgtccgcgacgtccgcctcgcgctcgaccgcggctgcggcctccggggcgacttcgacgtgctgcggcgcctcgggggcgacggctacgactacggcggcgggccacgcggcctcgtgaccacgccggcgcctctgctgctgggcgccgtcgtcgcggtgcttctgtggggatga

SEQ ID NO: 81839 - DNA, 480 bp, Oryza sativa
  Clone ID: PAT_MRT4530_81325C.1
atggagaagaagaaaatgaggtttgatggcaagacagcaagttgcggtattttattcgtcgccatgggcggcaactcgtgggcttctcctcctgcccacaccaacgctggtccccgcgcccaacttcggcgagcgaggcagaggaggcacgcggcggcgatgcgttgccgccactgccgccgctgccgtcgcgggcagctgcgggagggagtcgtgctcggcggcggcatcagcttctccgtcggcaccgactaccggcgctggatcttgacgcccgcggcagccggcaaaagaaaagaaagggaagggagggaggaggtgacgcagagggtggagctgcgagagggagtcgtgctcagcaacggcattagcttctccaccggcaccgacgaccggtgctggatctcgatgcccgagctcgccgggttaccatcctcgacatcaccgatgcctgctcgtggcaccccaatcttgtgctga

SEQ ID NO: 81840 - DNA, 170 bp, Oryza sativa
  Clone ID: PAT_MRT4530_81326C.1
tgcacgcccaagctcagaacaaccaatattgaggtgcttatggcggcgacgccggaggacttcgcggccagcaagcgggccatggactacgtgctgggcaagcacgtgaacctcgagccgaatacaatatgcacatcatggaaggaagagagggagactgcccccctgga

SEQ ID NO: 81841 - DNA, 178 bp, Oryza sativa
  Clone ID: PAT_MRT4530_81327C.1
tctggtttcaaccaacgatattatctgtgtgtgtgtgcgccgcgcgggcatgcaccaacgcgcgcaacggatgaaccatccgcctgcatcgatcttcctgcgatggccgccgcgtcgacgttccctctggctctgctgctcgccattgttgccgcatgctgcgtcgccgggggcgagg

SEQ ID NO: 81842 - DNA, 2250 bp, Oryza sativa
  Clone ID: PAT_MRT4530_81328C.1
atgccgaggaagatctgggtgtcgccgacgatgttgcgggccgtggccgacgaagatctgggtgtcaccgacgaggtagcgcgcgatactgaggaggatctgggtgtcaccgatgccgacgaggtatcacgcgctccgcgcgcgatgccgacgaggatctgggtgtcgccgacgaggttgccggccgtcgctgacaaggatttgggtgtcgccgatgccgacgagttgaaggtttttcttaggtgtacggatttgatggcggtggcgtcgcggctcgcggtggcgcgggtggcgccggacgggggagcggcggggaggaggaggaggaggagggggcggccggtggtcgcggtcccgacggcggcggggagggggagggggcgaggcggggccgtggcagcgagcccaccgacggaggaggcggtgcagatgacggagccgctcaccaaggaggacctcatggcctacctcgtctccgggtgcaagcccaaggagaactggagaattggcacagaacatgagaagttcggttttgaagttgatacattgcgtcctataaagtacgatcagatccgtgacatcctgaatggacttgctgagagatttgattgggacaagatagttgaagaaaataatgttatcggtctcaagcagggaaagcaaagcatttcactagaacctggtggtcagtttgaacttagtggtgctcctcttgaaacattacatcaaacttgtgctgaggtcaattcacatctttaccaggtcaaagcagttggagaggaaatggggattggatttctcggaattggttttcagccaaagtgggcactgagtgacataccaataatgcccaagggaaggtacgaaattatgaggaattacatgcctaaagttggctctcttgggcttgatatgatgttccgaacatgcactgttcagattgcaacagcaatatttgctaattctcccttcaaagaaggaaaaccaaatgggtatcttagcttaagaagccatatttggactgatactgacaacaaccgctcagggatgcttccttttgtgttcgatgactcatttgggtttgagcgatatgtggactatgcattagatgtcccgatgtattttgtctatcgaaataagaagtacattgactgtactggaatgtcatttcgggattttatggtaggaaaactcccacaagctcccggggagctgcctactttgaatgactgggagaaccatctaacaacgatatttcctgaggtcaggctgaagcgatatctagagatgagaggtgctgatggtggcccatggaggagattgtgtgctttgccagcattttgggttgggctgttgtatgatgaggaatcactgcaaagtatttcggacatgacctctgattggacaaatgaagaaagagaaatgctaaggcgaaaggtacctgtaaccggtttgaagacacccttccgggatggatatgtaagagatctagctgaagaaattctgcagttgtccaagaatggattagaaagaagagggtacaaggaggttggtttcttaagagaggttgatgcagtgatcagttcaggagtgaccccagctgagaggctgctcaatttgtacgagacgaagtggcaacgcagcgtcgatcctgtcttccaggagttgttatactgatgctgagaaacctcttacacagcaaaactggacagtctgtagatgtactcccccatacagaaaaaacctcatatccattctatttcatgcctcggcagctaatgtccgccatccgttctttttgagcctgaagagggaaaaataaccgccgtgcagcaattcagcttcacggactcaattgtttctgcctcctggaacatttgaggtcggaagcctttgtaggtgctgtctttgttggggccttttacaacttccgatttccctcgtcaacagggagatgggacaaacccctgtttgtaccagaccctcttttgttcctgatgatttttgtatgaaaaataagcccatctggtgcatgatggaaactatatatatatatggttccagaaaaaaaaaaaaaaaaaaaaaaaaaaaaaaaaaaggcacccagtaccattaccacccttggcggtgtcttgtaatgagttttaacagtatagtggttcggaagttaaaaataagctcagatatcatcatatgtgacatgtgaaactttgggtgatataaatagaaaaaaagttgtctttcatattt

SEQ ID NO: 81843 - DNA, 2501 bp, Oryza sativa
  unsure (1)..(2501): unsure at all n locations
  Clone ID: PAT_MRT4530_81329C.1
atggcggtggcgtcgcggctcgcggtggcgcgggtggcgccggacgggggagcggcggggaggaggaggaggagggggcggccggtggtcgcggttccgacggcggggagggggcgaggtggggccgtggcggcgagcccaccgacggaggaggcggtgcagatgacggagccgctcaccaaggaggacctcgtggcctacctcgtctccgggtgcaagcccaaggagaactggagaattggcacagaacatgagaagttcggttttgaagttgatacattgcgtcctataaagtacgatcagatccgtgacatcctgaatggacttgctgagaggtttgattgggacaagatagttgaagaaaataacgttatcggtctcaagcagggaaaacaaagcatttcactagaacctggcggtcagtttgaacttagtggtgctcctcttgaaacattacatcaaacttgtgctgaggtcaattcacatctttaccaggtcaaagcagttggagaggaaatggggattggatttctcggaattggttttcagccaaagtgggcactgagtgacataccaataatgcccaagggaaggtacgaaattatgaggaattacatgcctaaagttggctctcttgggcttgatatgatgttccgaacatgcactgttcagattgcaacagcaatatttgctaattctcccttcaaagaaggaaaaccaaatgggtatcttagcttaagaagccatatttggactgatactgacaacaaccgctcagggatgcttccttttgtgttcgatgactcatttggatttgagcgatatgtggactacgcattagatatcccgatgtattttgtctatcgtaataagaagtacattgactgtactggaatgtcatttcgggattttatggtaggaaaactcccacaagctccgggggagctgcctactttgaatgactgggagaaccatctaacaacaatatttcctgaggttaggctgaagcgatatctagagatgagagggtgctgatggtggcccatggagggagattgtgtgctttgccagcatttttgggttgggctgttgtatgatgaggaatcactgcaaagtatttcggacatgacctctgattggacaaatgaggaaagagaaatgctaaggcgaaaggtacctgtaaccggtttgaagacacccttccgggatggatatgtaagagatctagctgaagaaattctgcagttgtctaagaatggattagaaagaagagggtacaaggaagttggtttcttaagagaggttgatgcagtgatcagttcagccggcatcaccgacaacgagataggccacaccgaccccgactgggtcgccgccgtgtccgcccaggccgccaccctcgtccacgccagcaacgtccagtacaccgtcccccaggtggcgctcgccaagcgcctcgtggaggcctccttcgcggaccgcgtcttcttcgccaacaccggcacggaggccaacgaggcggccatcaagttcgccaggaagttccagagggtggcgcgccccgacggcgacgcgcccaccgagttcatgtcgttcaccaactgcttccatggcaggaccatggggtcgctcgcgctcaccagcaaggtccaataccgggagccattcgcgccggtgatgcccggcgcgacgttcgccgagtacgggaacctagaggaggccaagaaggtgatacagtctggcaaaattgctgccgtgttcgtcgagcccgtgcagggcgagggtgggatccatagtgccaccaaggagttcttgcaggggctgcgggatgcctgcgatgaggctggagctctcttggtctttgatgaggtgcaatgtggtctgggacgcacaggttacctctgggcgtatgaagcctatggagtactacctgacattatgaccttggcaaagccattggccggtggtctccccattggtgtagtcttggtcaccgagaaggttgcttcagcaataaacttcggcgaccacggtaccacattcgggggaggccctcttgtttgccaagctgcattgaccacattggataagatccagaaacctggcttcctagcagaggtggccaagaaaggagagaacttcaagcagcttctcagtaccaagctgagcggaaacgcccatgtgaaagagatccgggggatcggtctcattgtcggcatcgagctcgatgtcccagcgggtcctttggttgatgcgtgcttggatcgcggtgtcatagtgctgacagctggtaaaggcaatgttgtgaggctggtgccgccactcatcatctcggaaaaggagcttgagcaggctgcagaggtgataagggactgtctacctgcacttgatgcctctacctcttaatgtaagccacatgcttagcaatggaggctagaatgatcttncccttttgggaagaccctagcaatggatgtagaatgaacttccctttggggtga

SEQ ID NO: 81844 - DNA, 306 bp, Oryza sativa
  Clone ID: PAT_MRT4530_8132C.1
aactgggccgcccgacacagcacggcccacgcccagccatgcctaggctgaggctagtcgggccagcacggcccgaccgacacggccgtgccgtgccacgggcggcatacacggcccaggcacgacccaataccactcgggccgtgccgggccgtcccgaaggcacgatggcccatcgccggtccaccgtgccgagggtgcagcccaggcacgacccggctgtcgagccgggccggtacgggcatgaccctagtcaggccgtgccatgcttgggccgggccaaaatagtgtgcttcaggccgggcc

SEQ ID NO: 81845 - DNA, 392 bp, Oryza sativa
  Clone ID: PAT_MRT4530_81330C.1
gaaaagatattgaacatactttactattaacattagggaacacttctactttctgcttacactttcttattacgggaattttcataacccaactattgctaaactataaacactctaggcaacaccagaacaaaggcttgaacagcgttgatacttcttttcaggcagatgttactatgataacatccaacaggccacaagtatattcctagactaacttttttggacagtccctgactttgcgaagaccacaccagcagaagcacacggaaggttggacccacagaaaaacaccacggcgcagagactcacatgatattgcttcatccctaacattgtgccatctctaccactacactcactagccaggatgctgtcccacgcggagagcg

SEQ ID NO: 81846 - DNA, 444 bp, Oryza sativa
  Clone ID: PAT_MRT4530_81331C.1
atggcagaagaggaggagaagaaggcgatcaccggctcggcagcgacggcggcggcgcctcctcctgctgctgctcagcagaagaagccatgcgctgctgctgcgaagaagaagaaggtgcggatgcctgacaactacgtcgcttccatcctgacactgaagaggaacccacggcggagccccgagtacatggagagcctctcgccggaggagcgcgagggggaagtggaggacgccgagctgggcgacgagttcgaggcgttccaggaggaggttcgccgcgccgtcgagaacgacggctgctacatggtcggcgagagctacttcgctgagacggcggcgatccaggcggcgatggaggaggagtggaccaagatcgacatgagccgtgtcatcttcggggactgggactacgacgaccccgaatccgtacagtacctgtga

SEQ ID NO: 81847 - DNA, 251 bp, Oryza sativa
  Clone ID: PAT_MRT4530_81332C.1
ccaaaaaaaaaaaaaaaaatccggtctcaacatattcgctcatctgtgctagtcagcttcccttcaaaaaaaaaaaaaaaaaaatccggtctcaacatattcgctcatctgtgctagtcagcttgccttcaaaaaaaaaaaaaaaaaatccgtctcaacatattcctcatcttctatcacttcccttcaaaaatccgttctcaacatattcagctcatcttctatcagcttcccttcaaaaaaaaaaaaaa

SEQ ID NO: 81848 - DNA, 1110 bp, Oryza sativa
  Clone ID: PAT_MRT4530_81333C.1
atggccgccgcctcccgtccgccgcacggccgcctgtcgcgcggccacctcgctccgccgcccgaccggctgccgcacggccgccgccacccatccaccgcacgggcgcctgctgtgcggccggctacctccgtcgccgccgcccggcccgcagcagagaggagaagaatcggaggaggcggggaggggaatcggaggagaggggaagggggaggaaggggagatgaaggagaggaggctgtcccggtttttattgcatccgggactattgtggaatttggtcgaccgaccaaagatggtttctccaccagtgttaagatgaagcaagctaatgtaaagtacctaaagattcatatatgtatgtacttcctccgtttcataagatggcatggagaaactttacgcgaaagccttaagcgccgggagcattttctggccctgcaactcggcctcaagaaggggatgaaggtcctagacgtggggtgtggaattggagggcccttgagaaaattgccagattcagcatcggtgactggattgaacaacaatgactaccagatatcaaggggccaggaactcaacttttctgtcggtttgagtgaaacttgcaactatgtgaagggtgacttcatgaacatgccaatccctgattgtaccttcgacgcagcctacgccctcgacgcgacgtgccacgcccctgacgctgttatattggcgaaggatatggcagaggaatcgccgttgccatggtaccagcctcttgatcccagccagctctcgctcacacacttccagttcacccgtatcggccgcttcctcggtcaaacactggttagtaagcagttcatcacccagactgaagcaactgaatttttagcatgttcttgggagagactgtacagtacaattgacttctttttacctgcgaaaaatccacagttgaagtggcttgagttcctccatcttgccccggaaggaagcctgagaatctgcagattccttgcgacatcggtcgattccctcgtgaagggcgggaaggaagggatatttacaccccttttcttcgtcttggctcgcaaacctctgcagaagcaggaagaacaaatctga

SEQ ID NO: 81849 - DNA, 456 bp, Oryza sativa
  Clone ID: PAT_MRT4530_81334C.1
atggcgcggtggtgctcgatctgctggttttggaggagggtcgcggcgaatccagcggcggccgcggcgtgtggtttcgagctggcgtgcgcgggcggcgttgacacggcacggcatggcgcggcggcggcgcacaccggcatgggggagagcgcggggtggcacctagcagaagaggagttggagacggcggcgacctcatcagtgggagaggcggtgaccaagaacggtaggaagccgtgctctatagcggtggtgtacttcggctcccacaacatggaggtcactgacaatgctagccctgttgctagagatccagtccggcgaagggccacctgcctccgccccctctcccttctccctaatggcagcttgttgatagcctacacatgcaatgacgacatgaacgacgacatgcttgggccggtggtcttcaagtcagggcgtctaacctag

SEQ ID NO: 81850 - DNA, 439 bp, Oryza sativa
  unsure (1)..(439): unsure at all n locations
  Clone ID: PAT_MRT4530_81335C.1
gttctttcttaagccgaccaagatcgtggcgctgggcattttttaaagccgncggcgggttgaaacacccctagcatctcgctcaagagcctggccaaaaagggcatgttctgagttctacttacttctgcttcctggccgcacccgtagcatcagccgtaatggcacgcccgttcttctcgtcgctggcttcgacggactcggcgctagcggagcagctgatcaaggacgtcttcgctgctcgatggcagtagccgacgacaaccacaggctggcgttgctgatgccatatcgcgccggccattgcgtgggttctttacaacatccttcatccggcgctgaaccagcttaaaccagatgcagtatgagcatgtgctcgtccgcgcaattaccagccagttactgtgagccacatttcatttgctgacgatggaagtgt

SEQ ID NO: 81851 - DNA, 381 bp, Oryza sativa
  unsure (1)..(381): unsure at all n locations
  Clone ID: PAT_MRT4530_81336C.1
agcacgcgcgtaagctaaatccttanaccgcccccttttttttttttttataccttaaacatttatataatatcatcgtgctttattaaaacggacgcaccccacancacaaacattattaaattactcggcagctacatgcatgcactcaacactactgttacgagtagtggtcgtttacttgtccgcacgtcagggtaaagaacgatcactccctttaaattcccggttgtctagttgcatttatgaacacgccttgttcgcctccacactacttcgttcgcacctagctcacctacttgactcaaccacctgggtgtagggccgcacaccttcccggtcgcacattttgttatctaatggatttcttcttttttccac

SEQ ID NO: 81852 - DNA, 1284 bp, Oryza sativa
  Clone ID: PAT_MRT4530_81337C.1
agttgtcctccatgaagtagaacagccgcagaagcccccgccggagcgggttccggtcgtgcgtcggcaccagcttctggctgatcagctggctgatgttggagctgtgcgtcaccagcttcgacggcgcctgcgacggcggcagcagcagcagcgactccaggtttgatatatctatgtagcctaattgatcgggatcgagctcctccatgatcagcgcggtgtactcgtcgacgcgctccaggatcttggacagcttgtttgcagaggcagtcagggtgaggacctctttgagctcctcttcagtgatctgaccatctgcattcttgtcaaccatgtcaaagaaagtctgcagcttggcatcaaatcctggatcagagagctgctcccaaaactcccggagctgatccttggtcagcaactgagccgtgatccctcgccgccgcgcaagcgagtagaagatctgaaccgcaaactcctcggatccaaccattcctggaacaccttgagctgaccgatgcactggccgaagcgggagcggaggaggaagccgtcgacggcgaggcgctcgaacctcttctccacctccggccagccattggtgacggcgctggagttgaggaactggagcccgcgcagcgggcgggcggcgccggtcatgctccggtcgaggcgagggcggcggtcgttgccgttgccccggcgcgtcgccgccgccgccgccgccgctgagaacgccgctggggaacttccacgacgcgatccgcctcagctcggtcctcaccgccttgagccgcgacgagagcccgccggggccgggcgccgcggacggcggcggctgctgcgcgaggccgcgcgcgaggagggcgacacccacgtggcctgaccccctcgggggggggggggggggggtcgggcccgagggtgatgtggccgcccctccttttgtctccccgaggggtcggaccgctcccgtttcggccccgagggccggggcgccccgaccccgtcggtcccggtcagatatatgccaggcttcatcccaaccattgcaaggaagtctttgtatgaagaagggcagacatgcagcttgctaaactgacgcgtggtggacgagagtgaccggtctgtgactggtctgacgcctgtcatgtcataggcggacaaccgcgctcccgttttgcacagatccaccagaacacaggagtagggtattacgcttctcagcggcccgaacctgtatacatctcccgtgtcttgtgcgtttcctttctcgcgaaacat

SEQ ID NO: 81853 - DNA, 651 bp, Oryza sativa
  Clone ID: PAT_MRT4530_81338C.1
atgaatcacccgtcctccgccgcgaccgccaccgtactcctcctcctcgccctcctcggcgtcgccgctggcggcggcgaggacggccagaagcgcgccgccggcgtgtacatcgtcatcgtgcagcccccggccgacggcgccgacaccgtcgcctaccacacgtgcatcctcgccgccgcgctcggcagcgaggagagggcgaaggaggcgttgctgtacagctaccgggcggtcgccagcgggttcgccgccaagctcacgccgccggagctctccgccctgcagaaggaaagggccaaggcccaaggggatcctcttggcaattccgaggtcaatgttaggcttggttcagtagtggctctggctcacagctttgctgatgatgcactgcactcttccgagtgtttgaccttacctagaaggccgagaaagattactcatgatgtggcaattgtggctaatgcaacgagaggtgataagttgataacatttaagaacataatatacaaaattcttctcgcaacgaagaagaagaagaagaagaagaagaagaagaagaagaagaagaagaagaagaagaagaagaagaagaagaagaagaagaataggaatagaaaaaggagcctccacgtcgctctcatggcctag

SEQ ID NO: 81854 - DNA, 750 bp, Oryza sativa
  Clone ID: PAT_MRT4530_81339C.1
tttttggcacgtagaagtacagagggtctataaatagagcaacgaagcacgaaataaaggaaaatgtggttccatgtcaagatgaagtcacttgatgggtccaaaatccttttgtaccacagctcttctcctggcacaaaaattttgttctttcctgagcttgccacaccaagtttactagcagcgaaccctgcctgtttctggtgagttggtatagttggttttgccttctcatcatagaacctcacggttctctgcctcttgagcgccatctcatcgtccaccttccccgccccaaacatggcatcagctacagcgagtcagcgagcaagaactcgtcaaccacaccgcgcagcagccttggcagcttcaccggccgaatctggcggggaggcggccaaagaccgatcttctgcgcagcatcggcacgaggagggtggtcagcgcagcggtggggatcgtagagcctggaggaagcagaaactcctccccgtggatgctccccaccctgggcttaattactttattagtcgccgctaatcgatggctttgggggttagtggtgcacttgttactgtggttaatggtaagcaagcgagagttgttcagattctttttttttctttttctctcttctttggcgattatcagaagggagagatgagaaggtgggtggtaggtggtcgtcgaggggaagaagggtatgagaaataaaatgagttttttttcctgcagcccggggatccacta

SEQ ID NO: 81855 - DNA, 417 bp, Oryza sativa
  Clone ID: PAT_MRT4530_8133C.1
aaatatagatggtcaactgggccgcccgacacagcacggcccacgcccagccatgcctaggctgaggctagtcgggccagcacggcccgaccgacacggccgtgccgtgccacgggcggcatacacggcccaggcacgacccaataccactcgggccgtgccgggccgtcccgaaggcacgatggcccatcgtgcttcctcatgttatttaagtctattttgcatcccaatatttttttatttgatcgggccgtgccgggccggtccaccgtgccgagggtgcagcccaggcacgacccggctgtcgagccgggccggtacgggcatgaccctagtcaggccgtgccatgcttgggccgggccaaaatagtgtgcttcaggccgggccgtgggcctcgggccatatggccatctata

SEQ ID NO: 81856 - DNA, 196 bp, Oryza sativa
  Clone ID: PAT_MRT4530_81340C.1
gcagaggcctcttcttcttcgtagccttcgagctcgagctcctccatagattagcttggttagcgccggagaagagtccggggagtcggaaactcgtagctggggttcgttgcggcggtcggggcggccgaattgattggttgggtcggagcggatgatgatggcgaacgcgaagctgaccaagcaggcgctgctg

SEQ ID NO: 81857 - DNA, 249 bp, Oryza sativa
  unsure (1)..(249): unsure at all n locations
  Clone ID: PAT_MRT4530_81341C.1
atgcacgcgtacgttttcttggnacctctaaagcaaccgcgcggttttgttttgggtttttttttttttttttttttttttttttttttttggtgtttttntttggatttatntggcatcaagttgtaactggcacgcatggggatgcctggctttttttttaacatttgaaccattttacttttacaatgggggggggggggcccccctcggtgggaatgctcctcggggcattgttgtcgtttggat

SEQ ID NO: 81858 - DNA, 894 bp, Oryza sativa
  Clone ID: PAT_MRT4530_81342C.1
atgtcttgagactggcaactcggaggcgaaggcggcggcggactcaatcctgttggattggagtataattccactaaagttgcctatctatcgtgtgttcttgtgttcttgtgatttgtttccctttttcctgcttaaatcagtgttgaatcttgtaagatcctgtcagccggctgcatcaaccccccacatcccggcctcccactagaccaccaccctcatcccgcggcggcctccatcgtcgactccgcttcccccgtgcgcagcccacatccacgccgacagtccgtcgcctacgccacgtctcgcaactggatccgctcctctccgtcgatctccaccacggtccctttcgcgccgcaccggaagctgcccgccagtcctctgatcgtcgctggatgctgtcggcgggtgatgcagtactcacccgtctcccctccatcagccgcaccggaagctgcccgccagtcctccgatcgtcgctggatgctgtcggcgggtgatgcagtactcacccgtctcccctccatcactgagggacattcccatcaacaaaaggtacacttggcggcatcactaatttaactccaatcgcttatatacaaagctgccgagaattgagtttaatttatgcggaagagtgctagggagcggtatgctgctcttagtgctgacgacaaggaagctaggcttcaaaagatgcgagagtactaccagcgaaaaaagagtattgatcctgtacctacccatggtatttaaattattatctcacaaacggcgtagatctgaagtgaaatcttgccactggacacaagctcactcttcttcaggacgtcaggttccttcatcacccgggtactctttcctactgtgaaaataagaccagtttcttac

SEQ ID NO: 81859 - DNA, 534 bp, Oryza sativa
  Clone ID: PAT_MRT4530_81343C.1
atggcgccgcacccgctgctgaggggaggggcgaggcgggggaggaagtacgcgcacgggatgcaccccgcgcagatggaggcgctgcgcgccatgtgcggcgcgctcatcccgtcgctgcccgtggacgcggacggcggcgacggcgggcgccgccccggcgacaaggacctcgagcggttctacctcgcctccgccgccgactcctccatccccgacgaggtggcggagctgctggtgacgcgttgcatatgggaggcggtggcgctgacgtgggtggtgctgtgggcgctgagcacgcgggcgggcacgctgctgctgtgcggccgggacagcgtcgccgccgtcgacggcggcgggttcccgttcgtgtccgtgcgccgcttcgccgacatgccggcggcgaggcgggaggcggcgctgtggcggtggagcggcgcgcggtggctcttcttcccgctccgcatcgccttcgccatcgccaagatcctctgccactacgtcttctactccatgatactcgtatcagcctaa

SEQ ID NO: 81860 - DNA, 670 bp, Oryza sativa
  Clone ID: PAT_MRT4530_81344C.1
ttagcttggtggattagtgagctcgctcctccttttggcacaaattctctcgagaaggagagcgaatatgccgtctctgcggccgatcttgctcgccgccgccgccgccgtcgccgtcgtgtctctgtggccggctgcccgcgtggtggccgacatcgatccgtcgtctgggatgccgtcgccacctgcgaccacctcgccgttcccgttctgcccgacgacgccggcggggatctccacgcagccgtttccctgggcggagccgtctccgacgacgacgaccaccatgttcccgcaggatccagggtttcttgcatcggcggcatgccatgcgaggacggcggcgctggcatggattccggtggtgtttgtgttttctgctttcttggtgtttttgcagtgaatcgtactcactgccattgatgttgtatgtatgagttgaattcagattccatgatgtttctgaatattgcagctggtgtgatgccatgtaacatggtaatttgatagcctttgtattgtatcagatatatagttgcaaacactatgtcaaaaggagttcctctttttctctaaaaaaaaaaaaaaaaaaaaaaaaaaaaaaaaaaaggaaaggaaaggaaagatacatatgtacttgatatttgcactaaaaaaaaaaaaaaaaaaa

SEQ ID NO: 81861 - DNA, 852 bp, Oryza sativa
  Clone ID: PAT_MRT4530_81345C.1
gcataaaactatgttaaactcaaacgctgaacacagccggagaagacgtttacatggaggtcaaagtttgttgttgggtaagtatatgtcgctcgaacgactatgctaacgaagttacaggccagcagatgaaatgctgtttcagcttcttcagatttttcttttcttaactaaaacggcaacaccaaggctacataagagctactacaacacttgaatacaaattgggtcggttttacacttctacgaatgaccatcatgcttcccaagctcgctaggcgggggtaagagaagtgcaaggcgctgcttgtatctttcaatccgtcggagccgctccttttgcaaaccagcacggatcttttttgcacgcttcacatgctgcttcagcaagtcacttgcagtatattcaccggtttcattatgccaaaaatcagaaaatgccagtatgatccagaattgcctggaaagaatataactaagtgttatgctgtacgatgaattagcataactaaaatgcttctcttcctctgagttctctttctcagcatcattgtccttttctgatatcctagagtccacgactgaagcaggcagtggtcttggaagaattggtgcaccagttccaaagcttggctgcaagaactgactttcatgtggaactccattacgcacccatgatcgacaaagtgcatacaaggatcctgactcactatccatcaagttaactttacggtcattaataaccactgttgtagagtcctccttgctcctttcactatcttttgagttgttgatctcttgaggagatggagttacagctggtagtggaatgacctcagaagtagcattgtg

SEQ ID NO: 81862 - DNA, 228 bp, Oryza sativa
  Clone ID: PAT_MRT4530_81346C.1
atggcgccgttggatgcagggttcggcgtggacgtccaggattgcatcccaatgatgaaatcaggagtccggaagtcttcggaagagttcggggtgtctagattacgggatatcattatttggggttatatgctgcggatgataggtgggccgctgatggtgacagctcagtacgggaactcggcagtcaggggtggcttctcgaagtaccaggagggcatcggatag

SEQ ID NO: 81863 - DNA, 446 bp, Oryza sativa
  Clone ID: PAT_MRT4530_81347C.1
tgtgtttttttttttttttgtttttttttttttttacggaaaaatttcgctcacataaatggaaggcttacatttttattgttattatgcaaagttggtcttccaaagctctatgcgtggtcaaacagctggtttggacatagggaacaagtactctgtctagaccggccttgatgttttgctaaagcatgttaaatagggcaagggcaaatttccccacttgacctgcctactgaaaattgcaccgattattgaattttgtcctttataattgggaattgttagcctgtttgagaaatatgaattggtagcttatagaacatgctgggaatatgagctgcagatatatggggtgacaccaccggaggctcgatatcctgaattctttagattgcaatgcaacaaacaaaagaaattcagggtctagttcatcaagtactcctatt

SEQ ID NO: 81864 - DNA, 512 bp, Oryza sativa
  Clone ID: PAT_MRT4530_81348C.1
cacgaggctttcttttccctctgctcttgcgagtcgcagttgcagatttgattattgccagagggaggacggatggttgctgccaatgccaccgtcatggatagggttccttctgtgtggaatcggccttttttcatcagggtatatatcaaagtcacagccggtgatgtttagaaaagcatagtcaagagcaaaagatctcccaggggcaggccatgacatgttgtaagtgttggcacctggtctcatggagatgacttgggaaaaatcgacatcgacactcatgaagtagggggtaccatatgtaataggatcaatatcatcaacaacctctgtggtgccgccctggaggaagagcctaggtggttgtgcggtgttgtcacaggtgaggttgaagtctgggttcctgaagcagccggaaccgatgccgaatgggtagttgaagctcaggttgccgcagctccgtgggcagccttccaaagtgtccgcagaaagaagaaaggtgctgttga

SEQ ID NO: 81865 - DNA, 2871 bp, Oryza sativa
  Clone ID: PAT_MRT4530_81349C.1
atgaggtcggctcggccggtcagaccgggcgccaggccggtcagaccgccgacacacctccggtcagaccggccaggatcgtcggctgagggttctgttgatgctgttcgagatggtcctctggagattacaacttcgaccagtactgatacaaaacgtggatcaacttcagaagtcgctgctcctttgcacattcaacgacgacatccgccggaacaaatcattggtaatataggtgagcggactacaaggtctaaggaggaagtttatgtcaaacaaccaccaggttttgaaaatcctaattttcccaaccatgtttttaaattgtctaaagctttgtatggtttgaaacaagctcctagggcatgggaatttgagatgagcatcatgggtgagttctcgtactttttgggattgcaaattaagcaaacacctcaaggtttcggcggtctaaccggcaactcaccggcggtcagaccggcagcattgtggcggtcagaccggcgggagcacggcggtcagaccggtggcagcgacagcgagcggcaggcgatctcggcggttagaccggcagtcctgcacatactcctcgatcctgccggacttagggaccaccgctttcagaagcacttggtggcctctgccttcctcgttgcagtttacagtgacaacatgctgaggaagatggtggtgagctgcagtggagagcttctttctggccaatctgttcaaatttgcctagttccagcgctgcatcagcccgctcgtcagtgccgcgacaacccctccgggccgccgcctgccaccgtcctcccctccacccgcccgaccgccgcctgccacctcctgccaccaatagcgacggcggcggcggtggtggcggggccggcggtggcggcgccggcggaggccgatggagctgtcatattggtaggcggccgagcggcagctaggaagatgtcgccaaggaagaagtgtgctgggaagaaatcgtccctgcggctgacgagcagtgaggttccattgaaggcattggacatgtcttgggttcctcaaggcaaacctagcaaacctacgaagcctaaggaaaaggttgatgattggggtgagagtgatgaggttgagtatgttggtgtagatgatgagaaagagaaatacaacgacttggtttcagatgatgaggcagttgacgcagactatgaccctggttctgacgaagatcaagacgatttagccgttgacgatgaggagggttgtgagtcagtggctcatataaagaagcttccttacgcacataattgtgctagcacagctggtttggagaacaattgcatggccaccaattcatgggtgagagatcgtgtgatcaacaagttgagacaagaaccaacccttggtgctactgctttaaagaagttcttggaagagaagtacaagatcaatatttcttactacgttgtttgggacggtaggcagatggcacttgatgaaatccttggcaaatgggaagatagcttcgatgcagcttacaacttcaaagcagagttggagaggacaagtcccggatcaattgtggaggttgatcatgtgacagtggatgggaagaatcatttcagcaagatgtttgtagcactgaaaccatgtgttgatgggtttcttaacggttgcaggccatatttaggtattgactcaactgtactgactggcaaatggagagggcaattggcatcagcaattgggattgatggccataactggatgtttcctgtagcatatggagtctttgagtcagaaagtacagataattgggcttggttcatggataagcttcactcggcaattgggtccccagaggggttggttctgtccacagatgctggtaaaggcattgacacagcagtcaccagagtcttcaccaatggagtagagcatagggaatgcatgagacatttggtgaagaactttcagaagaggttcagtggtgaggtctttgagaggaatctgtggcctgcatcaagggcctataggcaggacatattcgagagtcactataatgagatgaaagaggcatgtccaaaagctacagaatggattgataacttccataagcacatttggactagatgtcagttctctactctcagtaaatgtgactatgtcacaaacaatatagcagagaccttcaatagttggatcaggcatgagaaatcactgcctgtagttgatttgatggataagattaggcaaatgatcatggagagaatgtctgttaggaaaaggcttgctgtcaagttgactggtactattcttcctagtgtaatgaagtccctgtatgctaggagcagggaccttggatacaagctgtactcagcccacagtcacctaggagaaataggagggactgtcatttcacggagggggctagaattggaacagtttgtggatgactgctactctgttgcaacattcaagaaggcatatgcaggacatgtagttccaatgacagacaagtctcaatgggccaagattaatgtaggattcaagttatatccacctctgttgaagaggtcagcaggcagacctagaagcagaaggattaaaggaatggaagaaggaggttcaggaaaaagaaagtatagatgcaagaggtgtggtcagtttggccatatcaagaagacttgcaatgaaccagttgctgatccatctgcccctccaccagccccaccaaagcccaagagaaaaagagtgaagaaagttgtgctttctgtgcaagatcctgttatacaagtcccaacagctactgtccacaccttcaagatcacaagcatctggggtaactcaaacaagcccaataacaaggagcagggctag

SEQ ID NO: 81866 - DNA, 1461 bp, Oryza sativa
  Clone ID: PAT_MRT4530_8134C.1
atggagcttgcagcagaaggccaagcagaaatttgcattgaaactctgctcaccaacttgacggcctgctgggagagaagcaggacagggagcaaccgacccgagtgtaagattccgttattatgccctccgcagaggccggctgcggtgtgcatcggccccaaccaccacaatcccttctaccacctgatggagcaggagaagaaggtgatgctctacggcattctgatcctggtggacgagcagcacaaggctgccgtgctgaggagattagtggatgcggtcactgccctcgaaagcgttgcgaaggagcattattacatggagcaggtgccttgcgatgccatgagacgtactgcgggtttcgtgcagatgctgctcctcgacggatgctacatccttggcaagttcgtgctccatgacctcttacccgtcagggccaacggtgcggggacgagccagcagcagcaacatggtactggaagcgcgatgcagaacatggaattggtgcgcgacgtgttctaccgcctggataaccagatacccttctgtgtcctccgcgccatctacggggtgctccgtgaatgtagaaccacgccgggggtgatggcgagggagctcgatgagacgttggccgtccaagtccaggcacttctcaaacatttcggatactccattaggacccaagtgccccgcgagatctggcacctgcatcacatgctgcacaagcacttcgtcccacaggacgatcctattcctaccggcgatgctgttcggctgccggtcgacgtcgtcgacaccggccggagatcagctacggcagccgcccccaccttgtaccggtggcgcgcagcgacgttctaccatgccaccggcgtgatcttcatgaaacgccacctccgccacggcgccagcagcggcgcgtggcgctggttcgtcgacggcggcggcgcccgctccgttctggacgtgaagttccatccgctgacgctgcggctgagcatcccgccgctcatggtggacatgaacacgtccacggtcctccggaacctgatgatgctggagcagcacaacccgagcctggggagccaggtcacggcctactgctacttcctgtcgcagctagccggcacggcgagcgacgtcgcgctcctcgccaagaaggggatcatcgtgagcctcctggccagcgacggcgacgtcgccaggatgctcggcgagctctgcgtcggcatcaccatcaacccggccgacgagcgcagccacaactacctgctcgacacgaggaagggcctcgaacgtatgtacaagacccgcgtgattaggtggatagcgcagctctaccaccgctacttgagcaatccgttcgtgctgacggtgctggtggctgccatggttggatttgtctgtgaacttatacaggcaatctatgcagtcaagtccttcaagcgccgaccataa

SEQ ID NO: 81867 - DNA, 204 bp, Oryza sativa
  Clone ID: PAT_MRT4530_81350C.1
ataatctttccacgggataaaataaatacaatacccttggaatactctcaggtgaaatgctacaatggtatatccgtgcgcttgtggataaactctgtaaccataatttatcaggagtatttctgcgccattgctaggaattatatttctagtaatgtcattaagaaataccaacacaccattggcaaaggtgggcgtgatgga

SEQ ID NO: 81868 - DNA, 633 bp, Oryza sativa
  Clone ID: PAT_MRT4530_81351C.1
atgccggttctataccgtcagcacctatttggtttcacaactgagccacttgcgaggtgccgctacacgcagccagttcgccgttgcacgcctcgacccgcgctcccacaaccctgccgttggcatgtccatgatctctcgtcgtcgcccttctccacgccgcctccgatctccacctcgaacttcgtcaccagaacatcgtcccgccgtcgcgcccgcctcgtcggttttctctgcgcccctgatctcggtctcctccgcgcgcccaccgttgacaccatcctccccgcgatctccacgcatcccaccacgccggccgcccccagtctccacctcgtcaaccgcctctgcgtgtccactggtctcggcctcttcaacaacatctcccgctttgacctgattaaccggaagtacattgagttgcacttcaacctgttcctgtacatcattttagctccaccccgccccacgctctctgattcactgtcaacaccaattgatttttggtccactctgttcctgtttgattttggttctgtggctaatattgatcgaccgatcgaggcgtggcccgtgctgacgaacggcgttgccgcggccgccatcttcaccgtcaccgacatctgctcttag

SEQ ID NO: 81869 - DNA, 804 bp, Oryza sativa
  unsure (1)..(804): unsure at all n locations
  Clone ID: PAT_MRT4530_81352C.1
gcattctgaaccccatgatataagaatatcaaaattcaaaattttcatgtttagaacaattactggcatgaaaagaaaatctaacaattactagtaacaacctattattatttctatagacgatgagaatccctgcaggagttgctctcttagtagatccttctcttgctcattgttagggaatctagttctggacagagatggcgtattgagataaatatcatcgcagtcttcacatggttccttctcatgcaagtgaattctctgtaaagcgatagctcgctgaatggcgagccttatgtacttgatcagattctcttctgtctcaaagcctattatatccaacaacctcaagtttttatgcttgatgatgtcagatgatgcttcccacacaacattactactgccagcattgtgctcaaaaccatcccccccacatatgtggtgagatatctacaaggaatacataattagtattggccaaagttaaactattgcacatatttattttgcacgtacaggtacagaaggcacatgcatataataagtgtatgttgggcaggagcatatatattatcatgcatggtttaccttaacatgaaaactcttgagggagggtgcgccttcaaggacaaacagtgtccagtcgaggccactgtcattactaatgttgtaaagatatacatccttaagattgcgaaatatggggaatagtttcttcggctcttctggcatgatccaaacagcgttattattgggcagtagcaaccctnccatgagctgccnntgacactgcgcggacgg

SEQ ID NO: 81870 - DNA, 3201 bp, Oryza sativa
  Clone ID: PAT_MRT4530_81353C.1
gtggatccccgggctgcaggtgatggctttcaagccgcggctcagggcctgccgcgtggttgtttggtggttgcctcttgtgttgttcctgtggcttcggcacgctgcacgggatggcatgtagcctaggtgcccggttcggcccacgttcgcccgtcctgttgcgggagctggtcctgcacctttcgtgcaatttccacaggataccggggggaggaggggggccgttggcggggcgctcgtgcagcttccgccgccccgcccctgtagcctttacaccacactgcgccccggcgctgcgtgcctcccgacctaagccgcacgcgccctggggggcatcggctcggcctctcccctggatccacagctcctggcctgtagcattgtgcgcaagctggaagtcagcgtcaagtacttcgagatcgctgggcatctaccacttcgtgcttggtcagatggtcaccgatttcccaacgcttctcaggtacaacgtggatgttctaaggccaaaataccagtacctgcggcgcgtcatggtgcgaccgctgattgatctcgtcgagttcccccggtttttcagctactctttggaggacaggatagtgccaaggcaccaaacattggtggagaacaggatcaacatgaagctgagatacatgctaactggatctgacgaagatttttcacaaagggtacgagaagctgttgagaggagagccagatttgaagctggaaatgttgaggcatcagattcgcaggcgactaccgacggagcagaagccacagcaccagcatctcaagacggctgggaggcagatacatagatagagcaggcagggcaaaattgtaatctcacattgtgatgtaaagaaaaatagaaagaaaaaacgctttgcttccatgccattgataagcacagcacaggggaccgtgagtccatgaccacattgtacttgcatgaggcgaagatcattggcaagcagtacaaaatttcatttatacaagttgcccagaagggaccagttaggcactagcattagcatgagtttgtcctttatttttctagcaaattacacaaaataccgagggaaaaaggaggatggaattcaggtcgcactttcagctaggaatgcccagcccctgaattattaacaccacacagaattacggcgctgcgtgaatcccgaactaataaacacgcgccttgggtgggaacgactcaacttcactgtccaatgtgttcatgtggactggcctgtatgccaagcgaaccttctcattctcccagtaccccagcgagtgcttcatccattgctcatcatctcttttcgtgaaatcttcacgagcatgagctcctctgctttccttccgagcctctgctgagtgcatggttatgcatgcatttatcaagagattttccaactcaatggtctctatcaaatctgaattccatatgagactccggtcactgatcttcacatcatgataactttcccatgccttggtaatcaatttgcaaccttcctcgagtgtttcttgcgtacggaagacagcagcattattttgcataacacgttgcatgtttagacggatcttggaagttggcaatgatccatttgcatttctcagcttgtctaaccaggctatggtcttttctccagcacttttttgaagaggtttctgcttctcacctggcttagcggtttcagctaccctgtttgcacaagctctgccaaaaacaactatgtcaagaagtgaatttgcacccagacgatttgcaccatgaacagatgcacatgctgcttctcccgcagccatcaaaccaggaacaacagaatcaggattgtcacccttcatagtcactacctctccatggtaatttgttgggatcccacccatattatagtgcacagtaggcaagacaggaatgggctccttggtgacatcaacaccagcaaaaatagcagcagtttcagaaataccaggaagcctctccttaagaacttctggaggcagatggttaagatgcagatagatgtggtccttcaatggcccaacaccacggccttctctgatttccattgtcatagatcttgaaacaacatctcgagaagcaagatcttttgcagtaggagcatatcgttccatgaaacgctcgccttcactgttcctaaggataccaccttcaccacgggaaccttcagtgataaggcatccagcaccataaatgcctgtaggatggaactgcacaaactcaaggtcctgaagtggtaaaccagcacgtgcaaccatagcgttgccatctccagtgcatgtgtgagctgaggttgctgagaagtaggctctgccataacctcctgtggccagaattgtatttgtagcacggaaacggtgaagagtgccatcctccatgttcaaagcaataaccccctgacaggtgccttcactgtccatgataaggtctagcgcaaaatattctacaaagaactgagtattatgcttcattgcttgaccatacagagtgtgtaacatagcatgtcctgttctgtcagcagcacatgcacatcgataggcctgcccacctttcccaaaatctaagctctggcctccaaaggcccgttggtatatctttccatcttcagttcttgaaaatggcaacccatagttttcaagttctataactgcttttggtgcttctctgcacatatactgaatagaatcctggtcaccaagccaatcactacccttgacagtgtcatacatatgccatctccagtcatcttccgtcatgtttccaagagcagcatttatgccaccctgcgccgcgacggtgtgcgaccgcgtggggaagagcttggtgatgcaagccgtgttgaacccgtgctcggagagcccgatcgccgcacggagccccgcgccgccggctcccaccacgaccgcgtcatacgagtgatccaccaccgtgtacgacgacgaggcggtggagaagagcctagcggcggcggagacgggggcggaggaggaggagcccttgcccttggagaggctcctgaggccacgcgagacgcagccgcgccacatctcgggtggatctcggtgcaccgcacgccggcgatggagatcggcggcacgagagaaggcggaggcggaggcggtggaggagggagagggcggcgcggaagacgacgaggtgggaaagtg

SEQ ID NO: 81871 - DNA, 2751 bp, Oryza sativa
  Clone ID: PAT_MRT4530_81354C.1
tcagatggcaccagctgccttgttgcttggagcatcaacatccaaattgagagctctagccctgctccttgttattgggcttgtttgagttaccccagatgcttgtgatcttgaaggtgtggacacagtagctgttgggacttgtataacaggatcttgcacagaaagcacaactttcttcactctttttctcttgggctttggtggggctggtggaggggcagatggatcagcaactggttcattgcaagtcttcttgatatggccaaactgaccacacctcttgcatctatactttctttttcctgaacctccttcttccattcctttaatccttctgcttctaggtctgcctgctgacctcttcaacagaggtggatataacttgaatcctacattaatcttggcccattgagacttgtctgtcattggaactacatgtcctgcatatgccttcttgaatgttgcaacagagtagcagtcatccacaaactgttccaattctagccccctccgtgaaatgactagaaaaatggcatgtgtgcaaggtatacctgttacctgccattgcctacaactgcattctcgagtgttcaagtcaacagtgtgcctccatgtcttcaaatccctaccagtccctcctatttctcctaggtgactgtgggctgagtacagcttgtatccaaggtccctgctcctagcatacagggacttcattacactaggaagaatagtaccagtcaacttgacagcaagccttttcctaacagacattctctccatgatcatttgcctaatcttatccatcaaatcaactacaggcagtgatttctcatgcctgatccaactattgaaggtctctgctatattgtttgtgacatagtcacatttactgagagtagagaactgacatctagtccaaatgtgcttatggaagttatcaatccattctgtagcttttggacatgcctctttcatctcattatagtgactctcgaatatgtcctgcctataggcccttgatgcaggccacagattcctctcaaagacctcaccactgaacctcttctgaaagttcttcaccaaatgtctcatgcattccctatgctctactccattggtgaagactctggtgactgctgtgtcaatgcctttaccagcatctgtggacagaaccaacccctctggggacccaattgccgagtaaagcttatccatgaaccaagcccaattatctgtactttctgactcaaagactccatatgctacaggaaacatccagttatggccatcaatcccaattgctgatgccaattgccctctccatttgccagtcagtacagttgagtcaatacctaaatatggcctgcaaccgttaagaaacccatcaacacatggtttcagtgctacaaacatcttgctgaaatgattcttcccatccactgtcacatgatcaacctccacaattgatccgggacttgtcctctccaactctgctttgaagttgtaagctgcatcgaagctatcttcccatttgccaaggatttcatcaagtgccatctgcctaccgtcccaaacaacgtagtaagaaatattgatcttgtacttctcttccaagaacttctttaaagcagtagcaccaagggttggttcttgtctcaacttgttgatcacacgatctctcacccatgaattggtggccatgcaattgttctccaaaccagctgtgctagcacaattatgtgcgtaaggaagcttctttatttgccaagttctcccatccggtagtctagaagcatgtatcctccacttgcaccgcttagccttacagtatgccctatacctccttgattcgctatatggcactgcaagttcaacctcttttagtactgcatattgtctaatgcaccttttaaagcaattgccatcttcaaaagttacaccaacggctatcttaggattgtctacatcagttacatgagccactgactcacaaccctcctcatcgtcaacggctaaatcgtcttgatcttcgtcagaaccagggtcatagtctgcgtcaactgcctcatcatctgaaaccaagtcgttgtatttctctttctcatcatctacaccaacatactcaacctcatcactctcaccccaatcatcaaccttttccttaggcttcgtaggtttgctaggtttgctacgtttagatgcaatgacttggctctcttgagtggctaatacaatgtcagtacaagcaacttgtccatctcctgcaacagtactagccggcccatcaatgctgccttgatccatacaaggctcggtcctatttcgtgggtcatcactcacattaacaagcaaagggagcctcctcatctcccagtacatatcaaatgcatcaagcaatgaactatccgaagctatctctgcatacctctcaacatttttgtcccaataggttacagttatctcctgaagataactatgttttacctccccatcaagatcattaataaggtcaatccaacaaattgtatccttgtctattacccacttaatatcacgagagacatgataatccggtctaccgttctcatcaaactcaacgtatggaccaactcgaacatcaactctgcaagctgcgctagcgtccatcccttgaggaacccaagacatgtccaatgccttcaatggaacctcactgctcgtcagccgcagggacgatttcttcccagcacacttcttccttggcgacat

SEQ ID NO: 81872 - DNA, 859 bp, Oryza sativa
  Clone ID: PAT_MRT4530_81355C.1
ggcaagcagtacaaaatttcatttatacaagttgcccagaagggaccagttaggcactagcattagcatgagtttgtcctttatttttctagcaaattacacaaaataccgagggaaaaaggaggatggaattcaggtcgcactttcagctaggaatgcccagcccctgaattattaacaccacacagaattacggcgctgcgtgaatcccgaactaataaacacgcgccttgggtgggaacgactcaacttcactgtccaatgtgttcatgtggactggcctgtatgccaagcgaaccttctcattctcccagtaccccagcgagtgcttcatccattgctcatcatctcttttcgtgaaatcttcacgagcatgagctcctctgctttccttccgagcctctgctgagtgcatggttatgcatgcatttatcaagagattttccaactcaatggtctctatcaaatctgaattcctgtgaaacaaatagtgaattatagatagccagtgtaagatagtaacaagcaagcaaaataagtcggtgcaatccttgcaagaaatggcataccatatgagactccggtcactgatcttcacatcatgataactttcccatgccttggtaatcaatttgcaaccttcctcgagtgtttcttgcgtacggaagacagcagcattattttgcataacacgttgcatgtttagacggatcttggaagttggcaatgatccatttgcatttctcagcttgtctaaccaggctatggtcttttctccagcacttttttgaagaggtttctgcttctcacctggcttagcggtttcagctaccctgtttgcacaagctctgccaaaaac

SEQ ID NO: 81873 - DNA, 249 bp, Oryza sativa
  unsure (1)..(249): unsure at all n locations
  Clone ID: PAT_MRT4530_81356C.1
atcacaaatgatatttttaccttaagtgcacaattcaaccccacaatgnaggttgctacctaatacccaaagggttaacaaaacgtctagggatggtggattaggggtccccccactcaggatattcatcacagtgaattgccgacgagtgatagataaataagagcctgacngnccgggaagagntatgtgatacaatttcttaatggttgtgactattgtatgtctaagagttgccttgttactaca

SEQ ID NO: 81874 - DNA, 728 bp, Oryza sativa
  unsure (1)..(728): unsure at all n locations
  Clone ID: PAT_MRT4530_81357C.1
cccacgcgtccgcccacgcgtccgcccacgcgtccgccctcctccaccgcctccgcctccgccttctctcgtgccgccgatctccatcgccggcgtgcggtgcaccgagatccacccgagatgtggcgcggctgcgtctcgcgtggcctcaggagcctctccaagggcaagggctcctcctcctccgcccccgtctccgccgccgctaggctcttctccaccgcctcgtcgtcgtacacggtggtggatcactcgtatgacgcggtcgtggtgggagccggcggcgcggggctccgtgcggcgatcgggctctccgagcacgggttcaacacggcttgcatcaccaagctcttccccacgcggtcgcacaccgtcgcggcgcagggtggcataaatgctgctcttggaaacatgacggaagatgactggagatggcaacgctatggttgcacgtgctggtttaccacttcaggaccttgagtttgtgcagttccatcctacaggcatttatggtgctggatgccttatcactgaaggttcccgtggtgaaggtggtatccttaggaacagtgaaggcgagcgtttcatggaacgatatgctcctactgcaaaagatcttgcttctcgagaatgttgttntcaagatctatgacaatggaaatcagagaaagccngtnggngnttgggccatttgaaggaccacatctatctgcatcttaaccatctgc

SEQ ID NO: 81875 - DNA, 1498 bp, Oryza sativa
  Clone ID: PAT_MRT4530_81358C.1
tttgtttttttttttttttttttttttttttttttttcagataaacatcaatatatagcgggcacttgttgcaaaaaacttaacttacaattattccaagtacatatgaccttattacacaattaggtcaaaacaaagaaatccatagcatgtaaaccttggggttcacaaatgaggaattaaggaatggtaacaaaagagggagaacataaatgtgaagcaaaagtcacatccaatcataacatcatcaacacgtacgcttgcgacttgatcaaggagggtgtgaaactatcaaaccgtgtacgtcgtcatcgttgagcacgtacttcaccaggtaattgaatcacgcagctaaacttgtagattaatcagtagttgatgaccctgcagttcttcctgatctgcccctggtacccggtcttcacctggatgctcgccaacttcaccatggccgccttgaacctgtcctcccaccacccggggatgacggcgttgtccaccaccatcttcgccgtctccggcgacgtcaggagcgccgcgtcagaggtgaagagcaccttgtggtcgagcacgttcttgtagtactggttgtccagcgtgttgggcgtcacgaagtccagcatcaccgtgggatcgttgccgccgggcgtcgcgtcgagcgggcactgcgacctgaggaaccaggcgaagccgccgtcgatgtcggagaagacggaggcgttgaggcggtcggggacgaaggaggagcagtgggagcggccgacggtgtgggcgcccgagagcaccaccatgtcctccacggagaggcccttgacggcgaagctggagacgaggtcgctgaggttggacgtcggcggcgggaggaagtcgatcgggccggagtcgttggagaaggtcccgtcgcggcggcccgacggcatgtcgaagtagaccttcccgccgctgaggaagtaggtggcgtcgcgcgccgcgaaggcgatgatgtcggcgcacgagacgacgcccgggcacgccgcctccacggcgtgcttgatcgcgtcgatgaggtcgaagccccgcatggacgggttgttcggcgcgctcagcttctctggcgtcgggttgaacggcgtcgggtccaggaggatcgaagcatcacaaccctcgacaaagcagtcgtggaagagcatgcggatgacggcggcgccattgccggggttctggcggacggcctccccgacgacggccttgacgacggcctcggcctgggggcacttgtcgcggtagtacgccaactccagtggccagtaagggtgagcctggcatgccacggccagcagcagcagcagggcacacgtcaccaatggcagacttggtgatgaagccatggctaataagcttgcttagtgtgtagctagcttaggcttactgtaccttttgtgcttaagctaattaagctgctatagctaataacaggaagagagagaagtgctcgcggacgcgtgggccgacgcgtggg

SEQ ID NO: 81876 - DNA, 683 bp, Oryza sativa
  unsure (1)..(683): unsure at all n locations
  Clone ID: PAT_MRT4530_81359C.1
ccggccgggatcttccatcatcagtgctttactcatccttgatcacagcaaaaatgacatatacactctacatcggaaacaaacgttactcctcttggtcaatgcgaccatgggttatcctccaatccttcgccattcccttcgaagaaaagctcaacctcttcaaacccggtcttcgccaacccgacttccttgaattttccccatctggaaaagtcccctgtcttcacgactctgaaaactcaattgtcgtgtgggactcactcgccatctgcgagtacatggccgagaagcatcccgagatgtggccatctgatgtcgccgcacgcgcctttgcacgaagtgctgctgctgagatgcattctggtttccctgccattcgcgacgagtgctccatgaacgtcggtctctgtattgagctgggtgaaccgagtgaagcactccaactagatatcgaccgcttcaatgcgctgttcaaggaaggattggaaaggtttggtgggccatggcttgctggcaagtttagtatcgcggatgccatgtatgcgccagttgcatcacgcctcaagacgtatggtattgtgttggatggtgcggcgaaagagtatgctgatagngttgntttttgcaacctgccgtccaggattggattaagggaaggctttaaggagacaagcagagag

SEQ ID NO: 81877 - DNA, 392 bp, Oryza sativa
  Clone ID: PAT_MRT4530_8135C.1
cctctccctaccgcgaaataacgccgcgccggcgcccaccatcgtcaccgccgcccatcgctctccaccgcgcccccattgcacctgacgcgaaggaggagcccgaggaggaagaagaagaacaaggaggctgacgccgacgcctgcaggcaaagaagacgaccgagacctcttgtatgagggaacaccgaagaagtcgtccacgcgcgggcgaccgggggcgaaccctagcccccggccgccgacacccacccctcctctcaccgcctcgccgccgccggaaaccacgcagacgttgggatggcggcggcggggccaaaacccccgacggcggctcgtctccggcgcaaggaggtggcacagcgcgccgcgaaggcctcgcggcgtgtggc

SEQ ID NO: 81878 - DNA, 1476 bp, Oryza sativa
  Clone ID: PAT_MRT4530_81360C.1
gacgaccttttcctttaacctgccaatttcttccttccttccatccgtcctgcaacctcctcctctgcttctcgatttctcctcctccactccatcgtctctctctctctctctctctctgcagctaactcctccgaattaggaggttcatcttgatgtaattgactggattcaataaaatttttcattatcttgaaaaagaaagtagcggaggtgcaacgttggcatatggagaagcggaggcggccggcggcggcggcgatgcttctggtgctcatccctgctgcatcgcgcccaccccatgggatcgtagcagcaacagaatccagtgtccagaatagtgagcagagctttggtttcaaccttacacttgccaagactattgtggagtatgcctcagctgtctatatgacagatctaacagagctctatacatggacatgctcaaaatgcaatgacttaatccaagggttcgagatgagacgtctaatcgttgatgtccagaactgcttgcaggcatttgttggtgtcgatcacaatctcaacgctatcattgtttcaatcaggggaactcaagagaacagtggcttctacgggagttatgatatccctctgtattcatgcctaaattttctgctcagtgtacagaattggattaaggatatgctatggaagcaatctgatctgaactacccggacatgcccgacgcaaaggttcacactggattttactcttcttacaataacacacttttacgtccagccatcgcaaacgccgttcacaaggcgaggaagttatatggagatattagcataatagttacagggcattcaatgggaggagcgcttgcttctttctgtgcacttgatcttgcgattacccatggaggcaacaatgtttacctgatgacttttgggcagccgcgcgttggcaacgctgcatttgcatcctactttaccaaatatgtgcccaatacaattcgagtgacacatgagcatgacattgtgccgcatttgcccccatattttttcatttttccagaccaaacataccatcacttcccaacagaggtctgggaacatgaagtcgatggcagcacagtctaccaagtctgcgacggcagcggcgaagatccagactgctccaggagcgtgctggtgctgttctggagcgcgtcagaccacctgacataccttggagtggacatggaggccgacgactggagcacctgcaggatcgtcctgggcaggagcgccgccgagacgctcctgctgcagcacgcacggcaactcgccggcggcgacgacgagagcggcggcgtcaatgtcgtcgtcagagatcacggtgtgcaggttgttggttcggagatagcagttgcggctaggtagccgtcccgtatgtacttgtgcaacttgaaagtgcgttttgtgaacccaactccctgatggtatctctatatatatagttttggctgt

SEQ ID NO: 81879 - DNA, 372 bp, Oryza sativa
  Clone ID: PAT_MRT4530_81361C.1
tttttgtttttttttttttttttttttttttttttttttttttttttttttttttttttaaaacacaataggcttaaaccctttttactaattttgccttagcacaaggttaattggtccagagagacggtcaatgcccccataagggagaccggtttggatttcggggcattgcgaaggggaccaaaacgggggggtcaacccacacgggaagataacattgatattggatttgccaaagttcacacttgccggcgggggtttttcctttgtaggagaacaaaacaggggatgccccattttttgggccaggcaatgacctgcagcgacgtgctcaatgaggggtggttgtgggacagggttcttcctcat

SEQ ID NO: 81880 - DNA, 638 bp, Oryza sativa
  unsure (1)..(638): unsure at all n locations
  Clone ID: PAT_MRT4530_81362C.1
agcattataaaccgcagaattttcatcattagcaagcgacggaggagaatgaagctgctcagtgagctcggtttcttcgatgctgatactactgctgctcctgaaactgctactagccaaggtcacaaaagagtttctgctcagactggcaagcctcttagggggtccagtttcataaacttctgctgctgtctcctgtgaagtttcatacatgatgctgtatgcaaggagattcttccgttttctcgaatatgcgctctctgccttcgcgatgtcctttgcagagccacaagatgaaacagcttccttgagacacgcgaaagattttgattttccattgtagaatttggagatgctacgtcggatgggaagcgcctcctccaatgcctccaaccccgcgaggccccctcctcccccgacgaacgcgctnatgcacctcctccccctcctcctcctccttccccggcggcgagcactcgtcgctgtccttcccaatcgaggacgagctgcacgccgccggcatcgccgcctcgcgggccgcggcgcggccgacgtccaccggcatccgtccgtccgacccgaagccgacggccctgatcgcggtcgggacaccccggatcaccgcacacaaccgccgc

SEQ ID NO: 81881 - DNA, 1455 bp, Oryza sativa
  Clone ID: PAT_MRT4530_81363C.1
atggcgcggagcgtgtcgtacgtgtcggcggcgaagctcctggccatggcgcgcagcaacccccgcgtcgccatcatcgacgtcagggacgaggagaggagctaccaggcgcacatcggggggtcgcaccacttctccagccgcagcttcgcggcgcggctgccggagctcgcgcgtgccaccggcgacaaggacaccgtcgtcttccactgcgccctcagcaaggtgcgaggtccatcgtgtgccaagatgttctccgactatctatctgagaccaaggaagaatcaggaacaaagaacatcatggtgctggaacgtgggttcaatggatgggagctttcgggacaacccgtttgccggtgcactgatgccccttgcaaaggcacatgctcacctgaagaacctgagttattactgcagttcaaaccagaccctggtcaacgcttattgggttgggcccaccctgagagacgccgcagcccggaagagccagcccactttgacggtttgacctccccccacttgctccggcgtgcggccgtggcgtgggcagcaagccgatccgccgccaaaccaggcgcacgcctcgccctcgcctcgcctctttccccaattccgctccgcttcccgcaccttccagatcccccacccatggcgtcctcgcgcctcctctcctcccgccgcctcctccccgccctcctccacacgcccagccccgtcccaatcccacgcgccgccgccgccgccgccggagaggttgggggaacgccggtggcttccttcctccggcggcccgcgcggttcttctcctccgcggcgcggcgcgggccggcgcggccgcgggcgacggacatcggggcgcgggcgcgccagctgcagagcaggcggctgtggacgtacgcgctcaccttcgggtgcgcggccgggttcgtggtcaccgtgctcgccacgttccaggaccagctcgtcttctacctcaccccgaccgacgcgctcgcgcgctacgccaccgaccggtccaagtcccgcgtccgcctcggggggctcgtcctcgagggctccgtcgcccacccctccgcctcctcctccgagatcgagttcgtcgtcaccgacctcatcaccgacgtcctcgtccgctacgagggcgcgctacccgacctcttccgcgagggccactccgtcgtcgtcgagggcttcctcaagccgttcaccgacgacctccgccgagacaccgcggggaggaaggtctcggacaaggcccgggactgcgagtgcttcttcagcgccaccgaggtgctcgccaagcacgacgagaagtacatgcccaaggaggtcggcgaggcgctcgagcgcaacaagaagaagctcgaggaggaggccgccgccgccgccgctgcctctcaagagtcggcgacggccgcggttgctttggatggagccaagtcgagctcataa

SEQ ID NO: 81882 - DNA, 1066 bp, Oryza sativa
  Clone ID: PAT_MRT4530_81364C.1
cagggggcccatttttttgtataatataaggtactagaggatttagttaatttacaaatgttaatttgcatgatacagacatacaccttagggcttaggccatcgatatcagtatgtagtatgctaatttacatacaacacagtagccccaatcatcttgcaggcacagacaacaccatcaaactccccccttatttattcacaatacagaaagacactagcagccccagtaaaacatcaagaatactacgctactctgtcgttttctgatctttgagacgacatgaggatcttggcctatgcagacggcgcaaatccatcattgaaaatgacctcacaggcacagatgatgttttaggatcacaggatcctaattgtagtgctggagcattataaaccgcagaattttcatcattagcaagcgacggaggagaatgaagctgctcagtgagctcggtttcttcgatgctgatactactgctgctcctggaactgctactagccaaggtcaccaaagagtttctgctcagactggcaagcctcttagggggtccagtttcataaacttctgctgctgtctcctgtgaagtttcatacatgatgctgtatgcaaggagattcttccgttttctcgaatatgcgctctctgccttcgcgatgtcctttgcagagccacaagatgaaacagcttccttgagacacgcgaaagattttgattttccattgtagaatttggagatgctacgtctgcccagatcgtaacttccttgcaatttcaacacaaatgagcacccaatagatatcaagaacacccccaaaataaccggatgggaagcgccttcttcaatgcctccaaccccgcgagggccccctcctcccccgacgaacgcgctctgcacctcctccccctcctcctcctccttccccggcggcgagcactcgtcgctgtccttcccaatcgaggacgagctgcacgccgccggcatggtcgggacaccccggatcaccgcacacaaccgcgcacagatttggagagagcgagaggcgagagagaggagagattgtg

SEQ ID NO: 81883 - DNA, 479 bp, Oryza sativa
  Clone ID: PAT_MRT4530_81365C.1
atgaaaagaaaaaaaaaagaaaagagaaagaaagagcgccgtgttgatgagctttctccgcccacatcgccgacatccacagtgccgcgccgccgtccccaacacctgcagctcagctcacttgcagcgtcgcccctggctcgcttgcgctgccgctcaccatggagcttgctgtgcgcacttcccgcggtcatagcatccaaatctggtggccgctcgtcgttcgcggcctcaccccaaaccatggtgtcgccgccgctccagatctaccgcttagaagcttgtgggcaccggatccgcgcggtccagtcgctggagaaaggaggggtggagtttctggtggagaaggtggtggaggctacgacaagaagaggaggaaggcaagccccaggcaagtttctggtggagaagatggctgtgcggcgacgaagatggcgatgagccgagtagaggccaagcgagcaaatgaggaggagtga

SEQ ID NO: 81884 - DNA, 257 bp, Oryza sativa
  Clone ID: PAT_MRT4530_81366C.1
gagagtacaaagcaaattttttgggcttttcaaacaacatgggtcaaagtcgacaagcttctggaactttttacagttaacactttttaggcggttgcgggtaaaactaaaattactggttcccccctttgtaaaaagcatttttttcagttacaaaacaaccaaactttaccttaaaacaaaacaaaggtggttcactttttcaacaagcccaaaacattcaacattttcgaacaaatttcttttgtgacattttt

SEQ ID NO: 81885 - DNA, 605 bp, Oryza sativa
  Clone ID: PAT_MRT4530_81367C.1
attggtcaacctgtttcctcctcttcggctctcctcctcctcctcttgccttctcttcttcttgttcttgcccaatcctagtagaagcgcctaacttgtcgtttgctgtggcttgggttttgagagccggaggaggcaggattgatttttccatgattgggttttcttgattgattggcgcctgctgctgcggtgcttctgcttaagaaccgggatttcccggcgcggaatccggtcatccaagaggtgcatctgaatagataagaagagaacataatctttgggcattctctgtggttgatctctgaaaaaggtatcaaacagcctgcaaattaggtctcctgctctttccatcaaaatgtcagttcggcgccgatcagagagtatggagggcctgttctcgtttgacgagaggaaagatcgaaggtcagatgtggagaactcggaggacgagcggagaaggctatccattgggtcactcaagaagaaggcactgaatgcatcaaacaagctaacacattcactcaagaagaggggaagagaaagtggagaatcggccctcattcacaatcgaagatgtcagggatgaagaagaggagcgtgct

SEQ ID NO: 81886 - DNA, 345 bp, Oryza sativa
  Clone ID: PAT_MRT4530_81368C.1
atggaggagctggtctacaccgtgtggatggatggtggcggtgcgcgacatggaggcccgacagtggtgcagatgacagggtgcctcccaagtgacttcttcctctccctctccatcggccatccactggtggcgcgcagatccggtcggggtgggttggtggcggtggccaagggaggcagcggagagcacaaagatgccggttctacgaccggcaccaatgacactaggagaacttatgaatcgagatgggagagcgtgggcgcatggggtggagatggtggaggcagtggtgttattctagttgtcgatgaagagtgcctcgaaccgccggtgcgcgcgtga

SEQ ID NO: 81887 - DNA, 1823 bp, Oryza sativa
  Clone ID: PAT_MRT4530_81369C.1
atggcgcttcgggcggcggagctccggcgactcgtcgtcctcctccgcggcgaggcggcccttccgctccccctcgcgtggcgcggccggccggtgagcaccgccgctcgcgacgacgagctcgccgggaagagcgcctatgaggtgctcggggtcggggagaccagctcctccgccgagatcaaggcctccttccaccgcctcgccaaggagacccaccccgacgtcgccgccgccgccgggtccagccgcttccttcagatcctcgctgcctacgagatcctatcggattcacagagaagggctcactatgatatctacctgcgatcgcagaagcgagttttgcagaagcatcctaggccatctcatcatgtatatccaaatccaagtggttcaggcattgtagtaacaagagaaagtaatgttgttgagtggctaaaatggtataggctcactattgatgacatagttacaaagaagagggttgcgacagggtcaggttactttgataagcttgaaagtgaactgtacacagcaatccatgctgcatactatggtccggatgttcggtctgtggatctccttcctgattgctttgaagctgaggagaggtctgtatatgagacccctgagctattgcaccttgtatcgggtcgtgatctgtttggtattgttagtctagctgatagagttcaacagctgccagatgcttttcaggagaagcagacgctacctggttttaaaacttacgggattagtcagcatgtttcaacaaacttggagaaaggcacagtacacgccagtcctgtatatattcacaagagagagattgacaagaatgatggtcctcattcagatgcctacaaggatattgaattgtggatctgtgggaaattagtagctactgcaacgaggagccctaagtgcaattgtattgataaatcagatgtggaagatcacatacatgtatttcttgtcccaaatgaagtggcttcatctgattttacacaagagcttcctatcctgggaactattactggcttggccaccactggggaggaaggatcttgctgtgtctatgatagccgtgggataaagacacatctaattgtcaagcacagaacattaatggtcaaacacatgcactggtatcaagttggagatgaaatttctccatgtgagtgtcgatgcagtagggctcggttgccacctagtagatattggctttttgagcctcgttgttatatgcatgacactggtggctggtacattgagacctttggaagggacaagaaagggaggaaaattctatcaccaagacaatgggatggttccaatgaacactctgaaaggaggttgcatccagcaatgtatctggcagctctagcttacagatctttggatattgaggatgctcaacgaaagaaatggagcattacgaccttcctggaactgcagtcatctcatatctgtcaattgtgcaaaaaaatcttcaatgggggaaaggaaagttcatgagaacaccatgagaaatgcacagcagtttcaagaatttgatctttgacaactctgatactatgatgccatgccttgttcacccgttgatcatatccttgagattttggtgtggctatgtagcatcatggcactgcactggaagatatatagtgcacctctagaataagcaaaattatctgaggctgttcattgtgctgattgttggatgtggcacccctggtcaatagcttttttgctgtgctgatgtcagaatttccacaccatttcctatgaaaggacagacattatggcttcagccatggcca

SEQ ID NO: 81888 - DNA, 378 bp, Oryza sativa
  unsure (1)..(378): unsure at all n locations
  Clone ID: PAT_MRT4530_8136C.1
cggtcgcctggaccgagctaccgagctaatccagccatgctcagcagcgcactcttcaccccctgcaaccctactcagctgagcacgtgtcgtgcctccgtgagcacgcccctcaaggccctgcgattatgacatgagcgcgtgccagggacatccacgaccatcacatgccaggcctggagcagcatcccgtgcgaacgcgtctcgtacatgggcaagtgccagttgataaacctggtattgttgggcgctatgtcgcttcctacattcgggatgcttgtgccatacggcgccttgttcatgcccgccaggaccaggaacgccagcacntgccaggtcggcaaggacaaactagacaacgacgtgatcaccgaggag

SEQ ID NO: 81889 - DNA, 877 bp, Oryza sativa
  unsure (1)..(877): unsure at all n locations
  Clone ID: PAT_MRT4530_81370C.1
ttttctngngggctggcnnggcctttccgggcaccgaanggtttggaattggcacttggggcaaacatccaaccgcccnttggaatccccaagccatttttggaaattgttgtttccatttgaatggggcttgggggggtngtttggcttgttttttggggtcccggcggtttgcccnccaccaaagggaacgcccgaaatttccaaaagaaccccacccccnaatgaaactttcccttgaaaccgaaaaanggaactcctcccagggggaaanccttctttcccggcaaacttaacaaancccaccgccacccgaatcttgccccaaacgttcctcccaancctcctnccnttgaaaaaaaaaggancctgggaaaggtgggaanaaaatttcatccnccaccnccnnncggttgcccgtttcctccnggaaaattcaaacaccgggcgtttccgaccctggattncnccaaaagggccgaanggggcatccccccttgccattcnttcccnccattgggaaaaaacttgaaaggtttttttccccgggggaattaatgggttgttttgggggttnattaaaaaatttgggggcccgcctttgaanccanccctngccctttgggggtntaaattgaattgaatnattnccnggttccctccncgtttgttttccccggggggcnaaatttttcttgggctttttgttccnattccnnttnaattaanttnccngggtattgnaaattccccnntttnttcttgttttnccttncccnaaanaaatttttgtttttnanaaaatcccnnttnnattctttttttggggcggtttnttattttattcccctnttntttttnattnaaaaaaaaaaaa

SEQ ID NO: 81890 - DNA, 837 bp, Oryza sativa
  Clone ID: PAT_MRT4530_81371C.1
atggccgccgtcgccgccgccgccggactcatcctagctctcgccttcgcgtcgtcgtcgccgcccgccgccgcggcggtcaagttcaacgtcaccgagatcctgcacgagttcccggagttctccgtgttcaacggcctcctctcgcagacgaggctcgccgaggacgtcaacctgcggccggccgtcaccgtcctcgtcgtcgacgacgccgccgccggcgccatcacgtcgctcccggaggccacgcagggggaggtggtggcgctgcaggtgctcctcgactactacgaccccgtcaagctgtacagcctcaaggcgaagacggcgctcctccccacgctgctccggccgaccgccgccggcggcggcggcggaggcgtggggctcgtgaagtacacccaggtcgccgacgaccagatggcgttcggctccggcgagcccggcgcgccgatcgggtcgcagctggtgaaggtcgtggcgtgccggccgtacaacctctccgtcatgcaggtcagcgcccccatcgtggcgccgagcttgggcggcccctcttccggcggcggcacgccgccgtcttctccggcgacggccaagagcgccgacgacgcgtcggcctcctcgatgacggactacgacgacgatcccatcgctccggcggcggttgatggtccgggaattgtggatacgccgccgacgaagacgacatcgccgtcgacaaacgggacaagtgcggcggcggacgggacaacaacgtcggcgggaagctgcgcggtggtggccggcgcaggcgttgggctgatggcggcggggctcgtgatgttcatttcagtttaa

SEQ ID NO: 81891 - DNA, 277 bp, Oryza sativa
  Clone ID: PAT_MRT4530_81372C.1
gagtcaaaaaaataaatttattatgaaacgaaagaggacgtgacacgttgatagaggcttttgacatcgctccatgcgtggcaccggcataccactcgaacgattgaatgagactcgagctgtacaaatactactagaaaaggctgggggagaccgaatccactgatccccacgctggccggacatgccgcgagagaggccgggaatcactacgactacggcgatatatctatagatgctagcatcccacaaatccctgaaaaggccgatcagctcc

SEQ ID NO: 81892 - DNA, 635 bp, Oryza sativa
  unsure (1)..(635): unsure at all n locations
  Clone ID: PAT_MRT4530_81373C.1
tggagaaagtggaaaagggatggagaagtgaagcttaaagtatttttaaggaagtgaaaaatgctctgtatgatactcaatggtggatatatgtcattacacatttgtctaaactcagagatgtacagcactaagagtgaaggcgaaaataacctatgaacttgaatgatggtgatgtgtcaatgttgattcatcagctgtaacaaaagtacccccctggtgggaatgctgataatggggggagtgatgcatgtatatgggccctctgtacctcccttttaattttgctgtgaacccactactctnagaaatttaagtgttgaaaataactaaccaatacattttggaagtgttcataaaatgttacactgaaatgtaatgaaccagatagagcaactttgtttcaaggaaatggaggtatagaccttaggagctttcccacagtttcatggccagtagattgaaaactaggctgtattattgtttccaatttaagccaccacactgattcctcttcaaaccttacctgaactgaaatgcacattaggggttctctggaggtgaaaacagaccatgtctttagtggtagaaatctctttcaaggacacttctcacttcaccttactcgggtacta

SEQ ID NO: 81893 - DNA, 471 bp, Oryza sativa
  Clone ID: PAT_MRT4530_81374C.1
tagtggatccccgggctgcaggcaaacttaaaaaccgactcatatatgatgacgtaccaaagtaccggtaaaaacatcttcaatttataatagtagagagtagagatttacataatttttttaataagacaaataatcaaatttaatggttaaagtcatctgcctcaaaatatttatgacaagatggagtaatgtatatgtatattatgcaatagagaagagaagtgatttaactggctagcgatcacatgtttcctgcacgattgatttgtggggtagcttttgcaagagcaaaaatatcagctagcaaaagcaggtccaattttaatcgtttaaatccaaatatgtgggaccactgcaacgctcggtttctggttgaaagtcggaaccccatccggtatctttgctgcgaccctgctttgggacggacatgagtcggactctgcactgctcgtgcagcttcacgcgtcc

SEQ ID NO: 81894 - DNA, 1425 bp, Oryza sativa
  Clone ID: PAT_MRT4530_81375C.1
atggcgcaggcggagcgcgagcgccttcgcgtgctcatgttcccgtggctcgcgcatggccacatcaacccttacctcgagctggccacccgcctcaccaccacctcctcctcccagatcgacgtcgtcgtccacctcgtctccacgcccgtcaacctcgccgccgtcgcgcaccgccggaccgaccggatcagcctcgtcgagctccacctcccagagctccccggcctgcccccggcgctgcacaccaccaagcacctcccgccgcggctcatgccggccctcaagcgcgcctgcgacctcgccgcgccggcgttcggcgcgctcctcgacgagctgtccccggacgtcgtgctctacgacttcatccagccgtgggcgccgctcgaggccgcggcgcgcggcgtccccgccgtccacttcagcacctgcagcgccgccgccacggcgttctttttacacttcctcgacggcggcggcggcggcggcggtcgcggcgcattccccttcgaggccattagcctcggcggcgcggaggaggacgccaggtacaccatgctcacctgccgagacgatggaaccgccctgctccccaagggcgagcgcctgccgctgagcttcgcgcgctcgtcggagttcgtcgccgtcaagacgtgcgtggagatcgagagcaagtacatggactacctgtccaagctcgtaggcaaggagatcatcccgtgcggcccgttgctcgtggactccggcgacgtcagcgccggctccgaggccgacggcgtcatgcggtggctcgacgggcaggagccgggctccgtggtgctcgtctccttcggcagcgagtacttcatgacggagaagcagctggccgagatggcgcgcgggctggagctgagtggcgccgccttcgtgtgggtggtgcggttcccgcagcagagccccgacggcgacgaggacgaccatggcgcggcggcggcgcgcgcgatgccgcccgggttcgcgccggcgcgcgggctggtggtggaagggtgggcgccgcagcggcgcgtcctgtcgcaccgctcgtgcggcgcgttcctgacgcactgcgggtggagctcggtgatggagtcgatgtcggcgggggtgccgatggtggcgctgccgctgcacatcgaccagccggtgggcgccaacctcgcggcggagctgggcgtcgcggcgcgcgtgcggcaggagcggttcggcgagttcgaggccgaggaggtggcgcgcgcggtccgcgccgtgatgcgcggcggcgaggcgctgcgccgccgcgcgacggagctacgcgaggtggtggcgcggcgcgacgcggagtgcgacgagcagatcggcgcgctgctccacaggatggcccgcctctgcggcaaaggcacaggccgtgcagcccaactaggacactag

SEQ ID NO: 81895 - DNA, 330 bp, Oryza sativa
  Clone ID: PAT_MRT4530_81376C.1
gggtaaacatgacaaagttcccaacctttttattcatgtaaaacatatttacccaagtccagacccccttatcaaccgggtactgcagaacacagggtctcccaactccgaactttccatccctcgggtataaccatgtccgttgcatgcgtgatgcccgagtttagccaaaactagacaacgggatacgactcgactaaagcagaaagccctttttatttataagctgggctgtttagctaagcagctatgagtactaagcatggggcacgtacacacccttaacgggggggttaaattgataacatggggctcggggtctatttatac

SEQ ID NO: 81896 - DNA, 389 bp, Oryza sativa
  Clone ID: PAT_MRT4530_81377C.1
aacacttatttgctgggagcaatagatgttatattagaagtcccattggcccccaacatggggcaaagccttcctcgcattcgggacggaaatacatatcaagtagcacgttttgctgttttagcatcccaattccgagcagtttggtgacacgacacactgaaaagatgagcgctttaagtatcaggcctcatacggctggctggagtggcccaagtccggggtccagctttgcttctctatagtaagaacttttcggatgaattcccgcctgtcctcactgaataggggggcagccttcgaggcggctaattaatttgggttagaaaagcaagcagtgagtgtggggatgtgagcttagaaccacaacaactttggcgctccagtgg

SEQ ID NO: 81897 - DNA, 326 bp, Oryza sativa
  Clone ID: PAT_MRT4530_81378C.1
ttgtgtaggatcgtaaagggcctttcccaccctaaaagctagctattgaggtgaggggctcccccacttatatcttaggtcctttgcccttccacaactaagtcatttgcccttcctcaaccaatgtaggactattcaacaatctcccccttcacacattggtatccctcagccccttcaccgtatccgggccccactggcccatggtccatcaggatcgtaaagggcctttcccaccccaaaagctagccattgaagtaaggggctcccctacttatatcttaaattatttgcccttccacaactaatgtgaaactattcaataa

SEQ ID NO: 81898 - DNA, 199 bp, Oryza sativa
  Clone ID: PAT_MRT4530_81379C.1
cttgatgggagcagctgctgtgatcaccgggttgtacgtcgtcctgtggggaaaagcggacgacatgaagcggggcagcgagccggcgacggcggcggcggcggcgaagccatgcacggattcgtgtcgcgacgtcgagcgcaccgccgctgaggagcctctcctgctggcagacgccgtctcaagcgagcagctctga

SEQ ID NO: 81899 - DNA, 341 bp, Oryza sativa
  Clone ID: PAT_MRT4530_8137C.1
tttttttttttttttttatatttacatgttttttttttttcacataattttgcatttaccaaatttatttacatccacacatacaggttgtttacatattcttctacacacaatgttattgcttaggctgtgggggaggaaaaatatcaaaaactttagataagataaatgggggggaggcaccccgcactgtgtagggggataaggaaaaagaaaaaacgcgggataccgggaactttgtttatttttcaaaaacaaaaacgggcacgacccacttttttcaaaaacaaacccgcatgtgttttaaacccccccccttataaaaagggggctgggggggg

SEQ ID NO: 81900 - DNA, 980 bp, Oryza sativa
  Clone ID: PAT_MRT4530_81380C.1
atgtatctggaccggttgattcggctgctgccgactggtgttcccgcctacacggttggttggttggtcgcaccaacgtggttaggcattcatgtcttcaccaactggctggacttcgccaccgccgactggtgtttccgcttgcacggccggcttattatgccgccgttgtcgggtgtctacgacttcaccgccggcctgccttcgtcgccgccgactggtgccctcacccaaacggttggttggtcacaccaccgttcatgggcgtccacgtcttcaccgaccggctggcctttgccgccgccgactggtgtttccgcctgcacggctggcctattatgccgccgttgtcgggtgtctacgacttcaccgccggcctgcctccgtcgccgccgactggtgccctcgcctaaacggttggttggtcacaccaccgttcatgggcgtccacgtcttcaccgactggctggccttcgccgccgccgactggtgttttcgcctgcatggctggcctattatgctgctgttgttgggcgtctacgacttcaccgccggcctgcctccgtcgccgccgactggtgtccttgcctatacggttggttggtcacaccactgttcatgggcgtccacgtcttcaccgaccggctggccttcgccgccgtcgactggtgtttccacggttggttggtcacaccactgttcatgggcgtccacgtcttcaccgactggcttgcctttgccgccgccgactggtgtttccgcggttggttggtcacaccaccgttcatgggagtccacgtcttcaccgaccggcttgcctttaccgccgccgactggtgtctctgcctacacggctggcctattatgccgccgttggtgggcatcttcgctttcaccatcgaccgccttcgtcgccgtcgactggtgtcttcattgttgttgatggacgactttattcccacattggccacctctgccat

SEQ ID NO: 81901 - DNA, 368 bp, Oryza sativa
  unsure (1)..(368): unsure at all n locations
  Clone ID: PAT_MRT4530_81381C.1
agctagctgtgcgcggcggcacggccacgcttcagctcgcttctttctttaattttttttcttcttcttctttgtttttaaatttttttctttcgtgtttgttatttaaatttttaccggtggtatgatcgatcgatcgattcttgatgtacgatgcattggttgtcagtccgcatttcttctggtgatcagcgggtggttggtgatgatggttagtgaaagatctcttggtgtcagctcgctatgtacgttaattactacttttttttggttctatagagggaagatttgtgtatatttttggtgtatcattttcggtggcagttgaataaaaaatctccatgcagctcaaaaaaaaaaaaaaaaan

SEQ ID NO: 81902 - DNA, 1868 bp, Oryza sativa
  Clone ID: PAT_MRT4530_81382C.1
ctcgctttgccgacaaatcacgccatagaccgcccgaagctcgtgccgcaaaatccccaaatcccaaatcccaaatcccgccgcctcccagatcgccgccggatcgatggccgccgcctcgccgctcgccgccgcggcggcgctcgccctcctcctcctcctcctcctcgccgccccggcggcggcggagatccgggagacggtgatccggagcgacccgcggagcatcatcccgctcgacgagttcgggttctcccactcgggcgtcctcgagctcaacgtctccggcatcgccttcgacccgccggcctcctccgagctcgacctctcccagctgggattcttcctctccacgctcgacgcctgggtgcacgtcctccgccagctgcaggatctcgacgtcacctgcgcgctccaggccgacctcgtcaagctcgcctactccttcgaccgcctcaggccgccatccaaccccgccggcgtcgaggtcgcccgctcatcatccttctccaccgccttccccgtctccgagccagggcagtacacgctcgtcttcgccaactgcctcggcggggggctcaaggtctccatggacgtccgctccgccatgtacaacgtcgacccgcccaccggcgagcgctcctacctctccgcgggggccaccgcgctcccgaccatcttcggcttcttcggcgtcgcctacgccgcgctcgccgccggctggatcgccatactcctgcgcaagcgcgccgccgtgttccggatccactacttcatgctcgccgtgctcgtgctcaaggcggtcaacctgctcgccgaggccgaggacaagtcatacatcgagcgcactggcacggcgcacggctgggacgtgctcttctacatcttcagcttcctcaaggggatctcgctgttcacgctcattgtgctcatcggcaccggctggtcattcctcaagccttaccttgctgaccgagagaagaaggtccttatggtggtcatccctctgcaagtcgtggccaacattgcgcaggtggtgattgatgagtctgggccgtatgctcgggcctgggtcacctggaagcaggtgttgttgctggtcgatgtgatctgctgctgcgctgtgctcttcccgatcgtgtggtccatcaagaacctccgcgaggctgctcgctctgacgggaaggcggccgtgaatctcatgaagctgacccttttccgccagtactacgtggttgtaatttgctacatttacttcacacgtgtcgtggtttatgcgctgatgaccatcacctcgtaccggtaccaatggaccagctatgtggccaaggagctggccacccttgcattctatgtgttcactggatacaagttccggcctgaggtgcataacccgtactttgcgattgacgatgaggaggaggaggctgctgctgaggcactcaagttggatgatgaatttgagctatgaggatttacaattgccggtcccttcttttgccactgatgatacagatattgtatgtgcctccaaaggacaaatggtatagactggtatctagtccatatccttttcttttcatttcaagttagttatatttttcttgctgtaactggttatggtcaaccttgtgtttgtgttaagaaatgcagcagcttggatttgccttggtctaatctaaaagcattgagatgagctgttctgattgtaccttcgtagcaaatgttgtatctagatgtttacttctcttgtaaaagaagttgactatgattcagtttgtttattcatttagtgctaaaaaaaaaaattgagtccaaaaaaaacctgcagcccgaaaaaaaaaaaaaaaaaaaaaaaaaaaaaaaaa

SEQ ID NO: 81903 - DNA, 181 bp, Oryza sativa
  Clone ID: PAT_MRT4530_81383C.1
cagcatgtcagcggcgagtcggtggtggtggtggtggctctcatcatcgtcggtacaccccctactccaacgtctcctcttctttcctgacggtaggagtcgaagtccacagtcctcgcgagatcgcggaacaaatggtctccgaaggattcgtggtcaacttgatcggagaattcagccg

SEQ ID NO: 81904 - DNA, 4008 bp, Oryza sativa
  Clone ID: PAT_MRT4530_81384C.1
atggcggcggcggctcgctgccccggtgaccatcgcgggggtgggcttctcccacgacgacggcggccgcggcagcagcagcacacagcgagcagccggagccgggcaacctgccgccattgtcaaggccgacaggtaataaacaggtattattacgttcctttcatgtatctttggacgctgtcgattagtccagtgactcctatcccaattcctcttgccacacaccacttatccgctgcagcaacctcgcaatcccctcggcgctcgctggttccagccaagctgcttccgtcctccttcacttcatctgtgcaacaggatcttcctagtctaagtttaccaacatttctccatcttcacatccaatatctctgtacctaccaaaattacaaagagagagaacagggagacagcaaattcaatccgatggcggaagtggcattggctagcttacgattggcagcatcaccgatcctgaacaagctcctcgctgacgcttcaacataccttggagtggacatggcgagtgagctccgtgaactggagaccagcatcatgccgcagttcgagctgttgattgaagaagctgagaagggcaaccacagggccaagctggacaaatggatacgggagctcaaagaagccttgtacaatgccgaggacctgctggatgagcatgagtacgacatcctcaagcgcaaggtgaagaacggaggcgaggatccttctccagatctagagcatgcctcctccatcggttccatcattaagaaacctatgcgcgcagcatcaagcagcttgtccaatctgcgaccgaagaacataaagcttgtacgccagctgaaggagctcaaggccatcctagcgaaagcaagggacttccgtgaaatgcttggcttaccggctggtagcagtgtagagggggcacaaactggacatacaaaaacagtggtcgttactgcagcgacatcaaccccaccaccaaaggtgtttggtcgcgacgcggaccgcgatcgcattgttgatcttcttacccaacacaagacttgtgctgaggctagccgtttcgttgtctccattgttggacctggaggcatggggaaatccaccttggctcagtatgtttacaatgacaagacgatacaagaacattttgacgtcacgatgtgggtttgcatctcacgcaaacttgatgtccatcgtcatacaagggagatcatcgagtctgcaacaaaagagaagtgtcaaagggttggtaatatggacgttctccagtacaaactaaaagaaatactgcagaaaaaagagaaagtcctgcttgtgttggacgacatttggttcgataaatcccaggacgttgaggaatgggacctgctacttgctcccatactatcttctcagaatggggcaaccaaagttctggtaacttctcgatctaagacacttccacctgctcttttctctgaagatgtcattgatttggaaaatatgaaagatactgagttccaggcactcttcaaacaccatgctttctctggagccacaattcgagacctccagatgtgtggctggttcgaagagcatgcagtgaagattactgaaaggcttggaagatctcctttggcagcaaaagttgtaggttccaacttgaaaagggtgatgaatatcgatgattggaaaggtgctctcactataaagatagacaatttaagtgaacctaagagagctctgttgtggagttatcagaaattagatccatgtcttcagagatgctttctgtattgcagtttatttccaaaaggttacaaatacataattgacgagttggttcacctttgggttgcagagggatttattgatgcacgtgatacgaataaaagaatggaagataccggcatggattacttcaaagagatggtctctggatcctttttccaaccattttctgaaagatttgatagtacggtgtacattatgcatgacctccttcatgatttggcagagtcactctctagagaagactgcttcagattagaagatgacaaggtgagagaaataccatgcactgttcggcatttatctgttcgtgttgagagtattatacaacataagccaagtgtctgcaagctacaacatttgcgaactcttatctgcattgacccactagtggatgttgggagcaatattttcgagcagaaagttgccagaatcatcggtcagctaaagcatcttcggtatttgaacatcaagaagacattgatttctgaactaccaaaatcattatgcgatctttaccatttagagttactttatttgcgtccgaaatcgaggttacctgacaaactctgcaatttatgtaagttacgacatcttcaaatgtactctgatggattggagctgtcacggattcctgacataggccggctaactttgcttcaacgtattgatagttttcacgtcctaaaacagaagggacatgagttgcgacagctcaggaacatgaacgaaattggtgggtatttatcgctcagaaatcttgagaatgtgattggcaaggatgaagctttagagtcgaagctgtatcagaaaagtcgtcttgaaggattgacgcttgagtggaatgatgcgaataacatgaatccagagaattgtttacatgttgagattcttgaaggcctcgtgccaccaccacagttggagcacttatcaattagaggttacaaatcgactacctatccaagctggttactcgagggttcccagcttgagaatctagaatcctttgctctttataactgcagcgctttagaaaggctaccatccaataccaagctctttaggcgttgccgtgaattgagccttaagaatctcccgaatatgaaggaactatcatttcttccagcaggtctcacaacgttgtcaattcgtaggtgcccactgcttctcttcgttaccaatgatgaactggagtatcatgatcataatgcactgtcatcggatcattcatctatgaagcagttggcagcattgatggactctgatatatcaaaaaatcttcaaaccattgaacgcgctctagaaagagaagatgaagtagtgatgaccaaggatgtcatcaaggcatggatgcgttgccacgagcagaggatgagactcatttatgcaaggaggattgggctaccattggtcccaccgtcaggacttagtgatctctcccttaaatcatgcacaattacagatacagctctatccatatgccttggtggcctagcttctctgagatgtttgtccttatccaagatcatgtctttaactactcttccgtcagaagaggtcctgaaaaaattgacaaagcttgattgtttgatcattgatgcctgcttgtttctcggatcgttggggggcttgcgagctgctacttccctttcgcatttaaggttgaactcttgccctgctttagagttggcacacggtgcagaattcatgccagcgtcccttaagagactcgcaataagttgttgtgtgcttgcacccgacttgttctgtggccactggccgcatctgaaagatattttcatacacgactgcagaagctctgtgtcgttgtttgttggtgatcttagctccctgaaagaattcacactttatcatttgccagatttatgtgtgcttgaaggcctgtcttcccttcaacttcacagcgtgtgtttggtagatatcccgaagcttactgctgagtgtgtgtcaaagtttcgtgtccaggatttactgcatgttagcagctctgcggtgttgaacaacatcatctcggctgaagatctcccatcctcccttcagcgcatatccatagtggactgccccaatatatcatctttgccagatctcccatcctccctgcagcacatatacatacgtgactgtccactactgaaggagagctgtagagtacccgatggggaaagctggccaaagattgcgcatattcgttggaagcgtattgactga

SEQ ID NO: 81905 - DNA, 2176 bp, Oryza sativa
  Clone ID: PAT_MRT4530_81385C.1
ggcttcaccaaccggcttgctttcaccgtcaccgactggtgttttcgcctatatggttggcggacttcgccgctgtctatgggcatcatcatcgtcttcaccgactggctgcctcatctgccgccaactggtgtcctcgcctacatggctggatggtcacaccaccattgttggcatcaacatcttcaccgaccagccgcctcgttcatcgcaccgactggtgttttcgcctacacggttggttggtcacaccaccgttgtttggcgtctacgtcttcaccgaccggctgcctcgtccgccgccgactggtgtcctcgcctatacggttggttggtcacaccatcgttcatgggcgtccacgtcttcaccgaccggctggccttcaccgccgtcgactggtgtttccacctgcacggctggcctattatgccgccgttgttggtcgtctacgacttcaccgccggcctgcctccatcgccgccgactggtgtcctcgcctatacggttggttggtcacaccactgttcatgggcgtccacgtcttcaccgactggcttgcctttgccgccgccgactggtgtttccgcctgcacggctggcctattatgccgccgttgttgggcgtctatgacttcacctccggcctgcctccgtcgccgccgactggtgtcctcgcctatacggttggttggtcacaccaccgttcatgggagtccacgtcttcaccgaccggcttgcctttaccgccgccgactggtgtctctgcctacacggctggcctattatgccgccgttggtgggcatcttcgctttcaccatcgaccgccttcgtcgccgtcgactggtgtcttcattgttgttgatggacgactttgctccaggaatggatcagccagaacataaccaccggcttgcgtcgaagccgccgactggtgtttccgcctgcacggctggcctattatgccggcggtgttgggcgtctacgtcttcaccgtcggcttgcctttgccgccgccgactggtgtctccgcctgcacggctggcctattatgccgccgttgttgggtgtctacgtcttcaccgaccggcttgcctttgccgccgccgactggtatctccgcctcacgactggcctattatgccgtcgtttattgggcgtctacgtcttcaccgaccgacttgccttcaccgccgccgactagtgtctctgcctgcacagctggcctattatgtcgccgttgttgggcgtctccgtcttcatcgccggctcaccttcgctgccgccgactggtgtctccgcctgcacggctggtttattatgccgccgttgtaggacgtctacatcttctccgaccggccatctcgtatgacgccaactggtgctatcgtcttcacggctggccacgtcaccgccaccgcaaataggcgtcatcaccttcaacgcaagctgtctacgtctgctgccgactgctgcgcatcttcgtcatcattgactgacgtcgttgtcatcgccagtttgccttcgccgccgcccatggtgtcttcactttcatggctggcctattttgccactattaaaggacgtcttcgttttcgtcatcattctacttcttctagcaacttcatcttcattttcttctgcaccggcaaacccaattaccgctacttcgcaagttttgctacttcaccaatcacgacgtctacaagagcttcgacatctcgacatgtacttccatattcgatgcagtgttattctactacaacaagtggttccctaattttcaagatttctattcgaacatcttcaacacgtatcttcactcaagcaatggctactcggcgataagctacagttctcgactctatgttcagttgtttcccaactaaccaaagagtcaggggctacacaaatacaagacttaaaatttgacagatgttatgtcaacatgaagcaatcaattaatcagctaacgagttctatggaatctacttcgggagtcatcagcttcgtcctcgctccaaagcaggcgttctacttcagcaatctcaattattttaccggcaattttggcttcttagcgctgccataatctactccaaaaatctcaagtatcaagttcaagatttaatctacatgttcgggagcttagagttatcaactaatcaactcatatc

SEQ ID NO: 81906 - DNA, 376 bp, Oryza sativa
  Clone ID: PAT_MRT4530_81386C.1
cccacgcgtccgccttatccaagatcatgtctttaactactcttccgtcagaagaggtcctgaaaaaattgacaaagcttgattgtttgatcattgatgcctgcttgtttctcggatcgttggggggcttgcgagctgctacttccctttcgcatttaaggttgaactcttgccctgctttagagttggcacacggtgcataattcatgccagcgtcccttaagagactcgcaataagttgttgtgtgcttgcacccgacttgttctgtggccactggccgcatctgaaagatattttcatacacgactgcagaagctctgtgtcggtgtttggtggtgatcttagctccctggaagaattcacactttatcattt

SEQ ID NO: 81907 - DNA, 2089 bp, Oryza sativa
  Clone ID: PAT_MRT4530_81387C.1
gttcgcgtcagcgggtgttggcgggtgtcggggctggcttctactccaccggcttgccttcaccactgccgttgctaatggcaacaacgtcttcaccgccggcctgcctccgtcgccgccgactggtgtcctcgcctatacgattggttggtcacaccaccgttcatggacgtctacgtcttcatcgaccggctggcctttgccgccgccgactggtgtttccgcctgcacggccggcctattatgccgccgttgttgggcgtcaacgtcttcaccgccggcctgcctccgtcgccgccgactggtgtcctcgcctatacggttggttggtcacaccaccgttcatgggcgtccacgttttcaccgaccggctggccttcaccaccgctgactggtgtttccgcctgcacagccggcctattatgccgccgttcatgggcatccacgtcttcaccgaccggcgtgccttcgccgtcgccgactggtgtctctgcctatacagttggttggtcacaccaccgttcatgggcatccacgtcttcaccgaccggcgtgccttcgccgtcgccgactggtgtctctgcctacacggctggcctattatgctgcatttggtgggcatcttcgctttcaccatcgaccaccttcgtcgctgccgactggtgtctttactgttattgatggacgactttgttcccacattggccacctctcagaatatcaccattggcttgctgtcgtcgtcgccgactggtgtcctcgcctatacggttgggtggtcacatcaccgttgttggacgtcatcgtcttcaccgccgacttgccttcgccgatgtcgactggtgtctccgcctgcacggctggcctattatgccaccgttgttgggcgtctacgtcttcaccgaccagcttgccttcgtcgccgccgactggtgtctccgcctgcaccgctggcctattatgccgccgttgttgggcgtctacgtcttcaccgcctgcttgccttcgccgccgccgactggtgtctctgcctgcacggctggcctattatgccgcccgttgttgggcatctatatcttcaccgaccggcttgccttcgccgccgccgactagtgtctctgcctgcacggctggcctattatgccgccgttgctgggcgtctatgtcttcaccatcggcttgccttcattgccaccgactagtgtcctcgcctgcatggctggcctattatgccgtcgttactgggcgtctacatcttcaccgaccggccacctcgtatgacaccgactggagctatcgtattcacggctggccatatcgccgccgctaataggcgtcatcatcttcaacgtaagctgtctacgtctgctgctgactgctgcgcgtcttcgtcatcattaactggcgtcatcatcgccggtttgccttcgccgccgtccatagtgttttcactttaatagctggcctattttgccaccgttcatggacatcttcgttttcatcatcatactacttcttccgtcgccgactggttatgtcgccgctgactggtgtgtttatcttcacaactacacgccttcgctaccgttcgcaagatttgctacttcaccaatcacgacatctacaagagcttcgacatctcgacatgcgtcaccaaatatgatgccttattattttactatagcaagtggtgttctaatcatcaatatttctactcggacatcttcaacacgtatcttcactcaagcaatggctactcgacgacaagctagagttctcgactctatgttcagttgttttccaactaaccaaagagtcgggggctacacaaatacaaggctcaaaatttgacatgttttttgtcaaaatgaagcaatcaatgaatcaacaagtaaattttgggagttattatcttggtcttcgcttcagagccgacattttacttcagcgactctagttatttcgtcgattcaacgagttggacaacatcatctatttttcttcaagtgaagcatcttctacagctacaacaccaagttctactgtcatcttcataaatcaagaggcgttgcatcaatctacattacgc

SEQ ID NO: 81908 - DNA, 461 bp, Oryza sativa
  Clone ID: PAT_MRT4530_81388C.1
aagaatctcccgaatatgaaggaactatcatttcttccagcaggtctcacaacgttgtcaattcgtaggtgcccactgcttctcttcgttaccaatgatgaactggagtatcatgatcatagtgagcatatccactaggacagagcaactggttgcacaatttgctttggttggggtgatgggcccatttttagatgcactgtcatcggatcattcatctatgaagcagttggcagcattgatggactctgatatatcaaaaaatcttcaaaccattgaacgcgctctagaaagagaagatgaagtagtgatgaccaaggatgtcatcaaggcatggatgcgttgccacgagcagaggatgagactcatttatgcaaggaggattgggctaccattggtcccaccgtcaggacttagtgatctctcccttaaatcatgcacaattacagatacagctctat

SEQ ID NO: 81909 - DNA, 1016 bp, Oryza sativa
  Clone ID: PAT_MRT4530_81389C.1
cgggctgcaggaattcggcacgagggcgacgcgttctcactcgctcggacaagctcctccatctctcgatcgctcacgagcagcggtggacatggccggccacgaggtgaactccagctcgtcgtcgtcgggggcggagtcgtcgtcgtcctcgtcggggcggcagcagtacaagaagcggcccgcggggcgcaccaagttcagggagacgcggcacccggtgtaccgcggcgggcggcgccgcggcggggcggggcggtgggtgtgcgaggtgcgcgtcccggggaagcgcggcgcgcgcctgtggctcggcacgtacgtcaccgccgaggccgcggcgcgcgcgcacgacgccgccatgatcgcgctccgcggcggcgccggcggaggcggcgcggcgtgcctcaacttccaggactccgcgtggctgctcgccgtcccgcccgccgcgccgtccgacctggccggcgtccccccgcgcggccaccgaggccgtcgcgggcttcctccagcgcaacaagaccacgaacggcgcctccgtcgcggaggccatggacgaggccacctccggcgtgtccgcgccgccgccgctggccaacaatgccggctcgtcggagacgcccggaccttcatcgatcgacggaacggctgacacggcggcgggggcggcgctggacatgttcgagctcgacttcttcggcgaaatggactacgacacgtactacgcgagcctggccgaggggcttctcatggagccgccgccggcggcgaccgcactctgggacaacggcgacgaaggcgctgacatcgcgctctggagctactgagctctgacactgtctccagtttactgtactctgtttttgactctgtaacgaattggtacttttggtagcatgttgaattgttgattagttaaacactttcagagctcagttttcactaacgaaaaaaaaaaaaaaaaaaaaaaaaaaaaaaaaaaaaaaaaaaaaaaaaaaaaaactcgaggggggccc

SEQ ID NO: 81910 - DNA, 1659 bp, Oryza sativa
  Clone ID: PAT_MRT4530_8138C.1
atggacagtaagccgacgcggccgcaccgccggccgccgcctttgccgtccaagacgagcggcgtgtggcccgtcgcgctgctcgtcgtcctctgcttcgccgctctcccgctcttcctcgcgctgtcacgagcgcggccgaccttgtccgacgtgtcgcagatgggcgtcacggtgaccgtccacgacgaggatccagcagggacgccgccggaatcctccccggcgaaccgggacaggctcctcggcgggctgctctcgccggacatcggcgagagcgcgtgcctgagccggtacaagtcgtcgctccaccgcaagccgtcgccgcactcgccgtcgccgtacctcgtctcccggctgcgcaagtacgaggcgctccaccgcaagtgcgggcccggcacgctcttctacaagaagtccctgatgcagctcacctccgcctacagcatgggcctcgtcgagtgcacctacctcgtctggacgccgtgcggcggcagccacctcggcgaccgcatgctctccatggcgtccgccttcctctacgcgctcctcacccaccgcgtgttcgtggtgcacgtcaccgacgacatggccggactcttctgcgagcccttcccggccgcatcgtgggagctccccgcgggtttcctcgtccacaacctgacgcagctcggccgcggcagcgagcacagctacgcgaacctgctcggtgctaagaagatcaagaccgacgaccccgccggcgtgcggtccgagtcgctgccgtcgtacgcgtacgtccatctggagcacgactaccagcagtcggaccagctcttcttctgcgacgacgaccagaccgtgctggcgaaggtgaactggctgatactgcgctccaatctctacttcacgccggggctgttcctggtgccgcagttcgaggacgagctccggtggatgttcccggcgagggacacggtgttccaccatatcgggaggtacctgttccacccttccaacaaggtgtgggagctcatcacgaggtaccacacgtcgtacatggccaagtttgaagaaaatattggcattcagatcacgaccttcgccgggagcaaggtgtcgtcggaggagtacttcaagcagatcgtcgcttgcacgagtcaggagaagattctgccggagatcgacccaaacgcgacgtcgagcgctaacgaggcggcgctagccaccacggcgtcgaaggccgtgctcgtcagctcggcgcagccgtcggagtacgccgagaagctgaaggcgatgtactacgagcacgcgacggtgaccggcgagcctgtcagcgtgctgcagccggccggcgccggtaagcaggcacccaaccagaaggcgctggtggagatgttcctccagagctactgcgacgtgtcggtggtcagcgggcggtcgacggttgggtacgtcggccatggcctcgccggggtaaagccctggctgttgctaacgcccacgaatcggacagcgtcggctaacccgccctgcatccagacaacgtcgatggagccgtgcttccatgctccaccgagctatgactgcagggccaagaaggatggggaccttggtgccgttctaaggcatgtcaggcattgcgaggatgtcggtgatggtctaaaattgtatgactag

SEQ ID NO: 81911 - DNA, 312 bp, Oryza sativa
  Clone ID: PAT_MRT4530_81390C.1
ctttcggcccgcccggcacggcccggcccaggaacggcccaccagccatcgggccggcacggcccgatcggcacttcgtgccgggccgtgccgacccatgggctgcacctcccgcccaggcacggcccaccagccgtcgggccgtgccgggccggcccgaaggcgcgggtggcccagcccatcgtgccgtgccggcccggcacggccgggccggcccggtagtcgggccgggccagcacgggcccaacccctaacgggccgtgccgtgcttgggccgggccaaaacgccgtgccgtgggccgggccatcgag

SEQ ID NO: 81912 - DNA, 588 bp, Oryza sativa
  Clone ID: PAT_MRT4530_81391C.1
ctttttttttttttttttttttttttttttttttttttttttttttttttttttttttttttttttttttcaaggaggggaacggccattattaagcccccgtggcaaaaaaagggaaaaaacagtttaacagtttggggaaaaaaaattaacacaaccagcggggggcccaacccaaccccctaagggtgtccaaaaggcaacaaaatcccatgcttgggaaatgcccaaaaggacaaaaatgaaaaaatggggctaaccccaacgggaaccagacccataagcaacgttggaaaaaatggacaacctttacaatttgggcccctacttgagctataaaacacagggggggattccggaccccatttccggcatccagtttgggcccatgtccaggccaccagttataaaaattccgggggggaaagggggaaggcccacacccttaaaaaaaccagcccaaaaggggtttaaaaattttaagcccttcctgccctttccaagggagaagctggacattcacattttatagggaccaggaaaccatggtaaaggaaaacctttaaaaggcaaaaaaaaacagtttgc

SEQ ID NO: 81913 - DNA, 624 bp, Oryza sativa
  Clone ID: PAT_MRT4530_81392C.1
gttgtttcaatctcacaatctggggggggggctcagagaccaaccgcaaaggatgcacattccatttcatgtgaattaagcattagcttagcagaaacagaaattgatatcttcaattagagctatctgcttcaaaaatagattgtatacttttctttagcatttgggaatatacaaaaaatggaatctgatacatgaatactttgtgtatagaccttattcagttctagacttctaaccctatattttgtacgttatatgtggaaacatgataactaaatggtttttgcatttaggggcaagggagattatcagatagattatgtgcctgctccaagaatcacagacgctgacaaaacaaacgacaggaagtaagtcttgaactcccattcctgtagttctatactctgtttctctatcttgttgggcagttccagcttgatgaagtcatgccttgctgttgttaacactgataatatgtgtcaccctcttgttgtgcaagcatgtgctaagttttgttgaaacagttatgtgtcatgtatgttctgtatttgtcttgttctgcaatttaatggatattacagaaacttatgttatctgtttagctgttttaaagtatacaaa

SEQ ID NO: 81914 - DNA, 406 bp, Oryza sativa
  Clone ID: PAT_MRT4530_81393C.1
gggggaaaactttattatttactttgctcgaaatacaatatcgactaatgggaatattagatcattaatcagagcttgcaacactgaaactctctattgctgaagtactctgattaattaacatccttctgttgcgtcattgacgctccacattggtttagatctcagcatccaatgtaattagaggtttgttatcgtccaacaaaaagtatctcgaaataccggtacctcacggtaccaaattattttcgatcgttggatctagctgagcagatgagttatcggtaccgtgaggtatcggtatctcgagataatttttgttggaccgaagcaaatctaatataagtaagcatgccgtgctgtaaatgcatgttagacaaagcccagaaccgtgtaatatgcaatc

SEQ ID NO: 81915 - DNA, 550 bp, Oryza sativa
  unsure (1)..(550): unsure at all n locations
  Clone ID: PAT_MRT4530_81394C.1
ccggccggcagtccgcgtaccccacgcgtccccgctcttctaggctccgccagaggagaggcctccccaaatcccacaatcccgctcccaatcccaatccccgccaccacctcgcatcgcacgcgcaaggcgcagatccccatccgcgggggggagggagggggaagccatggcggagttccaggagatggcggcggaggtgccgccgtcgctgaaggcgatcacgctgacccacgtccggtaccgccgcggggacacgctcggcctcttcctcgcctgggtctccctcgtcccggtcttcatcagcctgggcggattcgtctcccacttcctcttccgccgggagctccagggcatctgcttcgccgcgggcctcctcgcctcccagctcctcaacgagctcatcaagcactccgtcgcgcagtcgcgcccggtctactgcgagctgctcgaggcctgcgactcccacggctggncctccagccactcgcagtacaccttcttcttcgccacctacctctcgctcctcacgctccgccgctccccgtcg

SEQ ID NO: 81916 - DNA, 1351 bp, Oryza sativa
  Clone ID: PAT_MRT4530_81395C.1
gcgccgggcgatcaactccggcgacatgggcaccgtcaccaccgccgatccgcacgcctccttcctcgccgacaagggcggcaaggtgttcgtcgccggccaccgcggcctcgtcggctccgccatcctccgccacctcgtctccctcggcttcaccaacgtggtcgtccgcacccacgccgagctcgacctcacccgccagtccgacgtcgaggccttcttcgccgccgagctcccccgctacgtcgtcctcgccgccgccaaggtcggcggcatccacgccaactccaccttcccggccgacttcatcgccgccaacctccagatccagaccaacgtcgtcgacgccgcgctcaaatgcggctccgtccgcaagctcctcttcctcggctcctcctgcatctaccccaagttcgcgccgcagccgatcccggagaactccctcctctccggccccctcgagcccaccaacgagtggtacgccgtcgccaagatcgccggaatcaagatgtgccaggcttaccgcatccagcacggcttcgacgccatctcggccatgcccaccaacctctacggcccgcaggacaacttccacccggagaattcacacgtcctgcccgcactgatccgccggttccatgaggcgaaggcgtccaatgccgcggaggttgtcgtctggggcactggctcgccgctgcgtgaattcttgcacgtcgatgaccttgcagatgcggtgatcttcttgatggatcactactcggggctggagcatgtcaatgtaggaagcgggagcgaggtgacgatcaaggagctcgcggagctggtgaaggaggtggttgggttccaggggaagctggtatgggactctagcaaacccgatggcacaccgaggaagctcatggatagttccaagatacaggagatggggtggaagcccaaggtccccctcaaggaggggctcgtcgagacatacaagtggtatgtcgagaatgtcatctctgcgaagaagtagcgccgtgatgatgatggcatgttgttctcaatatcttctggcgccttttaagttggtattacagtcaatagttttcatgttgttgctggctactagatcatacaattatcagttataagctctcccacaaagaagaggtcgttatgttggttgaataatgtggggtcaaactagtatacaattagaatcttaattgatctagaacaatttctgtcgattagagaaagtttcacactttgcaatgtttgatgtcaattggcctgaaaaagttttacacacacggaataagtaagctatgttttgatttatgaaataattttatctgttcagaacaaaaaa

SEQ ID NO: 81917 - DNA, 823 bp, Oryza sativa
  Clone ID: PAT_MRT4530_81396C.1
attaatctaaatttattaatatcaatataaatatagaaaattaacatcaatatgaatataaaaaatactataaggactttttttttttttttttacattgtgaaacgaagagagtactctgttttatttcataattaagcatctcccacaacatgataccacttctaacacgtacaattttattccccatcaactcatagtagcgaagtgaactctacatgaactgatgaacagctactagtagatcataaattgtcacattgatatgagaatgagatcactggtactggccgccggtgccgtgggcctgcgagaagtcgctgccgacgtgcgggttgtgggcggcgctgggcctcgccgtgccggtggccgtcccgaccggccggctctcggcgacgccgtcctggacgtgccctcccgtcggctgcgccgcacgcgggtccaccccgggggcgccctgcgacgggtggtacgcgccggcgccgcccgtggcgcgctccttggcggctgcgttggcggccatggcgtgctgcttctcctcctcggcggcctgcaggcgctcctgccgcctcacctccgccgcgtccttgtcggccgcgttgcgcgccgtcgccttctccacctggccctgcacggcggcgcgggacttgtccatcccggcgcgcgccgacgcgcccacgttcgccgcggcctccttggtcgactgcatcgcgttcttcccggcctgcatgctggctacctaaactcaagtatggctacttttatggctgtggatttggatgaacataagaagaagcttggacgtgcggacccgggtgggtcg

SEQ ID NO: 81918 - DNA, 401 bp, Oryza sativa
  Clone ID: PAT_MRT4530_81397C.1
acccgccgtaaggacctttgagcaatggtcttccgaccccatgattggggacaactggggctcttctcccccgtacgacgacccagcaggcgtggcaaagagctagccctagaggagaactgctgttcatgctcacctcagggggatccacctccctcaaagcgctgcagggacgaccacacggacgtaccggcgacggccgagatgaccaacacgccccagctggttgaggcgacgaattgggaccacagaaccgcaggcacaatcgttggcgggagcacggggagacttgtacccaacgtgcacttggatgattattacgctataacatgaactgcttccaaggagaaagcacttgataggtgctccaattggacatccaacctgacagagggtctcga

SEQ ID NO: 81919 - DNA, 972 bp, Oryza sativa
  Clone ID: PAT_MRT4530_81398C.1
atggctggtgcggcgctggcgggaggaggagcgtcggctggctggcagcacgtgcacgaggtgcgactggcgagagcagaggccagtgaggctcggcaggtggcggcggaggcggccctggtgcgtggaggtgcggtcgaggtgccggtgcgacgcgacgaggctgcccggcgtggaggcagtggccgatgcggcgggaggagaggccagtggcccggtgaggcacgaccggtggcagcgcgcggagactggccggtggggggcgccggtgcagtggtgcccacgctccggcggaggttttggatggcggtggagcaatgcggcggtcggtcacgcttagcggcggccgatccggtgttagccttctcctggatctgtgtgttggcgctgtcgcctcttaacagctcttacattactttagtgcctaagaaaatccttccagaaactgtgaatgactttaggcctatctctctggtggggggtattatgctcaagcttgttcatgaaaaccaatatggttttattagaggcaaaacaatacaagattgcttagcatggtcttttgaatatattcatcagtgtcatcaatccaagagggagataatcctgctgaagcttgattttgaaaaggcctttgattctattgagcactctgtgctcctttctatcatgcaaagcatgggtttcaataacaagtggttgcaatgggttcagatggtgttttctccatctcatacttctgttctgctcaatggtgttcctggaaattctttcaaatgtaggagaggagttagacagggggaccccctttcccccttgctttttgttcttggtgctaagctgttgcaaagagttatcaacagagccttttctctgcgtctgctgtccaaaccaattaatgaacaagatggcaagggttttcctgtgattcagtatgctgatgatactttggttcttcttaaagcatcttag

SEQ ID NO: 81920 - DNA, 458 bp, Oryza sativa
  Clone ID: PAT_MRT4530_81399C.1
tttttgggggtttttttttttttttttaatacttaatggggctttttactaaaaagattctaccaaatagacagtacgaataattacgtgatgaaacacaacccttaagcccactaccagagaagaatcaacataaacttgccctgtcatctgtaaacagagtagcaacaagctgcttccgaaaggcatattaaaaaaaaaactcgaattttaggaaataacctaatatcaaataattagaaggggtgaggctttgaacccaggtcgtttagcccaccaccttgtggaggtagcaggaagacccccgagcatttttcgaaaggcatatacaatgcagaatgactagtggcctcgtgtgccaccacataggagccgagacgccacctcaattgagagcataccctcgtaaagacacgggagcctcgacttgaaaacctagcacacagcgccagcatacg

SEQ ID NO: 81921 - DNA, 444 bp, Oryza sativa
  unsure (1)..(444): unsure at all n locations
  Clone ID: PAT_MRT4530_8139C.1
taagtcaaagtgcaaccggaggctgcatctcccagagntaaagcccttccctccacccccccaatttctgtactcgaaggagcggtacctcaagtatttcaaagcgccgccatcactttctgcacaccctgntcagtttacaaacggagaancccaaagctgctgtgctaagtggactgcacaagacttgaaatttttcatggttgatcacttgacctcagagaaccgagcgaagtggactcttttacatccaagtcacgcgtggctagatgtattaggaaccgtttaactccacaagtttggactcaaatgagccggcgtgagcatggagatgntgctcggaatgctctttctagtgaactctaacaggcaggtccagccttatcttcccctgactaatcactttgtgcnttaaaaaaaaaaaaaaaaaaaaaaaaaaaaaaa

SEQ ID NO: 81922 - DNA, 681 bp, Oryza sativa
  unsure (1)..(681): unsure at all n locations
  Clone ID: PAT_MRT4530_813C.1
ccacgcgtccgacatcatattgagggttggacatgatgggcctcgtgatcaggcccggtcctgaggggggtcgaatggggcgatcgctccgggcccccgattcccagggcccccacctatctgtgcaacgagtagtagcgatcttccagcgcgcaacgtgaggcgatgtttctccgtgatttcgccggcctgcaactgcgagatcgcgagtataacgatcagccgatcgatctcatctgccgactgccatgctgatgccacacgcaagcgcagcatatcagccttatcttggttgatcggcatgctggacgagcacatctgttgtcgcatcaactgctgactgctatatatgtgctggtgctgaatcgatcgattgtcgtcgcggaagtgaagaacaaccacggcactgctgcctgctgggctctagccgccatcagctgctgagcagatccatggacgtgaggattaccgaagactgtcaggtctcactgggtatccaggtggctcttcgaattgtggattccaaatagttaactggagtctgtcattggtgttggtgggtgtcaatctagctgagatccgtctggtatagcgtaagaagaacattatgcactatccccagtcataaccatgccccaatggccaccaatagntttcctcgtgaaaatctccccttgatcc

SEQ ID NO: 81923 - DNA, 187 bp, Oryza sativa
  Clone ID: PAT_MRT4530_81400C.1
taagcagtcaagaagaatcaattggatttccaacagttagcctcattcctgtacctccaaccaaggtggatggtcctccaccttggtctgtggaggaaggggcttccagcctgcggctttcaactactgcggctgcagcagctgcagcagcaattgcagctgatcaaggcatgatacctcttgtctg

SEQ ID NO: 81924 - DNA, 249 bp, Oryza sativa
  Clone ID: PAT_MRT4530_81401C.1
atgacagtcacccacaacggcaagcagtacaccgccaaaaagctcaacgataacgagtggcagctgacgtcggtatctaacccgcgcatgatcaaccactacggcaccaccccgctcattcgccagtgcgtcacgcccggcatgatggcattgcatgaaggccgcacatatcgcgtctcagcagtcattcaggagcgcaaatgggtctacctgcacaccgacgcagaaatcatccgcctcagtgactga

SEQ ID NO: 81925 - DNA, 275 bp, Oryza sativa
  unsure (1)..(275): unsure at all n locations
  Clone ID: PAT_MRT4530_81402C.1
gcgtccacgcgttcgtccacgcgttcgtccacgcgtacgtccacgcgttcgcccacgcgtncgacaaactccagctcctnctagggctccgagctagagatcccggctgcgcctccgncttccccagtcgccggcgagcaactccggtgaagcgcgagctacggattaagaagtgcccatggcaaggtaagccaaggcctgtggacaagcagagagaaagccactcaaatgcgactcatatactcatgctggagctgcgtctcgtcttgttaaat

SEQ ID NO: 81926 - DNA, 948 bp, Oryza sativa
  Clone ID: PAT_MRT4530_81403C.1
tgtttgtgtcagcaactacaaagagtctatatagctactaattaatcatcctcgatcgatcgatctcggtcgtgtatagcagtagcactgcatatggcaataagcagattaatggtgacgaagaagcagcaggcggccttgttggccgtggtcgccgtggcagctctggcgcaggtcgcggcggcggcggtgcatccggtgggaggcaatggcgcctgggacaccaccggcaactacaatgcctggtccgtctcccaaaagttctcccaaggcgactccatcctgttcacctatccctcctcgcacgacgtggtggaggtccccaaggccagctacgacgcctgctcacccgccaacgccctcgcctcctacaccggcggcagcaccaccgtcaagctcgacgccccgggcaagcactacttcatctgcggcgtgcccggccactgcgccgccggcatgaagctcgaggtcaccgtcgccgccgccaccgccaccaagcccaggcacaagaagggcgccgcccccgccgccgccccggcgatgcctcccgccgtctcatcacccaccgaggagatgcccgctgtcacctctcccaccggatctccggcgccgtcgtccgcgtctgctgcgtcaaccatcgccatcaacgtcgccgccacgctcgccgcagggatggcattggccttcctcgccatgtgagactgagactataggctccatttaattattttttgggctctgcttaattaatcccttcccttaatcatgtatgcatgccactgctagctaagctgttgagaaatttgcaggcttttcgcttcttcttttccttttccttttgattaaattattagtttacgtacatttatttgttgtacacttgtactctctcgacggaataaatcgagctatatattgtcattctttcagcaaaaaaaaaaaaaaaaa

SEQ ID NO: 81927 - DNA, 546 bp, Oryza sativa
  unsure (1)..(546): unsure at all n locations
  Clone ID: PAT_MRT4530_81404C.1
ttcggcctccatgcatgggtctacccccgggagctacccttccctttctgccgccatgctgcaccaatgcatgcagctgccgtgcaccgncggcggcggcggccatggcgggatgggatgccccggaggaatctggatacgagggacattctgcgatgcgatgtgctgtgctggttgatggcggcgttgctagctgctatgcaaacctgcatccgccttgcggtgctggctggcgctgccacctgaccaacggcaagctgcctaccacttggactgtgtttatttctgtgttgtgtgtaatgtgtggtgttgtgcagctgaattgaattgaattgagtgcctgagtgaataaaatgtggccttggaagtggcctgatggtagtgtangggttggaatccattgataaatggtggctatttggtggatatgtgtaaacctcatcggaggtttttttagatgtttaaacgtcggttttttaattaacagcaggaccacnataaatacnttgccanttttctaanttccaaaaaaaaaaaaaaaaaaaa

SEQ ID NO: 81928 - DNA, 749 bp, Oryza sativa
  Clone ID: PAT_MRT4530_81405C.1
ttttttttttttttttttatccacgaaaatgaatatatccattctatttatgtgttcactgtgctatttcctctacagctatatgtcttggtgtctcagatcatctaatatctttcttttggttaatgcaatatctacacaactgagcacgcaaaaatttgctgtacatatgcagtactcataagcggcaacaacagcagcagagtatagaaatatctgcactgatgcaggaatctgaaaaaatggctgaaggaattgaagaaccatcaatataatgggaagaatgcgcaactctgcaagggtcacgctggcgaatatttttacgagatcagtccgttgctagtgcttggagctcacgcagatggtctggtataagtgtccccaggtgagggttctgtgggttctctgcatatgcaacatgatatgttgcaacacaagcctgtggccacgcaattatcattcggcacatgtaataaccgatgagaaatgaataaatggctactggcagagcaagctccttatgttctttatccatggctagtgcccatgagccagcaactagtgaggccaatgcacctcctgtgacagcagaaaggaagcagaatgaaccagtgaggtctgaatcaaccagctttgatatcccacggagaacgaaaagagaccacacatcccgcgaagccacacagaatgccttgccacgcactcctacgtgtacaaaaccccaccggttgacccgtcggacgcgtggg

SEQ ID NO: 81929 - DNA, 252 bp, Oryza sativa
  Clone ID: PAT_MRT4530_81406C.1
atgcctctatggaggcggtggttcaaggcgaagcacggcggtggatctcaagctctcctcgaggaggttgctgaaggcgacgattggtcggcaacaaagctctcggcggttgtactagcgagagagatcatcctcgatggtgcctccaccgccggagacctcgttgttgactgccaccctagggaagttcatcctgaggaacaacttcgctcctcgttgccgctggtgtcctcaccgccgctgctgccatga

SEQ ID NO: 81930 - DNA, 477 bp, Oryza sativa
  Clone ID: PAT_MRT4530_81407C.1
gcacgagcagagatcatgtacaacagtgagagtgaggtgcagaataatttgagctgaagctgaggatggcaacattgcatgatcacctcgtcgttggtggcgccggcccggtccaagggcctttcgtccatatcccgccggggatcctccttagccatcgtctgcagcggttgcaagaagatcatcgaccgacaagccctacatggattggaggtggttcgtgactccatattgatgcatctggcatggaagagcaccggggaagggtgtgtaccaattcgatagacaaggacggcgcacacgtcgacatgctctggccaatctactcgccggaggaatggtctcccaccggtgacacctacattggggtaaccatggtgcttctgatctgtgccagtgaccctcatctggctcctcggtgggggtgccctctagtgtacaacatcaacgccttcttgggataaatttatcacatgt

SEQ ID NO: 81931 - DNA, 753 bp, Oryza sativa
  Clone ID: PAT_MRT4530_81408C.1
atggcgatcaaggtagtatgtagatggttaaaacggaagaactcaccgagattggttgaaacgatggattacggccggaaaaacttcgcggcggcgaagaacatagcagcgcgggggcggcggtgctcggcttggtgcagtgtggtaaaactcggcgcgatgcttcgattagggcttagtatgctagaacatggtaggggctcttgtcgtggccaaggaagcagcgagtcgggaatggcatcgcctgatgcatgtgtggaggacaaagttcatcgcatcttcttggatttcatgaccaaggttgcacggtatgacgagctagttgatgcagaacatttttggagaccaaagctcctcacagagtcaagtgccataattgagatagttaagtctaactacagtgacagaatgaggtcttatcttgaagctggctgcacccatcacaatgaaatcatccagaacatgaaccggtccaaattattgctggaagagctccagtttctggaggaagatgtttacagtgctgcactaacagccagtctgagttcttcaagaaatacggatgattgccctgatcatgataatcttacaaatgtttgttctgaggatgaacaacagcctgaagattggctggacggagcagtgtcttttgcaagtgtgattgtcctggttcacaatatgttaaaaatggattacatgatgcagaagctagagtacactgcaggaaaagattgtaaaggcattttgggttaa

SEQ ID NO: 81932 - DNA, 2039 bp, Oryza sativa
  Clone ID: PAT_MRT4530_81409C.1
gtccggattcccgggtcgaccccgcgtccggcgtgctgcttcgccgcaaagcccacgcaggtggccgccgaggtggatcagggaggggcggccgagccgggtgtcgcttccgccaatgctgcggtggaggcgaagccgcgtaaaaaggcgccgatcccggcgagaaagaaaggggaaaaggtcgtcgtcgtcggaagacccaggacgacgggcggtgctcgaggaggaggaggaggtggaggtgaaggagaagaagacggaggaggatggagaggaggggaagaggaaggagaaggcggcggggcttgacctggacgaggtgatggcggtgagccccgtggggctagggcggcggtcgcggcagatattcgacgaggtgtggcgcaagttctcgcggctggggcagatgtcgagcgcgtcgtcgacggcgctggcggaggaggagcaggccgtgctcatccgcggcggacccatgtgcgagtttcaccgtccccggcgcgcaggacaccaccgtcctcgtcgtcggcgccaccagccgcatcggccgcatcgtcgtccgcaagctcatgctccgcgggtacaatgtcaaggatttaaggctttagttagaaggaatgatgctgaagtgatagatatgctcccaaggtcggtggatattgttgtcggtgatgttggtgatccttcaactgtcaaatcggctgtatcaggttgcagcaagataatctattgcgcaactgcacgctcaactattactggagacctaaatagggttgataatcaaggagtaaggaatgttagtaaggctttccaggattactacaatgaattggctcagcttagggctggtaaaagcagcaagagcaaactcctgatagcaaaatttaaatctcccaagtctctgaatggttgggaggtggaccagggatcttattttccaaacacatttgcttctaggtttgatgaaggtatcgatgcatcatttgacttttcagaggctggtcaagctgttttctcaggatttgttttcacaagaggtggatatgttgagatatcaaaaaggctatctcttcctttgggatctactctagacaggtatgatggcttacttttttcggtgggaggaaatggaagatcatatgttgttattcttgagactggtccgctggctgacacctcccagagcaagaagtactttgctcggatgactacaaaagtaggattttgtagggtgagggtaccattttcagcttttcggccagtaaaccctcaagatcctcccctagacccttttcttgtgcatacactaacaattaggtttgaacccaaaagacagagacctggtgatggatctcaaagtgctactgaccccagaaattttgagcttatattggaatacatcaaagctttgcctactggtcaagaaacagacttcattctggtctcatgctcaggttctgggattgaacctaacagaagagaacaagtcctcaaagcaaaaaaggctggagaggatgcattgagaaggtcaggccttggatacacaatagtacgccctggtccactgcaggaagaacctggtggtcagcgtgcattgatctttgatcaagggaacagaatctcgcagggtatcagttgcgccgatgtagcagatatttgtgtcaaagcattgcatgattccactgctaggaacaaaagttttgatgtatgctacgagtatgtagctaagcaagggaatgagctatatgaacttgtggcccatttaccagataaagctaacaactatcttacaccggcattatctgttctagagaagaacacctgactgatatgtctctgagactcagatatttgccatataaatcaaaatgtgtatacttttcaacttgtaaagcatatgtttttttccccatagaagccgtgtggagttcacatgatatgccactttggccctttttgtaaagatgatcaacagattgacttcaggaaacaatttcgatgactgtaatgatataaaaaaaaaaaaaaaaaaaaaaaaaaaa

SEQ ID NO: 81933 - DNA, 795 bp, Oryza sativa
  Clone ID: PAT_MRT4530_8140C.1
acccacgggaccccccgggcggcagctgagaagctccatacaagtaagcagcagctagttgccgacaaggccagagaaggaagaagaagctctcatcatcatcaccatgtcgtgctgcggtggcaactgcggatgcggctccagctgccagtgcggcaacggctgcggcggatgcaagtactctgaggtggaacccacgaccacgaccaccttccttgccgatgcaaccaacaaggggtctggtgctgcttccggaggatcagagatgggggcggagaacggcagctgcggctgcaacacctgcaagtgcggcaccagctgcgggctgctcctgctgcaactgcaactagaagaaacttatctccatccaattcatcacctgatcaacgagctaccagtaccactacatatgccatgtactagctacctagcttgcatgcaagtccttaatttgctgctagctagctagctatctaccttagcgtctcatgtatgtcatgttgccgcctggcccctaaataaaattccttacttcatcaacgagctaccagtaccactacatatgccatgtactagctacctagcttgcatgcaagtccttaatttgctgctagctagctagctagctaccttagcgtctcatgtatgtcatgttgccgcctggcccctaaataaaattccttacttaatcgcaaaatcttatttatataaaaaaaaaaaaaaaatctccacctgaaataccagcccatccattcagacggcccgctctccgtgggggggtgttagttgatcatc

SEQ ID NO: 81934 - DNA, 962 bp, Oryza sativa
  Clone ID: PAT_MRT4530_81410C.1
cagcgctagcttgcttgccgttcgttcccctgtgtgtgcgtgtgcgtaagcttaagagaaggattggctaagctagcaagccggccgcatggcgacttccggcgacctcgaagaggtgccggagccgggcatggatcacccggctgagccatgcatgggcgtcggcggcgaccagctggtgccgacgacggaggaaataagcctcccgctggcggccgagacgacgtcagatcaccatgaagcggcacagctggagcagtccgcggagacgtcgacgtcagagtcggaatcagaggaggtggccgccaagacgacgtccgattccagtgaggcggcggcggttattcccaagcacgccgcggagggttcgtcgacggcgtcagaggaggagcaggtagcgaagaaggagctgaaggaagccgaggaggacgatggcctgcagggcgagagcgcgcgggagaggctgaagcggcacaggcgggagatggccgggagggtgtgggtgccggacatgtgggggcaggagaagctgctcaaggactgggtggactgcgccgccttcgaccgcccgctcgtgccgcccgacctgctcacggcgcgccgggcgctcgtcgccgagtgctgcgcgcgccgcccggaccggacgacgacgccgcccggaccggacgacgacgccgcccgccagatccagccctctccgggtgcaaaaaagctgctcctgattatcgagcttgattactagcagcgcttcaattcgcctccagcttcactagccatattagctagccgcgtgcatacgccttctttttttgctcaaataagagatattacccttcttgtttccgagttgtgaaggtcctttttttttcctgttctaaacttctaattctgatgatagtgtgaattacatttactgatttacacatatatgagctttccctgcataaagaaagggttttgtc

SEQ ID NO: 81935 - DNA, 279 bp, Oryza sativa
  Clone ID: PAT_MRT4530_81411C.1
ttactcggtagggctcgagatgaaggcgaggtcgaggtccagcaatggcgactccaggtgagttttgttggtggttttgtgcttgtgctcgcgggtggtttcggttcgttttggttgggttgggttttgatttggggttttttgtggtgtttcgtgaaggctctcggtgaggaagaccaaggcggagaaggacccgaacaagccgaagaggccaccgagcgcgttcttcgtgttcatgtgagtcttagatccgtgggtttttgtgttagtggttctccg

SEQ ID NO: 81936 - DNA, 378 bp, Oryza sativa
  Clone ID: PAT_MRT4530_81412C.1
atggatctacccgtcctcgacgtgcttccggtggcaggtgcggccgccgcgcagcttgcgctggacggcggcgtcagtgcctcgtgcccgcctcatcgctccgcattccccttgccccggacggcctccggcgtcggcgtcgtcctcctcgtcgtcgtcgtcgcgcggatgcggatgccgagatgcgataactcagcgttggtcttgcgatgcgcgtgtggctcgggccctgggctgcggcgccctaggagggtaggacggtttctccccgtctctgggccgtcggatgcggatcggacggcgggggcggcgcgccacgaggtgggggcatacggggaaaaccgtggtccgggcttatgcaacggttgggcaggatga

SEQ ID NO: 81937 - DNA, 268 bp, Oryza sativa
  Clone ID: PAT_MRT4530_81413C.1
aaaataaggaaaaaccgatttattgtactgacttgtgtatgaacacacaaactgtcctacgagtttctcggttatcgatcaagtacatatacgtgggcagggcgacaacaattgggcgatatgatcgaaaatgattagactattaccgagacacaggcgccacacgacacaacatgatgctcccccacagacccatgattagggccacatgcactaactatgcatgtattcatacatgaagcttggggaggttaaatcggtattcttt

SEQ ID NO: 81938 - DNA, 1434 bp, Oryza sativa
  Clone ID: PAT_MRT4530_81414C.1
atggacgcgccggccatgctcacgaccaagcacgtccccgaggacgtcggcctccgcaacgtcgcggcggcggaggaggaggggggacagcggcagatgcaccgtggggaggagaagcagcacaagccggtgctcaagaaggtgaaggagaaggtcaagaagatcaagaacaccatcgccggcggcggcggcggcggccacggcgggaacaacggcggcgagcgcgctagcggaagcagtagcagcagcgaggagggcgaggacgatgtggcggcgcagaggatgggtgacgtggaccagcgcgggtaccaggaggacgtcgaggaggacaagcccgtcgccatggagtccgatcccgaggtccatggcgctccgatgtacgactcggcgaggatcccctcggtgcaggaggtggagggcgacggcggcgcgccgagggtgcggctcggcgacctcggcggccccgtcgtcgaggacccggcggcgccgcgctccacgacgcgcgtgccgcgggagggggaggacatcggcacgacgcccgtcgtccgcgccttcgagtcgatgagcgtctccgacgacccgaagcacgtcggcgcggccgggaagccggacgccgacgtgcagaacgacccaatgccggtgtcggacgccgccaccgccggtgaggagtggaaggacgcgacgcccgacagcgcagctgcaggcgcgacgcccggcgcgacgtacaccgacaagatcaagtcggcggcggcgggcaccacggagtacggcaagaagctggccaccacggtgtacgagaaggtcgccggcgtcgggacggccgtggccggcaaggtgcggcaggtgacgcagtcggccggcaccgccacaccaggcgtcgccggcggcgccgccggctcacagtcgcaggacgacgtcgacgcctccaccaccctcgcctccggcgagccggcgaccggggggcagcagcagcaggacaagggggtaacagtcaccggctacatcgccgacaagctccgcccgggcgacgaggaccgcgcgctcagcgaggccatctccggcgcggtgcagcggcgcaaggacgacgtggcgcagcgcgttccggccgtggcgccggcggcgccgggcgacacgatcgccaaggtgcgggaggcgcccgcgcaggtgctcgccaaggcgcgcgacgccgtcacgtcgctcaccggcggcacccatgtctccgacaccgtgcagcccaccaccaccacagaggcggatggcgcggaggtggaatcggcgccggtgattcgcggggaggagatcggcgagacccaacgtcagccgaactttttgttttttgatgtcttctgtgtgtatgaagtagcttacaagtgccatgaatatttcgaggtgcgagtgcgacaacgatatcgtgttagatcaccggacgattga

SEQ ID NO: 81939 - DNA, 834 bp, Oryza sativa
  unsure (1)..(834): unsure at all n locations
  Clone ID: PAT_MRT4530_81415C.1
gtttgcgccggaagnatgggttgacaagccgggctgtcaccgcttaccccggaagcggtcaaccaagtgtacgccggattaangtncgaaacccaagatcacangggttctgtccaaaggaccccccaaggtggtgagggcttgtgtattcaagtacatccgaagtaagtagggcgagccgggccgaagtgtcccacgtcaccgggtaatgaagatcncaggggattccccacttgtaggctctgtctgagtatcatagaggtgccaagggtgtggtgctgaggaacnncagcaggactgtggaaccgtgccnatgatgggtgcggagtggctgtctgctnggaactcgcnagtgttaggggaaaaggatgcaatgaccgtggctttgcttggtgcggaggacgctagatagattggtccaagaagggtgcctgaaaatacagaaataccctagggaccagagaccgcaaagtgagagctncctttgtaaggggttggcacaatggctggtgtgttggtaccaccagtggacaggagtnatgttnttggatgggtggtttgatggttgggatgatcgtgttgagcatggtggagagacctgacctgtgtgtgggagtttcacgggttttcaatatgcctgctgcaatgctgtatgaatgtcgtgcgggagtaattggggacatgctgatgcccttggttgccttgaatgtgatggaaattgtgcctgtgatggaacctnattgggtactagtcgaattcacctacangtnaccatctttttattgactntaattcccnccccntaaangattgtgttttttaaaaaaaaaaaaa

SEQ ID NO: 81940 - DNA, 579 bp, Oryza sativa
  Clone ID: PAT_MRT4530_81416C.1
ctatgatcgtgagatgcacgcgtacagtgcgccttggctcctgtttggcggccgaccttggtcgtcctttttaggttcaaatttcacgtgagtcataagggatactgtggtcctatctgaaactgagagaggaacctacatatcatactgcctgagtgacttgatcccgatttcatgtacacggctggctacaaacatccatggcaaaactgtgtcactgacacactgagcatttggtagtttgttactttcttacatcatggaagtttttttgtttttcttttagggggcgttccactactattttttgtggcaaagagaatgtttattggggaacaagaatcttaatatcttattaccgttccgagttaaaaattgtcgctgttctcaacaaatgtcaacaaatacctaacgactaaccgcctatgatcctcgttgctttctttaccgctcaattctatcatgcctttcattacccgggtgcaaagcctttcgagctgtggcacgccatagcctgtggtgagttccatgaagcgtcgcttcacgacttcagttgttcaggtatgtcgtcgctagcag

SEQ ID NO: 81941 - DNA, 477 bp, Oryza sativa
  Clone ID: PAT_MRT4530_81417C.1
aataatgaattatttttgaaaaggaaaagaggtttattgcgtcagcggctagggtttgcggtggaccgggtgcacggcggcggttcatgggaacagacggccgagattaaccctatccaaaacggacggccgagatcgaacggtccacgaccggtctacgacgaacggtcccgatgacgtcagcgatgacgtcaacaccggcggcggctcgggcgcgcaagctcgcctgcgaacgacggcgcgacggcacgaacggagggcaccaacggatagagggcgacgcggcgaactcaccggtgaccaaaacggcggcggaagagcaacggacggcgccggcgacgaggaaaaagcggcggcggagatcgggtcgacggtgacggcggtgctccggcggtctacagcaacggcggaggggcggacgaggacggcggcgacttggcgaccacgacgagaaggaaagattggggaaaaacgaat

SEQ ID NO: 81942 - DNA, 2514 bp, Oryza sativa
  Clone ID: PAT_MRT4530_81418C.1
tcatgacatgattttcagggtcacaattattctcggtatcttcttcaatgttgaatatgtaaacgtcttcaactccttacaggaaggatcagatgcttgcttgactttattcctcttcttcagtagaatgagcgctaaacatgatgttagagccagacaaatagctataggtcctactatcttaagtattttattggtgtgctttccctttgatggctttacattgcagagtggtaactgtagcaatggatatgtaccacataacttcttgttcccttggataaaaacctcacttgcattctgaaatatcccttcagttggtacctgtccttcaaaatcattgaaggacaaattgagaagcttcatggacccaaaggattccatgaattcaggtattttaccagatagattgttctgagaaagatctaactcaacaatgcctcttaaatttatgaaagaatcaggaattcgtccatcaagaaggttcccttccatacggagagagcttaagtggacacagtcgccaagagcagagggaatttgtcctgacagtcggttattggaaatatttagaatatcaagattgatcgagccaccaatctctgatggtatttctccatcgagttggttgtgagacaagtccaaccattcagaaagagaggaaagagtaacgagttcctctggtatgctactatcaaagctgttacaagacaggtttaaagcttctagattcttgcaactccctaaggagctaggaatcggtccactcaaattattttcctgtaagtagagctcacttagatgacttagattaccaaatgaagttggaatttgtcctgaaattttgttttgggataagcttaggataaacaagtttagcagatttccaagtgaatctggaagatttccagtaagtagatttttttccatataaagaagcgtaaggcttgtgagtttctctatctcttgaggtatggtaccggatatttcatttcctgttagcagcaacacctgtaagcttgttgaaagttttgcgatggaacttggtagggttcctttgaggatgtttttgtccaggcataattgaaccaactgtctactagttatcaatgaggataagaaagaccagtctccagcttctagtcgattcatcccgagattcaattccatcaagtcaggcaggttcccaaaagaaggaataataccatggaatgcattgtcacgaagattaatcacttggagattttttgcaatgcctagtgaagtggggatctgcccttggaattgatttccttgcaagatcagtgttttgatatttggaagggtatatcctatgttatctggaatttctccaatgagtttattagtgcccatgccaaggtatacgagattagacatgttgtacagagaagccggaactgtccctgacaagttgttatatgtcaagtccagttcttgcaagtttggtattctgcttaaactagatggaatggttccctggaagttgttctgtgaaaggtagagtatttcaagggaggagaggttttctatagaggaaggtatgctacctgagagattgttttgggataagctgagataccacagtggtgaggagatatttgagattggtgggatagacccaacaaagttattaactgcaaggcttatgagattaagtgacgagctattaaaaagagcaaaaggaatctcgccgccaagacgattattagttaaatcaagcaatatgagtgatgaactattagctaggagaggtgggatgcctccagtgaggctgttatttgtgagaatgaccacattcagaaaagagttacttccaagtgagaaaggaatattgccgcttaggttgttatttgaaagatataaaactgaaaggttggagagtgtacctaatccttctgggattactccttgaagtttattgtcaaacaagcagatagcttgaagatttgagcatttgttcatgcttgaggggatctcaccatcaatcgagttatttgagatatcaatgatctgaaggttagagcatgaagacagagcctctggtatcgtgccagtgaggccattagaggtgaggttcaggtaggtgaggcgacgcaaatgaccaatttcaggtggaatgttgccagtcaactgattaaatggaaggtggattattgtcaagaaagtaagattaccaatgcaaggtggtatttggccatggaggttggatgactctaggttcaattcagtgactcgagatgtgtggctcttgctacaagtgacaccgggccattgacagtattgcgaagaatcatttctccaggaagccatgactccggcattgtcattgagatggagcttgaggcaaagcagagcctgaaaatcggtagtatctgatgcatcatggagtggtgcagtgggaactagggagaatgcagtgatgagaaagaatgagaagcatgccaataagattgtgaccagaacagggatgctgtgggagcccaaaggcgccat

SEQ ID NO: 81943 - DNA, 1095 bp, Oryza sativa
  Clone ID: PAT_MRT4530_81419C.1
atgatgatgatgatgcggcgggcgttccggcacctggcgcggcagcagcggcggccgctgagccacgtgccggagtcggccgtctacggcgggccgcggccgcaggatgtgggggcggcggcgggagcgggggcgggggcgggggcgacgcggcgggtgacggtgacgacgctccgcgggaagcaccgacgcggggagcccatcaccgtcgtcacggcctacgactacccgtccgcggtgcacgtcgactcggccgggatcgacgtctgcctcgtcggggactcggcggccatggtggtgcacggccacgacaccacgctccccatctcgctcgacgtcatgctcgagcactgccgcgccgtcgcccgcggcgccaccaggccgctcctcgtcggcgacctccccttcggttgctatgagtcctcctccacgcgggctgttgactctgcggtgagggtgctaaaagaaggtggaatggacgcaatcaagctggaaggaggtgcaccctcgagaatcagtgcggctaaggctattgtggaggctggaatcgctgtaatggggcatgttgggctcacgccgcaggctattagcgtgcttggtggatttcgaccacaaggaaagacggttgatagtgctgtgaaggttgtggagacagcacttgccttgcaggaggctggctgcttctcggttgtgttggagtgtgtgccagctcctgtggcagctgctgcaacatcagcattgcaaatcccaaccattggaattggtgctggaccattctgcagtggacaggtcttagtttaccatgacttgttagggatgatgcaacatccacaccatgccaaggtcacaccgaaattctgcaaacaatttggaaatgtcggtcatgtcatcaacaaggctctatcggagtacaagcaggaagtggaaacccggagtttcccaggtcccagccatacgccgtacaagatagctgccgcggatgtggatggcttcgcgaatgcactgcagaagatgggcttggacgaggctgcaaatgctgcagctgccgcagctgaaaacgcagagaaagatggagaactacccgagaacaaatga

SEQ ID NO: 81944 - DNA, 141 bp, Oryza sativa
  Clone ID: PAT_MRT4530_8141C.1
atgcgcttccgtgatcacttcctggaccgggacaaccacctccgtggcttcgcagagcgcccagagcaagaagaacacgaccgccgcctcgctgcggctctcgtcgccatcactgccaccggccgccgggtgctgggatga

SEQ ID NO: 81945 - DNA, 888 bp, Oryza sativa
  Clone ID: PAT_MRT4530_81420C.1
tatttttgaaaaggaaaaaggggtttattgcgtcagcggctagggtttgcggtggaccgggtgcacggcggcggctcacggaaacgaacggccgagatcgatcctaaccaaaacgaacggccgagatcgaccggtccacggccggaccacgacggacggcaacgatgacgtcagcggtgacgtcaccaccggcggcggctcgggcgcacaagctcgccggcgaacgacggcgcgacgacgcgaacggagggcaccagcacgtagagaacgacgcggcgaactcaccggtgaccaaagaagaagcggcggcaaccttcggcttgacgacgacggcggtgctccggcggtctacagcaacgatggaggggcggacgaggacggcaacgcgacggcgaccacgacggcggccttcccgagcgacggcgacgactggagcgacggcggcgcacggctggagcggcggcgacgacggcggcgcgaggctacacggtgctagggttctaccggcgacgagagacgaaggcgagggtggcggcaggggcaaggaggcggcggcgaaggctcacggcgaccggcgacggcgaaggaaggtctagggttcggggagagagacgaatccgattcgagatcgaatccacggatttccaaacgattttagccgacgattccaaaagagaaaaggtagaggagatcccgaagatcatttcccctctattgatttcaccggaaaaggaaaggggcggtgggccccacttgtcagcggcagcgagcgcgcgcgggcggctcggcttgactgggccggcttgggccgaggaggagagagagagggttttgggccgactttcggcccaaagccaaaagaagacttttaaaaaacctttttcaatt

SEQ ID NO: 81946 - DNA, 275 bp, Oryza sativa
  unsure (1)..(275): unsure at all n locations
  Clone ID: PAT_MRT4530_81421C.1
aaaaagtgcgccgctaaggtgaatatggagtatggncttgatcccacaaanggggaggnaataatncangnttntnangnggnttcttnagggccantnggtngcccnnttnccntttgtaatctggaaanntgggggtggcacacaaagcaacatgaacgccaatgaggttattgcaaatagggccgctgagattcttggacataagcgtggcgagaagtttgtacaccctaatgatcatgtgaacagatcacagtcctcaaatgatacatttc

SEQ ID NO: 81947 - DNA, 192 bp, Oryza sativa
  Clone ID: PAT_MRT4530_81422C.1
atgtcaaggtgtccacgtgttgttaacgcgcgcggcaaggtgctggtggaatccaactcctatcacccgctgcgccaccgcatcgctgaccggatcgtccgcgccgcctccatcaacaagcacgccgcccacgccgacgtatcctcgtcttcaactcctagtcctacctctggtggcagcaacccgccatga

SEQ ID NO: 81948 - DNA, 453 bp, Oryza sativa
  Clone ID: PAT_MRT4530_81423C.1
atggcttggcatggtggtcttcgacgacggtgggcgtggaggagcagccgtgatgatggctactctcttcacacgctaggtcacccagatccggtgtcttccgatgaggctgttctcggcgacgattggcgagagaggtgggggaggggtgaggagcggttgcagagcctactaaatgtggcgacgaggtggccgtcgcccccctttcctctcatgctaatggtggcgacgacagtagtgttgtggcttgtgttattgggagggagttgctgccatgctcaccggtgtggtcttgacggtggcaactctcctccatggcaatgggcttcggtgcaggcgatagaaaaaattgccatactagtgcatagtgacgatgacatacaggacctccaacatggaggacggtcggtggtaggacgctggcgaagtgatcgtgcattgaaatggttttga

SEQ ID NO: 81949 - DNA, 265 bp, Oryza sativa
  Clone ID: PAT_MRT4530_81424C.1
tgcgacgaccacgcgttttttgaggggaggctcgttcttgatccatggcgggcttcttcttcgagctgatctaccgccgcggccacgacgcgcagccggccgtgggtgacgttgacggctgcggcgtgatggccgccgccgggtacttatcatcggccaagccgccgcacaagccaccactcggcccgctgcggtatctgctcgccgagcagcggctggtgttcgggctcgtcggcatggccatcgcgttgctgggcttcctcct

SEQ ID NO: 81950 - DNA, 393 bp, Oryza sativa
  Clone ID: PAT_MRT4530_81425C.1
ccggccgggctctctctcccattctgtctctccctgtccctctctctttactctccaagcgttgctcctcagtgctcacgctcttgttcaaccgggagaagatgccgttcaacgcatcggcagcggcgagggctcctccggccaagcacctggtcggcgttcggctcaacgcgatggcgtcaaggttgaggagctgatccgccgtcgacggcgacgggtgctcactctgtcgttctctctctcccatccggcgcgacgccaagggcggctactgggcggcactcaactgggagaagatgcagttcaacgcgccggcggcggcgacggctcctccgaccaagctcctggtcggcgttcggctcaacggcgatggcgtcaaggttgaggagctga

SEQ ID NO: 81951 - DNA, 102 bp, Oryza sativa
  Clone ID: PAT_MRT4530_81426C.1
gttcacagtgaagtatattgtttgcattttacaatattaacagcggcattccaagtaatgagcacataactccaaactggaagcagtcctgtaaataattga

SEQ ID NO: 81952 - DNA, 2353 bp, Oryza sativa
  unsure (1)..(2353): unsure at all n locations
  Clone ID: PAT_MRT4530_81427C.1
ttttttttttttttttttttttgcnactagggaacgacatctttcaatatatgtcacagtttcacagaaccaattttcccgatctagcaaaagcgtctaaatgtatatctagaacattcacaggaccaatgtatatctagcaaaagcgtctaaatacttacacaaaatgcaacttcaagttgatacaagcagctcaacttattacacaccactcaaagcaaaagtacatcagaacgtaacatgactagctaactgaacagaaaacacagtatgatcgatctattcgattagatcagtcctcttcttcgacggtgaaatccggttccatgggtttcttgatgagcgctttgccgtcgcagctgtgccgacgacacctcacgctccctcccggccgcgcctcgccgccctcccgcatcctgagctccatggacgcgcggcgccgcttgttccggcgccaggcggcctggatgaagcacgccgcccacgtgcgccactggtgggagtagaagcggaacctgtgccggatgcgcgcgctgtgcaggcgccggaactgcgacgccacgaaccggaggtcgtcggcgacgagcgcgaacgcctccacctccgacacggcccgcacggtgcgcgtggacagcggcagcgacgcggcggggcgcgggtccagcgcccacggcaggagctcctccccgcagaactcccccgccccgatgcggcacgagttgaagaaccccgacctgcccccctgcgtcgtgtacgagtcgaggtacccccggatgatgaacagcatggagtccaccgggtccagctcccgcaccagccgcgtgcccctcgtgtacagcgccggccgcagccgctcgcagatcgcctccagcatccgctcgtccatctcgtcgaacagcggcactctccggacgaggtcgaggcagaggtggcgcttgatgtcgcggcggatgtccatggggaggtcctcgagcaacgcctcctcgtcgacgccgcgggtggccaaccacttgtactggtggtacctcctcacgcactgcttcagcggctgcggtatctgccggtggttcatccatcgctccatgtccgtccgcttcgtccgccactcctccagccgcaccatcgtcgcttgcatattgccgatgagcagagcaaacagcaccagcccaagaacgccaatgacggttgcgaatgttatttccccgatgaacaggctcgtcgacagattctgccccaagcagctcaggttcttcagcccccaccagaagcagtagaagtacttctgcgtgaaggacgacgacgtcagcccgttgtccagcgcctcgccgtagatgccgaactggtagaagccattgctgggcgtgcacaagctcgtaatgttgctcagctcgtaccacatcgtcctgttgctgctgaccgtcttgcagtcgaaaaacagggtctggcacgacgggccctccacgtggcacgcctctcgccagcacgcctcctgcctctgcaccgagaagaggtaccacagtgctcccagcacgtggctcgcgagcatgtagagtatgaggttgtaggcggcgccggcccacgcggtctccgtcatgacgccggtggccatgacgatctgcctcgagagcgggaagatctggaacagccgcggcaggtactggaagatgatgctgaagcggaggatgttcttccggttggccgtcgcggactctttcagcctcggtatcacaatccctatcacgaactgcggtaggggcagcgcggtgacgagatcgaaccagaaggtgccggcgaggtacctcctggcgatcttgcagggctggatgacgagctcgcccctgccgaacacgcgcgacgagggggcgatgaaggcggtgcggaagcggaagaagatgtgcgcggcgtagaagaggtcgagcagggagcggatcatggagagcgtgaacgccagcgagtacttcagctcgatgcacatgttctgcctcgtccccgtgaggtagaggaagagcgggtcgacgaagagggaggcgaggcaggcggcgaggaagatcttgctccacaggtggatcaactgcccgcgcgggtcgaagaagaggtggttcgccccggagctcatcagcgactccagctcctccgagaaggcccgcgacagcacccggtccttgaggctgccgccgccgccgccgcctcgccgccatttcctcgggtcgtggtgctgctgctgctggtgttgagccttgccgtgcttcgtcgacctgctcgacgacgtgcactccggcacgcttgatgttttccagtgcgggagctccatgtcattctgaaacctgacggctcgtgagccattgcatgccat

SEQ ID NO: 81953 - DNA, 1551 bp, Oryza sativa
  Clone ID: PAT_MRT4530_81428C.1
atgcggcgcgccgctgccctgctccgcctcctccgctccggggccagcgccggcgtccgcggccgccccgcctgcgcggcggtccacccgctcgccgtcaagtccgggagcggctccgacgcccgcgtggccaccgcgctcgccgacgcctacgccaagtccggactcgtcgaccgcgcccgcagggtgttcgacgaaacgccgctccgggaccaggtgctctggaacgtcatggtctcctgctactcttcgcacggccttgtgagggagtgctgggatgtctttggctccatgaggcggtctggttttcccggcgatggcttcacgttcagtgccttgctcagtgtgcgtgcttcttcttcttcttcgtgctatgaccatgccaacctgttgctggtcctgggaagctcggtgcatgggattgtgatcaggttgggtctccacctggatgtggtggtagccactgcgctccttgatatgtatgccaaatgcggccaagttgctgaggctagccgggtgtttgatgccatggtgctgagaaataccgtatcctggaatgcaatcattgtttgctatggtaagcatgacagaggcaaggaagccttcgaccttttcgtgtcgatgatgagacatgggttttgccctgacgagcttacgcttgccagtctacttagttcctgtgccgacatggcggctgctaatgaggctactcagcttcatgcttacactgttagaagaggcttgcaagactttctacaagtgggcaatgcccttatcatggcttatggtaagaatggttttgttcaagaagcaaaacgaacatttggtatgatccataacccagatctagttacatggtcatcaatggtttcttcttttgcatatcttggacttgccaagagtgcaatcgacctgtttgacagaatgctccaacaaggcatacgggctgatggcattgcatttcttggagttctttctgcgtgcagtcatgctgggctcattgaagatggcttcaagtactttcttctaatgacgagggactacaaaattgatccaactccgcagcatcttgcttgtctagttgatctcttagggagagctggtaggattagagatgcctacgaatttttggtcaatatgtcctgcgacgcaaatgttgatgtcattggagctttccttggtgcttgcagaatgcgaggaaacattgagtcagcaaagtgggctgcctctaggctatttagtctaaagccagatgatccaatcaattacctgcttatatctaatacgtatgctgctgcaggagattggaatgagcttgcaaaggttttcacttaccatagacatgagataatgtacacccaggaaggaaggaagtctaccgtttcttctagcatttattggttaatggtggccaagcagaataaggcacttgaccgtttcaagttcagttacctgcttgtgagccaagagatctgtgcggctcaatcgtggttgcttgcgctgtgggaaagtttgatgagccaaacatccagatgcaatgagatcgaatga

SEQ ID NO: 81954 - DNA, 1238 bp, Oryza sativa
  unsure (1)..(1238): unsure at all n locations
  Clone ID: PAT_MRT4530_81429C.1
atggcgccgccgccgccgtgttgtgtgctagtggtacgctgctgttccggatccctcccttcgccgccgccgccgccgccgcccagaccctctccctccaacaacctcagaatcgccagaagagagtttgtgctgaggagcagtgagctcgccacgctcgctgccatcttccacttgagcggcacgaagccaaggtacctgggcgtgcagaagagtcctccatcgctggctctgtgccctgccaccaacaattgcgtttccacttgtgaggacatcactgactccattcactacgctcccccatggaactataaccccaaggacggacgcagggctaaacccatcaccaaacatgaagccatcaaccagctcattcaagtcgtcacacaaacaaagcctgacaacttcactcctcgcctagtagagaaaacagatgactatgttcgagttgaatacgagagtcctatattcgggtttgtagatgatgtggagttctggttccctcctggtaacaaatccattgttcagtaccgatcagcatctcgatcaggattcattgacttcaacgccaacaagaaaagagtcaaggcacgcacgcacgcgcccaatatcgatcatttctattacggagtaggagtagtactcctatctatcattgtgttgatccatgtctcatgctctgttcgatccatctttccattgctgcaggcgctcaggttggcactggaaaacaaaggctgggcttcagaaagcaccatctgaaatttgtcttttttatatctcgacgtgtgagttgagtttggacttaagattttgtggagttgtatatatgtgttgtnatgatgttgtcaaatttttccagatttttttataaccgtttagatggtttttgagtaaacaaggaaacatcccctcgaggattagaatagtttccctccgtactgtactatacagactgaccgaccgattggctggacaggaactcttccttcctgcgcttntaattgcacattctnctattcttaatgggatagtagaacttgatttgcnnnnnnnnnnnnnnnnnnnnnnnnnnnnnnnnnnnnnnnnnnnnngnnnnnnnnnnnnnnnnnnnnnnnaaaccctgggggggggccgggccccaattcgcccttagggattggataccccgcctcacttggccgtgttttaaaacgtgggattggaaaaacctggcttacccatatttattgctttgg

SEQ ID NO: 81955 - DNA, 2964 bp, Oryza sativa
  Clone ID: PAT_MRT4530_8142C.1
tcccgggtcgacccacgcgtccggtttgatgcggagcggcgcgcaggctcctcgaggcggcggaggcggcggggccttctcgaagcggacgctgtccggctacatgaggatcatgtcgtcgggggcgtccacggccgcgtccagcctgctgtcggtgggcgcgtcgctggtgaactcgatcgccagccacgacgaggatgggagccgtgaccaggtacaatgggctggatttgataaacttgaatgtgggggtgacatgctgcgacaggttttacttctagcttacagatctggtttccaagtatgggatgttgaacatgctaatgatgtaagacagctagaatccagacatgatggtacagtttctttcatgcaactcctaaagaaaccaattgcctctacaaacagtgaagacaaatttgcagatgaacggccactgttagctcttgcttgtgacggaactagcacaggaagtctaatcagcaatgatggcaatggccctgttcccaatggagccaatggtactctccataatattggccatgagaatcatcctactgtacttcggttttattcattaagggtccatgattacgtgcatacaataaagttcagatcaactgtttattccatacggtgcagttctagagttgtagctgtatctcaggctaatcagatacattgttttgatgctgcaacactggagagagaatacacaatccttaccagtcatatagttccaccaatttcaagttatggaccacttgcactgggtcctagatggattgcatattctgggaatccagtcccagttccggatacaggccgtgttacccctcagcttcttaatctatctcccctagttccacaacctggttcaaatggcagtgttgtggcatactatgcaaaagaatcaagcaagcaactggcttctggcattataacacttggtgatgttggatataagaagttgtccaagtattgttcagacttaattccaagtagtaacaatgttataaaccaaaggaattctggcttcaaagcaaatggggcaacaataaacgggcatacagacagcgaatatgctggaatggttattgttcgagatattgtctctaaatcaatggtggttcagttcagggcacatactagccccatttcagcactctgttttgatcccagtggaactttgttggtgacagcttcaattcacggtcgaaatatcaatgttttccgcattctgccttcttcgcatgggagttcatcagaagctggtccaaatggaacctgtgttcatctgtacaaattgcaaagaggcatcaccaatgcggtcataaaagatatcagttttagtgacgacagtgaatggataatgattagctcttcaaggggaactagtcatttctttgcaatatctccatattgtggatcaacaagctttcactacaacgaaaacaatcttgcagaaaatagttatgcggtggattcatcagttaatcatactgcccattggtcccaaaactcagctccctctctgagtctcaatcagaagatactctctgttacgggcccccctgtaacattgtctgttgttagtagaataagaaatggaggcaacctgttgaagggcgctgttcatggtgctgcagcatttgcaacaggtgtttccagtccaatttctggtgctattgcttcaacatttcacaattgcaagggtgccgtcaaaaactcagatggaagttcgccttgcatgaagtatcatttactagtattttctccatctggaagcatcattcagtatgttctccatcgctctgcagagcaggatcctggaattgattttccctcgagtgccattccttatggatcacaaagagaaactgacactaggtttattattgaggctcttcaaaagtgggatgtttgtcataaaagaaatcgaagagacgctgctgagagttttgtatatagtgattttgacatcggagaaaacagtaaactttttcagaaagtggcaaagaaaggaactagtgtttatccatccaatggcactgctgttgaaaagcagaagctaggtgatgagaatcataatttttatatttctgagagtgaattgcagactcatgttgttccaacaccactctggtcaagatctgggatgcattttcaagtaatgggggatggagctctagaagcagacaatactggtataatttcaggtgaacttgaaatagaaaagctccagactcgcaatattgaatctaggtcaaagaatcttataccagtatttgaatctcttcatacatccaggtttcaacagtcaagggtgagcacacctgatagtaacaaatatggattgcttcagcgtcaaaagtccggattttcagaggacggtagactctcctgcagaagcagttctagctctttggactgcatgtctgaaggcccaattagcactgatgataatggttttggtcaatgtttagtagaagatagtggtggtgctgtaaataagaacccaaatgttaacccccgttccgagcttgtaaataatactcagagccttaacacagaggcccagctcggatttgtaaataacaaagaggattgtgaagacagagagcaactcccagatttgtgatagcaactgtgatcaaagacgatcactggtgatggaggagcttcttgaatcgcaagtcttcattgtgcgtgtgtagctgctattctttcatttctcctcctggagttcttgacctctcttctatagctctatttataagcattcatgataaatttactgataaaaaaatgaaggggaggtcgaattaaggcccaatgggtatgggagcggtggtgctgtgaagttgggtttccatcttacaaaagaacgtgcacataacaagattgttcattgcattttcaataatagctcttaatttgtgaataaaaaaaaaaaaaaaaaaa

SEQ ID NO: 81956 - DNA, 350 bp, Oryza sativa
  unsure (1)..(350): unsure at all n locations
  Clone ID: PAT_MRT4530_81430C.1
ttccacatttcctcctcctcctcttctttctctcaagaaaatcagtagctagccatggcgtcttcttcttctctcaggagcaccagctgcctcgcctccgccgcggagaccgacgccgacaacctctgcctccgcctcggcccgccgggaagcagcatcaccaccaccaccaccaccggcgacgagcacgacgacgacaccgccgcaccggccaaggcacaggtggtaggatggccaccagtnagggcataccggaggaacaccttccatcangccgccgccgccgccgccgcaaccaagaagggtggtgatgagaaacagaagcagcagcagcngggaagagggcttgt

SEQ ID NO: 81957 - DNA, 393 bp, Oryza sativa
  Clone ID: PAT_MRT4530_81431C.1
cgtccgagtctgacatgcctcacagtgacctgtactgaaccgtccccgtcaccgataaggattgctgaatgctacctggccatatttcccttcagttttttttttccatcttgggatgttgagcatgggggccaatgcccatgatccttgggacttctaagagttatccgctggttggttcgtgggcccgaaggacaccgtgtgcatctaccatggttcatgcatcatgcatagctgcccctggaccagtgtggatcccatgccaggaaggatggctggggaggcagcatttacatcacctggcattccctgcgcgattggcccattcgtgtttaattctgctgtgtgggggttgtaggagccatggcattctttgtccagggctcacttttg

SEQ ID NO: 81958 - DNA, 1195 bp, Oryza sativa
  Clone ID: PAT_MRT4530_81432C.1
ccggccgggacttcgtcctcatcccatcttctcctccaaattcctcttccacatttcctcctcctcctcttctttctctcaagaaaatcagtagctagccatggcgtcttcttcttctctcaggagcaccagctgcctcgcctccgccgcggagaccgacgccgacaacctctgcctccgcctcggcccgccgggaagcagcatcaccaccaccaccaccaccggcggcgccgacccggcggcgaagaggtccctcggggcgaagcggtcgctggagagcacggacagcatggcctccggcaccggaacttccgccgccggcgacgagcacgacgacgacaccgccgcaccggccaaggcacaggtggtaggatggccaccagtgagggcataccggaggaacaccttccatcaggccgccgccgccgccgccgcaaccaagaagggtggtgatgagaaacagaagcagcagcagcagggaggagggctgtatgtgaaggtgagcatggatggggcaccatacctgaggaaggttgatctcaagatgtgcaagggctacagggagctgagggaggcactggatctcctcttcaccaagtgcttctctgcaaccgcctctgacggatgcagcgatggccagttcgccattgcctacgaggacaaggacggtgacctcatgcttgttggagatgtgccctgggaaatgttcatctcttcctgcaagaagttgaggatcatgaagggctctgaagccaggtgatggtctgatggatgatcaaaggagacaaatcacaggctaggacacaccacatgagaagatggatgatgaatcagagatcatgaatcacatggcatgagatgaatgggatcaagaagggagcagaggactagaagagccctgatggcttgtgctcttcgttgctgtacagagagagtttaggcactgccttgtttcagtgtttctgaatccaagagggacaagatgtatgaactgtgtatatagtcttttaattaggctcatttcttttttcagtttgagttttgtactgtatgagcgaaggctggaaaatatgaaaaaagggagaaatttgacttaagcttggtcatttctccacaccaaagaaaaaaagaaactctgtgttcatatcataaatacagtaccaagccagtattttctcaaaaaaaaaaaaaaaaa

SEQ ID NO: 81959 - DNA, 729 bp, Oryza sativa
  unsure (1)..(729): unsure at all n locations
  Clone ID: PAT_MRT4530_81433C.1
ccggccgggaaaattcaaaatcgagccactccatcgaatccttccacccggctgctcccgtcctcccgcatcttcgcctccatgggctgcttcctcgcctgcttcggcgaccgccgccgccggcggcagccgcggaggcagtctccggcgaggtccccgccgccgcggccggaccatgttgctctgctcggcaaggcgttgacggcggtggatgtggaggcgaaggaggaggtggaaccgccgccactgttgcaggaggcgaaggatgtgttgctggcaccgccgcccatgccggtggaggctgcggaggaggtggtcactggcgcaaggcccggaaaggagctgagtgagcagaaggcatcgccagcaagctctttgctgccggagaagcaagtaacaccgccactctccccggtggcacactcaccacctttggcggaagcagttgtttgcactcctgatccagaactcagggaggtgggcggacaagagagccgcagcagtggcaagaagaaagtaacgttcgacatgaatgttacggcatatgaaaacactgcaccggctgaccaagaggaggaaccaccagagcctgtcagtatggtagaaaatgaagatggaanacacatgcaaaaggatgtgctgctcccggagaatcaccgttaccggaattgctcagacagcgaagaaagagaagatgagtatggtgaggacgacnactacggtgatgat

SEQ ID NO: 81960 - DNA, 1482 bp, Oryza sativa
  Clone ID: PAT_MRT4530_81434C.1
atggatgacaggaggacaattttgatggatcgctatgaaataggtaggcagttaggacagggaaattttgccaaggtatattatgctcggaatctcacaagcggacaggccgttgcaataaagatgattgataaggagaaggtaacaagggttgggctaatggtgcagataaagagggagatttcaataatgagattagtaaagcatccaaacattcttcagctttttgaggtgatggcaagcaagagcaaaatttactttgttttggagtatgctaaaggcggtgaacttttcaagaaaatatccaagggaaagttcagtgaagatgttgcgaggcggtatttccatcagttgatcagtggtatagactactgccacagccggggtgtttatcaccgtgatttgaagccagaaaacctacttctagatgagaatgagagcttaaaagtctcggattttggtttaagtgccctttctgagtccaagagacatgatggcctccttcataccacctgtggaactccagcttatgttgctcctgaagttcttagtaggagaggctacgacggtgcgaaggctgatatatggtcttgtggagtaattctgtttgtgcttgtatctggctaccttcctttccatgacacaaatcttatagagatgtatagaaagattgccaaagctgaatacaaatgccctcgttccttttctgctgagttgaaggatctgctatataagatacttgatccagatccaagtactagaatttctatcccgaagataaagagaagcgcttggtacagaaaatccagtgatgtaaatgcactgaagagcaaacatgaaacaggagacaaggtgtataagggtgaagccacaacctctgacacaacagaatgcagtatttttgagggaaatcgtgcgtcatcaagagacaaagtgtacactaatggtgaagccacaacctctgactcaccagaatgtagtaattccgatggaaagcaagcttcattaagcctcccgaacttgaacgcgtttgacatcatttctctgtctaccgggtttgacttatccaatttgtttgaagaaagatatggccggagggaagagagatttaccactaggcaaccggcggcagctatatttgctaagctaaatgaattggccagacgcttcaagctcaaaattaagaaaaaagaaaatggggttctgaggttggtagcaccaaaggaaggaataaaaggattacttgagcttgatgctgaggtttttgagcttgctccatctttccatttagttgaatttaaaaagtccaatggggacactatagaatatcaaaagctcatgaaggaagatataaggcctgcacttaaggatatagtttgggcatggcaaggaggtcagcaccagcaacctgagcaatctatgcaaggaatgcaaggagagcagcagccgtcacgtttaccatcacagcagccacagggctaa

SEQ ID NO: 81961 - DNA, 1647 bp, Oryza sativa
  Clone ID: PAT_MRT4530_81435C.1
gctttcttttttttttttttttttacagcagaagcatttgattcgataattactacagttcaatggcaacattgtttagcagcattttcctcagtatgattcaggactagcacatatagagaattccaaacaatattgtcactttaactgagacaattcataaagcatcttcacttgaagaaactaacatgaggttgccttccagaaataaaaaaccataacggtacgaaataccggcatcatcaacataagatgacgattaatgacagcaacctgagttcctgacactgaagcctcagttatttcccattctttgctgaaacaaacccaaatatcggccaaccccggaatatacacgatggagggaagacaagtattcacaggaatcgcggagtaggcagaccattctgtgcgccataaatggaaagcagctctgtggctgatcttccactaaaattatcataagatcgattatgtacgggagccatcggactccaccagtgaggttccccagtttgtggccagaaggtctctgaactccagctgtatgattgattggcatgtctaggggcaccaacaccattacggatgttaccgtttgtggtgcttgcggtttcagtgagaggaaagtcatggggggctctgatctcagctgacgatgaggctgcaatgaaagatgtgattgacaaagcccttggtcgaacccttctggtcgcaggaggttgtggattgcttgccatggatgatggaattgtttgttgaacagcgtgacttgtcataccatggccatggcctctagtttcagacgcagcagttaatgacctcaaatgtgcaagattgcttgctctgcgagctgtcggcctgtggaataaggaattatcatgcatatgtggtcgcaatctttgctggttgcctccatcatatcttggcattcctatgccaaatggggcggtggaatgattgagtgttccaggcatttgaacactacctaaatactgctgttctctctcatggtttcttggctcagattcattgaaaacttgagtatttctcaaatctgtagttgcatgaccttccgtaccagtaggacgctgatggaatggtatgctttcagtactggcagtagaactagaaggcgcatacattggatggtgaaaaccatgcagagaccctatatactccaaaaaaggatttggctcagattcgctttccccaaaaacagaggtcaatggtgtattgaagggacaccacccaaattcaaatgagaacgggtagtcaaaggtttcaccattcagccagtcacctgtatcagaatggctacatggttggctctcattcccatagagccagtgacctttctcaatattccgacaatttgggcactgcatcaccccttttgcattaaatgcagatccaatgcagtctaggtggaactcgtggccgcactgcagccgcgcggtggacctcgccgccaccccgtcgccgcacgccaccgcgtccaggcagatcgagcacaccgccgccgccgccgccgccgccggcgaggaatccggcgacacctccagatccatcggctccgccgcgaaggccatgagaggctgacgtggtggggcccggatgtctgcgagaggagggggggatgtctgt

SEQ ID NO: 81962 - DNA, 1011 bp, Oryza sativa
  Clone ID: PAT_MRT4530_81436C.1
ggctgcatggtcagtgggagcaggtctccggacagcgagaggtggaagatccatggagatggtgatcttccactcagcttcagctactacgtcactgttgcagatctttggacaattgacaagtgctgggatgcccaaaagctcaattcaatctttgagcagcaagcggttaatatgatattgcaggtaccaatcatccaagacaactctgaagataaacttcgatggaaattcactcccaatggagagtgcaattccaaaagtgcatacaaggagatctttaatagaatcttctcaatcatgtggcaaatctggaaagcaagaaatgatcttaaatttcaggggaaggtgctcgagccaacacaagtctgttttgcagcagaagctatgatcaacacttactcttgcttgattgagcaacctcatttgcaggataacatcgaccagagcccttcggagagaagaatggaacagctgcctgaaggtaacagatgctatgttgatgcctcctgggaacataataaagcatgcattgggatcttttttcatcttcctgctactcacaatgctcttttcattaaagctttttgtcacttgactgaatcccctttacaagctgaactgcttgctttgcaattagctatggagattgctttggttttgaatttcacagacacaatcttcctcatggattgctcaacggtggtggacacagcgaagaaaggaaacttccatgaagatccaagccattggagtcttttacctatttggagtcaaatcttaaccttcttaccaggacatttgctcaaggtccactggattccaagacatctcaacaagttggcagataagctagccaaggatgctagagggaacccttcatcccctccaatctttagttgccaaaacattgctcatattgctaacggtgacatcgcctgatccaaatgaatctaaggtttttatccggagaaatcccttaatgtgaaatagagcatatctctcagcatg

SEQ ID NO: 81963 - DNA, 1841 bp, Oryza sativa
  Clone ID: PAT_MRT4530_81437C.1
gcgcgcccggcctgcaggaattcggcacgaggcgaaacaaaacctccccacgccgcgagatctcgcagcaatggcggcgccgcgccaccaccacctcgccctcgccgtcgccctcgccctcctcgtcgtcaccgccgcggcggcggacgaggggggaccgcgggggaggcgggtgctggtgctcgtggacgacctggcggtgcggtcgtcgcactcggccttcttcgcgtcgctccaggggcgagggttcgatctcgacttccgcctcgccgacgaccccaagctctcactccaccgctacggccagtacctctacgacggcctcgtcctcttcgccccctccaccccgcgttttggaggatcagtggaccaaaattcaattctggaattcatcgatgctggtcatgatatgatcctggcagcagactcttcggcctctgatcttatccgaggcattgcaacagagtgtggggttgattttgatgaggatccagaggcaatggttattgatcacattaattatgctgccactgatgctgaaggtgatcatactttgattgctggtgatgacctcatccagtcagatgtgatactggggtcaaagaaaattgaggcccctgtattatttcggggaattggacatgcggttaatccatctaacagcttggtcctgaaagtcttatccgcctctccgtcagcatactcagcaaacccaaagtctaagttggcttcccctccatctctcacagggtcggctatatcactggtttctgttatgcaggcaagaaacaatgctcgggtcttgatatctggatcactcgatctgtttagcaacaggttcctaaaatctggtgttcagaaggccggtagcaagataaggcatgagaaagctggaaatgaacaatttgtgacagaaacaagcaaatgggtcttccatgagaggggccatctaaaggcagtgaatgtcaagcataacaaggttggggagacaaatgagcctggcatgtaccgcatcaatgatgacttggaatactctgttgagatctacgaatggtctgggaccagctggaagccgtatgttgctgatgatgttcaagttcagttttacatgatgagcccttatgttctgaagacactgtcgactgacaagaagggtgtattttcaacatccttcaaagttccagatgtttatggagttttccagttcaaagttgagtaccagaggcttggatatactggtctctctctttctaagcagattccagtgcgcccttacaggcataatgagtatgaaagattcataacttcggcatatccgtactatgctgcgtcgttttcaacaatgggagccttcttcatcttctcatttgtgtacctgtaccacaaatagataactcatgagagagcacgagttacctgaggctgatgtgtgctagatccatgcactgattgtgctgtaaacccagtgttgggggttccaagttcatagaaccatatttttgtagcgcaatctagagcacctttgacgaccactatcattgataacaagaaattgtactcctgctgctagaatcttccaaccatcccccttttctttcaatcttgcctgatgaagagctgttgaaactttcatagtcaatagaatcataacaacataagcaattcggtgagttcggaagcgcatgtgaactgttgtccctttacctggggcttcgaagttcagagacgagatatggttattgtttcagatgggagtgtgcttgaatgcgattttcttttgccactgaaaaaaaaaaaaaaaaaaaaaaataaattaataaaaaaaaaaaaaaataaataaa

SEQ ID NO: 81964 - DNA, 622 bp, Oryza sativa
  Clone ID: PAT_MRT4530_81438C.1
gaaacagagcctatactatgatcactttcaacaaaacacaaacagagcctcgagttcaccgtgaaaaaaggaaattatgatgcgttaaatactccgactagtgtcagaaattccgaccataaatcaactcaaacttagagaaaacttgatattgagcactatattctctgtacgttatctagactcaagaaataaatacatacaagaattaccattgtctaggatcatgtcttttcttccatcaaataacccagaaccccattttcctttgaagcactcaggcaacagtagagcattcttaaaaatgtcatcattaatcacaaaaataagttatgaagatgtactttcatttgtggcataaagtttaatggtattttatctaccctcattaaaacagtgttgaaagtgcactggcctgtgcataatattttattggcagtaggatttgacttttaaaccctggtggccaccattgaataacccgtgctttgcttatttatggaccgttttaaaagagtgaaacataaacaaatgctaatacttgatatctcaaaataacttttagtacttaaaaagcttttgtattgatatagttttaagtataaatgtttgactgactgaa

SEQ ID NO: 81965 - DNA, 578 bp, Oryza sativa
  unsure (1)..(578): unsure at all n locations
  Clone ID: PAT_MRT4530_81439C.1
ccggccgggaagcactttacaatccaattcactcttctttcgagatatcaactctttaaaccaccaacaatctcaaacatcaacttttacaacactctcatccgtcaaaatggctgtcaacactccttctacctgctgccgctccagcgacggtgccagtgaatgcgcctgtgcccaaaaggccacttgctcatgcggtcaaaagtctgctcttcagtgcacatgcgccaaggctcccgtcgaaaacaccgtcaacggccctcgatgctcatgccgtgctcgtcccgctggcgaatgcacctgtgaccgtgctgcttctgagaacgtcactcccagcggcgccacatgcgcttgcggatctcgtcctgctggtggctgcacttgtgagaaggctgccgatggtggcttcaaccctgccaacgagatcgactttaccaccaagaaataaatgtctgactctgatgggaattaacgaaaacaacatgcattaataaattactggacggcgttggggatcatgactaggtactttgngttgggggtgggagaccatcgataccagatacacaagaattgaa

SEQ ID NO: 81966 - DNA, 661 bp, Oryza sativa
  Clone ID: PAT_MRT4530_8143C.1
gcggccgtcgatcttgacctggaggatgaggtagcccgcctggcaatcctgcgagatggcgtcggcgaggtagggcgcgaaggggacgctggggccggcgagcaccggcgaccagacgtcgacgtcgccgtggccctggtacaccggcgggagcgaggcggcgacggtgatctgctggtacttgtaggaggcgtagacgtcgaggcggtcgtagtagacgccgacgcggtcgttggggttgcgggaggcgacggtgacctggatggtggtggaggggacgccgccggcggtggaggaggagttggagaggtcgagctggcggagggtggcgtcctggaggtagaagcgagggtgggtggggcggaggacgaggtagacgatgagggcgatgatgccgacgaggatggcgaggacgacgaggacggtgatgaatcgccggcatccctgccggaagtcgtcgtcgccgtgcttgccgcaatccttccccatgatgcttctagcttcttggtttcttggtggactcttctcttctactctacactagtctttgctttggtttggtttggttttgcttgtaatcctttgcttaatttgagcttagtgcccacgcgtgagtggagaggagagagaagaggaaaggtggtggtggtgtcccggccgg

SEQ ID NO: 81967 - DNA, 734 bp, Oryza sativa
  Clone ID: PAT_MRT4530_81440C.1
catggattattcctcccccgcgttccgcctttgtggggttgtctaaggtgtctgatggactataaggatttgtgggcgtttggttattggtccccttggatggcatttgggttgttggtaaatgacatagtaatttttggttggtctctgatttccacccgttggatatgtcttgcactgtgttggggtgctaagttgaagcacaatctgcatgcaggagtatctggtgatttgggaggatgtagctgggacgacgcacgagctgtctggtgggatatggtgtatgctagggaagatgatgaacgcatgtgcgatgagcttgtgtgtgcattgattgggtggcgcaatgccctatatccactaattgtgtgtggccccacatattgtgtattggattgttgccgtgttgtgtcatgccggtgatgatgccccggtgatggtgtgtgaggttgtgtgttgggtgttttgcccgaaattgtggcggacataatgtggtatagccacgttgtgcgtgaaatgactgcagggtgtgctgtgtgtgccacacatgatgggctgtggctggtgacatggaatggtgacccttgcctgtgcccctgcgtctggattcctgatgtgtaagataagacaacccatttacccaagttttggatttgtcattcatgtgtagtttgttgatgcatgctaagctggcccccaagtattcttgcatctaaaaaaaaaaaaaaaaaaaa

SEQ ID NO: 81968 - DNA, 507 bp, Oryza sativa
  Clone ID: PAT_MRT4530_81441C.1
ggtccggaattcccgcgtcgaccacgcgtccggccgtacctacatcttccacattgatagatccctggccagatcattagtcacatggccttagccgtggccctactccttgcactcctcgttgcatccgtcgtgttattgcacgtggaatgccacgccccctgcgacaacagcttcaacaaggaccctcctcgcccctgtccttaagcgcttggatgaggcctctcatgacatcaacgaggccgtcgactacgccgtggatgctgccccacctgctgaccaagctgaagatgaagctgacacgtgaaatcgcacaatgaacccctttgctgttctctttacggccctaggagatgacaagagagatgatgcaactgcacttgcctactagatagcatataaagctgcacttgatgccgtcctagctgacaagcctaatgtgatggatgaatccttgaaagaggccgctatggaggctgttgtatgatgagccacacgccgaccttc

SEQ ID NO: 81969 - DNA, 648 bp, Oryza sativa
  Clone ID: PAT_MRT4530_81442C.1
atggtgaacacgacggcgggcgtgaagtgcggcggcggcggggcggcgctgccgctgtcgacgctgaaccacgtctccctggtgtgccggtcgctgtccacctcgctcaccttctaccgcgacttcctcggcttcgtctccgtccgccgcccgggctccttcgacttcgacggcgcatggctgttcaactacggcatcggcatccacctgctgcaggcagaggacccggagagcatgccacccaataaggagatcaaccccaaggataaccacatctcattcacgtgcgagagcatggaggcggtgcagcggcggctgaaggagatgggcgtccggtacgtgcagcggcgggtggaggaaggcggcgtgtacgtggaccagatcttcttccacgaccccgacggcttcatgatcgagatctgcacctgcgacaagctccccgtcgtccccctcgacgccgccgccgcccactccatcttcgccggccgctcgccgccgccgcccgtcgcctgcaagatcaggcccgtcaagcagccgtcggcgacgaagctgggcagcgtcgccgccggcggctgtgttggggaggtcatcgtcgtcgacgcgatcaacggcgccgccgccgccggcggcggcggcgcgatgagctga

SEQ ID NO: 81970 - DNA, 437 bp, Oryza sativa
  Clone ID: PAT_MRT4530_81443C.1
ggttcttgaagaagtatagcaagaagtacgaacagggggaccatgttgcattcaatcaggtgagcgagcaggaccgcaagaggcggacacagcttcaggaagaatgggactcatgggttgccaagtggaagcagatgcatgaggaggagcgtgcttacaggagggagctcagggatggggaggccagcgacgacgaggaagagtatgaggccaaggaagttgaggtggaggaagtcgttgatgtccgtcaagaagttcttgcattcgacctagatcaggagtgaaaacacttattatagaatctgttgatttctttcctgttggtgttaaagttcattggggtcgcattgcataataggccctagtgatcaagtgcgcaatttactgaatcgtggactgcttaattggacacttgctgcttgaaattgtggatcatg

SEQ ID NO: 81971 - DNA, 1956 bp, Oryza sativa
  Clone ID: PAT_MRT4530_81444C.1
atggatctcggcatgtctacctccaccagcgcgtcgcttaagaagctacaggaggatggcgccctccccggccgcggagccatggagagggaaccaggaggtactgaacctgaacctgtcctgggccgtatagttgcgatcgaggactatattctctgtggctttcttcctccgccttctgagtttcttctcttggtcttgaatttctacggcctttctctgctccatttgaaccccaattccattgccttcctcagcatcttttcacatctttgtgaggcctacattggggtagagccgtttctcgacctctttcgcttctactacgagttgcgttggatggaatctactagggtatctggatgcttgagtgacgccaccgtggagcgccgcgtcggccaattaatgatcagcggcctgacaacggcaagcgacgtccccatgcctctttatgataaggaggcgatcgagcgtgaagccgcaatcaacgctctccctctgactgacgttattggactgctcgcggaccaccaggcgacggcctcactgaaggagagcgtcgctcgggagacgcctaacgtggccatcgccgctgctgccacgactagtggcagccgtgtcccgaaaacgggaaggacattcacctccgttctcggtaggcgccggagagcatcctccccaccgagatgtcacctcaactcgcgcttgatttacccaggccgtggacgcgtcttcgccacctccgcagcggaggaagctggtgacgctaggcgagaatgccctcagacctactcgtgggccatctgccaatgtcctcacctgggggagctccaagctgagatgaaacgcatcctcgaggctggcgctcgcggcgtgagtcgtgagatcgaggaggcgaagacggcggcggcgtcgtcggcaaacaagcatgccgacaaactggaacgcgacctggcggaggttcgcgaggacctccagaagatgagggagctggtggccggtaatgagtggcaacggcggggactcgaggaccggatgtcggaactcgagaacaacctgtcggagatccgtgggtcgctgcgggtcacctacaccggtcttcatcagctcgccgggcagtgtggcgtcacgacaaccatcccagcgaaccccgacgagttctcgctgacgtcctcacttgcggaactggctacggcgatggaggcgataccctccaagcatgcggccagggtcgtggaggaggcgtcaaacgggatttacacgggcctgtcacgtcctagcgtgtgtccgactggcgcaccccaaactcgatcttcagcagaccttggaccggggggctgccaacgacgctcggatgtcgatgtcgaggatgtccagcagcgtgggcagcccaagttaccggtggtcgccccggcgattaccctccaaacgcctatgtcgcaggatgatatgggacaagactcacccgtggaaacgggcgtggcgatgacctccttaagttgggagctccgggtgccccgtggagatcccgaggaatcggcggccggctacatctcgtggctgaatggggcatgtactcagctcgaaggcgtcggcaagcgcattgacgaagccttgaagcaggaatgccgtcggtcgagccgatatgccggagggcatgtgttggcttgcatacgagatcatcgtccgcagctgcacctcgagtttcttcacattcgctcgttctcggaggactctggcggagatagaacacctggcgaagtcgatggcgccgcttgcggaggaagttttccagtcgatggactggcgttggccttcctgtgtgtaagagtgcctcctcagttcttgactttgggcagtcgtttgagttgtacactctccctagcccccagccttgtcgtcggagaatggttcccggaggacaaggctcttggacctttgacctacctctgttga

SEQ ID NO: 81972 - DNA, 549 bp, Oryza sativa
  Clone ID: PAT_MRT4530_81445C.1
atgctgacaaggcctccgaggatcctaagggatcttcggctgggaacgcccagagccgataaggccttgtcggattctgtagagacaaaagaccatgttagacctgatcgtgtcaaaggtccaagagccttgtcctccgggaaccattctccgacgacaaggctgggggctagggagaggtacaaaggctaccaggaaggccaacgccagtccatcgactggaaaacttcctccgcaagcggcgccatcgacttcgccaggtgttctatctccgccagagtcctccgagaacgagcgaatgtgaagaaactcgaggtgcagctgcggacgatgatctcgtatgcaagccaacacatgccctccggcatatcggctcgaccgacggcattcctgcttcaaggcttcgtcaatgcgcttgccgacgccttcgagctgagtacatgccccattcagccacgagatgtagccggccgccgattcctcgggatctccacggggcacccggagctccctacaaacatgggccatggacgtgcagcaactctttag

SEQ ID NO: 81973 - DNA, 197 bp, Oryza sativa
  Clone ID: PAT_MRT4530_81446C.1
aaaaggaaaacaaattttttattttttttccaacccgcccctttttaaaaacttgaacaacatgcacacttttattggtgatggaactttaaaaaaccttccttataaaaccacgccaacggaagacactcactggctattcaccaaaaaaatatgcgtggaaactcttgggggcttaaccagaaatgaaaaccccc

SEQ ID NO: 81974 - DNA, 2037 bp, Oryza sativa
  Clone ID: PAT_MRT4530_81447C.1
atggatctcggcaagtccacctccaccagcgcatcgttgaagaagctacaggaggatggcgcccttcccggccgtggaaccatggagagggaaccaggaggtactgaacccgaacttgtcctgggccgtatggttgcgatcgaggattatattctctgtggctttcttcccccgccttctgaatttcttctcttgatcttgaatttctacggccgttctttgctccatttgaaccccaattccattgcctttctcagcatcttttcccatctttgtgaggcctacattggggtagagccatttctcgacctcttccgcttttactacgagttgtgttggatggaatccaccagggctctccctctggctgacgtcatcggaccgctcgcggaccaccaggcggcggcctcattgaaggtgagcgccgctcggggggtgcccgacgcagccgtcgccgctgctgccacgaccagtggcagccgcgtcccgaaaacgggaaggacttttacctccgtgctcggcagtcgccggagagcatcctccccatcggccgtggacgcgtcttcgccacccccgcggcggaggaagctggtgacgctcggcgagaagtcggcgcaggcgagggcgacgccggacaagtccgaaggggcctccggagcgtctcctgcagcaacctcaaccgacgtcgttgtcgcgccaaggagccgtgaagcgacgccaagcggtccgtccagtgccctcgggcctagtcgcaggccgcctgccaacgtcctcacctggagggagctccaggctgagatgcaatgcatcctcgaggctggggctcgcggcataagtcgcgagatcgaggaggcgaagacagcggcagcgtcgtcggcgaacacgcgtgccgacaagctggagcgcgacctggcggaggttcgcgaggatctccagaagatgagggagctggtggccggtaacgagcggcaacggcgggggctcgaggaccgaatgtcggaactcgagaacaacctgtcggagatccgtgggtcgctgcgggtcacctacaccggtcttcatcagctcgccggggagtgtggtgtcacgacaaccatcccagcgaaccccgacgagttctcgctgacgtcctcgcttgcggaactggctacggcgatggaggcgataccctccaagcatgcggccaggatcgtggaggagacgtcgaactggatttacaccggggcctgtcacgtcctagcgtgtgtccggctggcacaccccgaacacgatcttcggcaggtcttggatcggggggccgccaacgacgctcgtaagggcgtgatggaggaggttggcgaactgggagagtctgttctcccgttttttgaagaggatgttgatgtcgaggatgtcccacagcgtgagcagcccgactcaccggtgatcgccccggcgattgccctccaaacgcgtgtctcgcaggacgacatggaacgaaactcacccgtggagacgggtgtggcgatggctcccttagatctcgagagtagacttgctgaccaagatcgtcgcatccaatactggaagacgaagtgtgaagtcgcggaactcgagagggcgatggtggaggtgaaaaaagaccaggccgtggaggcgctcaagggtcgcgaggtgtggttcgactcttatctgaagagttgctgcacgtccatggcccatgtttgcagggagctccgggtgccccgtggagatcccgaggaatcggcggccggctacatctcgtggctgaatggggcatgtactcagctcgagggcgtcggcaagcgcattgacgaagccctgaagcaggaatgccgtcggtcgagccggtacgccggagggcatgtgttggcttgcatccgagagcatcgtccgcagctgcacctcgagtttctctgtgatgggttcgctcgttctcggaggactccggcagagatagatcacctggcgaagtcgatggcgccgctagcggagaaagtcttccagtcgatggactggcgttggccttcctggtag

SEQ ID NO: 81975 - DNA, 669 bp, Oryza sativa
  Clone ID: PAT_MRT4530_81448C.1
tccgtactcttcttctcctttcctcttcatcttcttcctcctcctctcccccacctgcaatagactagaagcaaaggagatcaaatcgaaacctcatcccggaaatttttcaatcgaagcttccactcgaagggacgggagcctccgttaagatgattcgttgcgttgtaaagtgcggcgggcagcagcagcacgtcgtcgtcgctgcgcgcggtgatcggaagtcgccggcgatcgcggcgccaccaccagcgaccgtgcggatgccgggccgcgtgctctgctgcggcatgaggtcgcgcggggcggatctcgccggcgtcgagatggcggcggggccgcagccgcagggcggcgtctcggggctcttccgcggcccgcgctcgagcccgcgctactcccgcgtgcgcgccaccgccacagttgatcctgaggatattccattggagaaggttcaagctaaatcttctggaagtgttctgccatatgtgggcgttgcttggttggcggctattttatttggttatcatcttgcagtggtcaacggcgctcttgaatatctttgcaaggaccttggaatttctgagaatgctgtgcttacaggatgggtggttagcacaaccctggctggggcgacagcaggtttctttactgggagggctttagctg

SEQ ID NO: 81976 - DNA, 2301 bp, Oryza sativa
  Clone ID: PAT_MRT4530_81449C.1
atggatctcggcaagtctacctccaccagcgcgtcgcttaagaagctacaggaggatggcgtcctccccggccgcggagccatggagagggaaccaggaggtattgaacctgaacttgtcctgggccgtatagttgcgatcgaggactatattctctgtggctttcttcctccgccttctaagtttcttctcttggtcttgaatttctacggcctttctctgctccatttgaaccccaattccattgccttcctcagcatcttttcacatctttgtgaggcctacattggggtagagccgtttctcgacctctttcgcttctactatgagttgcgttggatggaatctaccagggtatctggatgtgtgggtttccgacttcgagatggcctgaagtcgcgatatatccccttccagtgcccttcttctcgtagcaagtggcgggcgaggtggttccttgttcctgaggaacaaccagacaaaatcccatcttggaccgcaaaacccgccttgacccctgctcttcagtcgttcattgatgccatcgatgacctccgagcgcgaggcttgagtgacgccactgtggagcgccgcgtcggccaattgatgatcaacggcccgacaacggcaagcgacgtccccatgcctctttgtgataaggaggtgaccgagcgcgaagccgcaatcaacgctcaccctctgactgacgttattggaccgtttgcggaccaccaggcggcggcctcactgaaggagagcgtcgctcgggagacgcccgacgtggccgtcgccgctgctgccacgactagtggcagccgtgtcccgaaaacgggaaggatgttcacctccgttctcggcagccgccagagagcatcctccccatcggccatggacgcgtcttcgccacctccgcggcggaggaagctggtgacgctaggcgagaagtcggcgcaggcaagagcggcgcaggacaagtccgaaggggcctctggagtgtctcctgcagcaacctcaaccgatgttgttgtcgcgccaaagagccgtgaagcgacgccaagcagtccgtccagtgccctcggacctactcgcgggccatctgctaatgtcctcacctggggggagctccaagctgagatgcaacgcatcctcgaggctggcgctcgcggcgtaagtcgcgagatcgaggaggtgaagacagcggcagcgtcgtcggcgaacgagcgtgccgacaagctggaacgcgacctggcggaggttcgcgaggacctccagaagatgagggagctggtggccggtaacgagcggcaatggcggggactcgaggaccggatgtcggaactcaagaacaacctgtcggggatccgtgggtcgctgcgggtcacctacaccggtcttcatcagctcgccggggagtgtggcatcacgtcaaccatcccagcgaaccccggcgagttctcgctgacgtcctcacttgtggaactggctacggcgatggaggcaataccctccaagcatatggccaggatcgtggaggaggcgtcaaacgggatttacaccggggcctgtcacgtcctagcgtgtgtccgactggcgcatcccgaactcgatcttcggcagatcttggacaggggggccgccaacgacactcgtaagggcgtgatggaggagggatgtcgatgtcgaggatgtccagcagcgtgggcagcccaagttaccggtggtcgccccggcgattacccttcaaacgcctatgtcgcaggacgatatgggacgaaactcacccgtggaaatgggcatggcgatgacctccgtaggttggtgatctttgttttcatctccttcattcttcttcccggagtaacttggtttttatgttctcggaatggaagagcagacctcgagagtagacttgccggccaagaccgttgcatccaatattggaagacgaagtgtgaagtcgcggaactcgagagggcgatggtggaggtgaaaaaagaccaggccgtggaggcactcaggggtcgcgaggtgtggttcgactcttatctaaagagttgctgcacgggaaaccctgaaagaatttaccgtgcttaccacaagccagcgtgggcaacgactgggcttgtagtgtatctttcctctagccgacgtacccaggcgagggtgggtgtgatggagttgggtcagccggggtgtccggttgatcggcttccggattcaccgcggcacgagagggggactgcccgttgccagctagggacgggggcgaactctgaggtgtggtgcgatgtcacgccctga

SEQ ID NO: 81977 - DNA, 207 bp, Oryza sativa
  Clone ID: PAT_MRT4530_8144C.1
aaaaaaaaaaaaaaaaagaacgggggggggtagggggatccaaacaaacgtacgccgtgcagtgcgaatccataacttatgtctctcgtgcctcgctaaatccaatccactgctcctcgtgcttcataacgttcatagactgtggaaaaccctttcataacctcaacttaattgccaaaccattacattggggcggggggggggggt

SEQ ID NO: 81978 - DNA, 394 bp, Oryza sativa
  Clone ID: PAT_MRT4530_81450C.1
aacaaaacatttttcataaacactcttgccgtgctttgctttcattcagtttcagacaggcgctacacttatttcacaaccattaattctggctcacagcatggcaaaataaaactatcaacacacgcctgcgtggaacatatcctacccgcgatcgttcataaaagtttaatgtaaatcggacatcgaactaaggagcaaataatctggcaggtcatcgatctcaaaaagcagccgaactttgacattaagttcaggcagacaagctgctgctaatgaacaaggagagcgcctagtctggctgggcgcgcatcaccaacaagtggtacgccgccatcaacaacggccccatcaccagccccacccagaaaagacagtggtctatccaagctgc

SEQ ID NO: 81979 - DNA, 2319 bp, Oryza sativa
  Clone ID: PAT_MRT4530_81451C.1
atggatctcggcaagtctacctccaccagcacgtcgcttaaaaagctacaggaggatggcgccatccccggccgcggagccatggagagggaaccaggaggtactgaacctgaacctgtcctgggccgtatagttgcgatcgaggactatattctctgtggctttcttcctccgccttctgagtttcttctcttggtcttgaatttctacggcctttctctgctccatttgaaccccaattccattgccttcctcagcatcttttcacatctttgtgaggcctacattggggtagagccgtttctcgacctctttcgcttctactacgagttgcgttggatggaatctaccagggtatctggatgtgtgggtttccgacttcgagatggcctgaagtcacgatatatccccttccagtgcccttcttgtcatagcaagtggcgggcaaggttgttctatcttcagatagaggattcagatccgatctttgtcattcctgaggaacaaccagacaaaatcccatcttggaccgcaaaacccgccttgacccctgcttttcagtcgttcatcgatgccatcgatgacctccgagcgcgaggtttgtcggggtatgaagtcgctaccgacttcattagtaggcggatccagccgctccaggttcgcgcccacccagcctttgactactctgggccggaggacgcgacctgggtttctcctcggggcttgagtgacgccaccgtggagcgccgcgtcggccaattgatgatcagcggcccgacaacggcaagcgacgtccccatgcctctttgtgataaggaggcgactaagcgcgaagccgcaatcaacatgagtgctctccctctgactgacgttattggaccgctcgcggaccaccaggcggtggcctcactaaaggagagcatcgctcgggagacgcccgacgtggccgtcgctgctgctgccacgactagtggcggtcgtgtcccgaaaacgggaaggacattcacctccgttctcggcagccgccggagagcatcctccccaccggtcgtggacgcgtcttcgccacctccgcggcggaggaaactggtgacgctaggcgagaagtcggcacaggcaagggtggcgcaggcgagagcggcgcaggacaagtccgaaggggcctccggagcgtctcctgcggcaacctcaaccgatgttgttgtcgcgccaaggagccgtgaagtgacgccaagcggtctgtccagtgccctcggacctgctcgcgggccatctgccaatgtcctcacctggggggagctccaagctgagatgcaacgcatcctcgaggctggcacttgcggcgtgagtcgcgagatcgaggaggcgaagacagcggcagcgtcgtcggcgaacgagcgtgctgacaagctggaacgcgacctgggggaggttcatgaggacctccagaagatgagggagctggtggccggtaacgagcggcaacggcggggactcgaagaccggatgtcggaactcgagaacaacctgtcggagatccgtgggtcgctgcgggtcacctacaccagtcttcatcagctcgccggggagtgtggcgtcacgacaaccatcccagcgaaccccgacgagttctcgctgacgtcttcacttgcggaactggctacggcgatggaggcgataccctccaagcatgcagccagcatcgtggaggaggcgtcaaacgggatttacactggggcctatcacgtcctagcgtgtgtccgactggcgcaccccgaacgcgatcttcggcagatcttggaccggggggccgccaacgacgctcgtaagggtgtgatggaggagggatgtcgatgtcgaggatgtccagcagcgtgggcagcccaagttaccggtggtcgccccggcgattaccctccaaacgcctgtgtcgcaggacgatatgggacaaaactcacccgtggaaacgggcgtggtgatgacctccttagggagctccgggtgccccgaggagatcccgaggaatcggcggccggctacatctcgtggctgaatggggcatgtactcagctcgaaggcatcggcaagcgcattgacgaagccctaaagcaggaatgccgtcggttgagccgatatgccggagggcatgtgttggcttgcatacgagatcatcgtccgcagctgcacctcgagtttctccgtgaagggttcgctcattctcggaggacttcggcggagatagaccacctggcgaagtcgatggcgccgcttgcggaggaagttttccagtcgatggactggtgttggccttcctggtag

SEQ ID NO: 81980 - DNA, 649 bp, Oryza sativa
  unsure (1)..(649): unsure at all n locations
  Clone ID: PAT_MRT4530_81452C.1
gaggaagagctgggggggtgtgaagaagcagttcaaaaggattctggtctggccttggtgtggccaagtctaggagcgcagtagctgacggatccccacaagcagcgcttgctaaacactctccctctccctaatgtcagctcttcaggcctcaaggaaggaggtgcatgcctctcagggaggctgtctgcacgtctcggatgagcttccttccaagtaagaaatcagttcacttccagagcatcgcgaagtgacaacgctatgaattctacagcacaaaactgaaatgccagggactaattctccttatgatcaacagaatgctactcagttattcagaatgtgtgtgtgtgtgtgtttgtgtgtgaaccaagaaaggttgagaattcaaggtctcaggcagaaaacattctggagatcctggaggggatggatcttccggaagagagaaatccagacactccccaccctggaactagagctggaatagatggcgtcgcctcgaaacaagggttaaacacgggtctgctgtggctgcatacataggggaggcaatggagagaccgncaccccacaaatacgagtctactctcctgtcctgttctgctttctcttcttaaacatgaaaaaaacacgagatctgaaacct

SEQ ID NO: 81981 - DNA, 468 bp, Oryza sativa
  Clone ID: PAT_MRT4530_81453C.1
atggaaaatagttttgatggaatgcttccactaaggaatttggccagaaagaaaatttctatccatttgaaggacactgaggctactgagtttttctatctcggaaggtctagtgtttgtaaactagaaagtttacttaggctatctggaattgttccttccaagttgtttctagcaagcatcagtgtggacaacaatggaaggttatcaactaagattgaaagggattcatttccccatgaggttaacgctccagaggggtcaaggagctgggacttgaggcagaggagggctagtcgatcagcactggaatcattgcgaaattgcgcaaaagcagatagcggaaggtatgggctcaggaaatggaagaaggccagaagtaggagaagctggggagatatcatgcttgctcttggtctagttggtttcctttctgaacccactcgaggcaacacctatatattgtga

SEQ ID NO: 81982 - DNA, 131 bp, Oryza sativa
  Clone ID: PAT_MRT4530_81454C.1
gaacaaaaaaggacggcggtttaacatatctgtaaaacatgatatccgaaaatgaacaacattcactcctacggacaaagcgggtatgcaacacaacgcattattatgtagagtaccacatacatgacact

SEQ ID NO: 81983 - DNA, 1704 bp, Oryza sativa
  Clone ID: PAT_MRT4530_81455C.1
atgcaaggttcagtaggagtccatggcatcctcctcctcgccgccgccgccgtgttgacgcagtgtctcctcgccgccgccgttaatactccggtggtccagtgcgcgtcggggacgacgaaatgcaccgtgaccaacgcgttcggcgcgttcccggacgggtcaacctgccacgtggccgccgcggcgttcccggcgacggaggaggagctcgtccgtgttgtcgccggcgcggcggcgtcggggaccaagatgaaggtggccacgcggctcggccacaacttcatgaagctctcctgccccggcggcgacggcctcgtgatcagcacgaacgcgctgaaccgcgtggtgggtgtgaacgcggcgaggatggagatcacggtggagagcggcgtgacactgtctgagctcatcgacgccgcggcgcacgccggcctcgctctgccgcacgcgccctactggctcgacctcaccgtcggcggcctcctctccaccggcgcccacggcagctcggtctccggaaagggcggcgccgtgcacgagtacgtcaccggcatgagggtcgtcacgccggcgccggcgagcgaggggtacgcgaaagtccgcgtggtcaacgccggcgacccggatcttgacgcggtcaaggtctccctcggcgtcctcggtgtcatctcccaggtgacactcgcgttgcagccgttgttcaataggtcggtctcgttccgccgccgcggcgacggcgacctcgccgaacgcgccgtggcgttcgccggcgagcacgagttcggcgacgtcgtctggtacccagcccgcggcgaggccgtgttccggatcgacgaccgcgtcgccaccaccaaaaccaacacgatctcctccggcgatttccagaacgtcatccagtcgtcacggtcaacggagcagcagcagcacggagacgtgttgccgttccaggccggcatcagcgtgccgctgtcgagggcatcggcgttcatccgcgacgcgcagcggctgctcgacatgaaccccggcgcgctctgcggcggcgagaacggcggcatcctgatccgctacgtcaaggcgtcgacggcctacctcggcaagacggaggacagcgtcgagttcgacacgaccagctgccgccatgacggcgacgcggcgatgccggaggagatggagcagatggcgctgcgcaagtacggcggcgtgccgcactgggggaagaaccggaacgtggcgttcgacggcgccattgccaaattccccaaagccggcgagtttatgaaggtgaaggacgcgtacgatcccgatgggctcttctccagtgagtggagtgaccaggtgctcggcgtctccggcgccggtggtgtgaacgtggcgaggaacgggtgtggaatggaggggctgtgtgtttgttcggaggacgagcattgctcgccggagaagggatacctctgccgtccgggaatggtgtaccgtgacgcccgtgccgcgtgacgtgtcgccggcgacgcctacgccgatgcatgatcgaactcgatcgtcagaacatgacacgtacgacggcttgtatgtacgtgtagtgtgtgtggccatgctatgcaagccgcgtgaataatgtagtagtacttgcaggtaaatctgcacgaatgtactgctacatgactgcaatttttagttttcaaataaaacatgtttgctcagatc

SEQ ID NO: 81984 - DNA, 1669 bp, Oryza sativa
  unsure (1)..(1669): unsure at all n locations
  Clone ID: PAT_MRT4530_81456C.1
cttccgctatctgcttttgcgcaatttcgcaatgattccagtgctgatcgactagccctcctctgcctcaagtcccagctccttgacccctctggagcgttaacctcatggggaaatgaatccctttcaatctgcaattggaacggagttacatgcagcaagcgcgatccatctcgagttgttgctttagacctcgagtcacagaatattacaggcaaaatatttccttgtgttgcaaacctcagtttcatctctagaattcacatgcccggtaaccatctcaatggccaaatttctcctgagattggccgcttaaccccccttcacattcttaatctcagcatgaattccttagtggtgagataccggagactatatcatcatgtccccatctngagattgtcatcctccagaataacagcttaactggggagatacccaattccctgttcaattgcactaccatttcttacatagatctctcatataatggtctatctgggtctattcctccattctcacaaacatcttcatcgctacgataccttagcttaactgaaaaccacctctctggtgtgatacctaccttagttgataaccttccattgttgtccacactgatgcttgctagaaacaacttggaaggaacaattccagatagcctaagtaaactttctagtttacaaacactagacctaagttataataatttgtcaggtaatgttccgctaggactatacgcaatttcaaatcttacctatcttaactttggtgccaaccaatttgtagggagaattcccaccaatattggctatacccttccaggactcacaagtataattctagaagggaaccagtttgagggaccgattcctgcttcgttggccaatgccttgaatctccaaaatatatattttcgaaggaactcattcgatggtgttattcctccattaggatccctgtccatgttgacttatttagatctaggtgacaataagcttgaggctggagattggactttcatgtcctcactaacaaactgcacccaactacaaaatttgtggttggacagaaacaatctccaaggaataataccatcatctatttccaacctttctgaaagcttaaaggtattgatcctaatacagaacaaattgactggtagcataccttccgagatagaaaaactcagtagcctcagtgtccttcaaatggatagaaattttctttctggccaaattcctgacacactagtaaatcttcaaaacttgtcaatcctaagtttgtccaacaacaagctttctggagagatcccacgatcaattggaaaattagagcagcttactaaactttatcttcaggataatgatttaacagggaaaataccttctagtttagccagatgcacaaatttggcaaaactaaacctttctagaaattaccttagtggaagcattccatcaaaactattttccatttcgacactttcagaaggtttagacatatcctataatcaactaaccggacatataccactggagattggtaggttgattaatcttaattcacttaacatctcacacaaccaattatctggtgagattctcctctctcttgggcagtgccttctgttggaatcagttcacctagaggcaaattttctacaagg

SEQ ID NO: 81985 - DNA, 206 bp, Oryza sativa
  Clone ID: PAT_MRT4530_81457C.1
atgaacgacgtataaaaatacggagcacacgatatagagcctcagcgggcacacacgcataacttggatagcccctataacgcaaaaggcgtaaatgccactgacaccagccagcgtcagtatcactatctaaagagtttggggtaacacacctatggtggctgacctgagagccaagggtttacgataccctctcccagggcata

SEQ ID NO: 81986 - DNA, 321 bp, Oryza sativa
  Clone ID: PAT_MRT4530_81458C.1
atgtcgctgccgctcgctgctcgccgctgctcgccgcctcgctccgccgccgtgcaccatggccgccgggccggcttaagccactcgcgcgtgcgcctggccgcgcgctgcctccgccgtccgatctacccttgggtagagggtagatcggggccgtccatcgccgcccgcgtggcagcccacgtggccgccacgtcggtgccacgtcggcgccacgtggtgctcccgtccccggtcccgtggactcggttcaccgtggaccggcgcctttgtgccgatgacatgtggggcccgcatgccggcgccccccaccttcgctga

SEQ ID NO: 81987 - DNA, 612 bp, Oryza sativa
  Clone ID: PAT_MRT4530_81459C.1
atggagatggtcggtggcaaagagaggctagagagagcgccacagagagaggccaggagagatgtcggcggcgagcgaggggatgtcgccgttggccacgccggcgagggaggcggcgaagaggagggcgaacgccggggtgccgacggccatgtggcggcgcaggtcccaccccctggcggcgagcgaggcgacgaggagcgtggagacagcgagcccccggtggcccttgagtcatttttgctaaaaaaaagtgagaaaaggcagaaagggatacacaagatcgttggatatgaccttgctcgacaccaacattttcatcgagacatgaggaatgatcaacatgaccattatgaggaagtagataatcatgaaaaggaggagagagacatgaaaaagccgccagtcctattattcacactcaaagtcgaggcacctccatcatctgaagagggcatcaaagaagagttgtgtgataatgcttcacttatatcaatgccacaactagttaatgaacatgctattcctaatgttaattctgctgattttaagaatatggttgatctacaccggcaagatcaacaacccacggagaggtgtatcgatcactaa

SEQ ID NO: 81988 - DNA, 1371 bp, Oryza sativa
  Clone ID: PAT_MRT4530_8145C.1
atggctgacaagaccctccgcgagttcgctgatccctctgcggacaatctggccattgggccgcaaatcaacatgggagacgtggatttcgatctgaacacgtacaccataaagggcgtcaatctagacgccgtcaggctgcgactattcccgttttcccttcttgggagagcgaagcagtggttctatgccaaccatgctgctgtcaacacctgggacaaatgctctacggcattcctctcgaagttcttcccgatgggcaaaacgaatgcccttcatggaagaatttccagtttccagcagacgagggacgagtccattcctgaagcatgggaacgattgcatgagtatgtggctgcctgtcctcatcatgggatagacgaccggctgatcctgcagaacttttataatggactcaccccaatgtcccgtgaccacctggacgcggcagctggaggagctttcttctctaagacgggcaccgtcaaggccttggactcacacgttacgtgtgaggtctgcggcaacacgggtcattctgggaatgactgcctggaaacccgtgagggggcgatgtacatgggcaacaacaacaacgggtatcgtccacaaggaggtcagggatggaaccaatcacgcccgtattatcaaggagtccctgcaaatgaatctgggaggattccgaggcaacccgactcctctgttgagaatgtcaaggcgatcacgacgaggggaggaactaacgggattgaaagagaagcgccatccagtgactcggctgacaaagaggtgcagccagagaagaccatgcctctggggtactgcgacacacgatttctgccgtttcctcaacggagtaggaaaccgtcagtagacgagcagtttgctcgtattgttgaagatatcctcaacaacaagagaccgctcgcaacaacggaagtggttaagctgacggagcagtgcagcaacgtcatactccacaagctcccggaaaagaagaaggatccggggtgtcctacgatcacctgctcgatcggggcacaacagtttgaccaagccctgtgcgatcttggagccagtgtcagcgtcatgccaaaagacatctttgacaagttcaacttcacggtgttggcaccaacaccgatgcgcctacaactggctgactcatcagtccgttacccgacagggatagtggaggatgtgccagtcaaaattcgggatttcttcatcccggttgacttcgtggtgttagatatggatacgggaaaggagatgccgctcatcttggggcgtccgttccttagcatcgcaggagctaacattgatgtgggaacgggaagtatccgtttccatattaatgggaaggagtaa

SEQ ID NO: 81989 - DNA, 2240 bp, Oryza sativa
  Clone ID: PAT_MRT4530_81460C.1
ccacgcgtgcggtttcgcggatcacctgtggtcctgtgcagccgtaccgtacgcctctgctttcctctcaccccaccgcgccaccggcgagcggcccgcgagggaggaggcgctgccgccgcctctgctgatgctgatgatgctaggggcggcctcccagtggatcctggccgccgccgcggcggcggccgtggcggcgctgctgtggctggccgtgtcgacgctggagtgggcctggtggacgccgcggcggctggagcgcgccctccgggcgcagggcatccggggcaaccggtaccgcctcttcaccggcgacgtgccggagaacgtccggctcaaccgggaggcccggaagaagccgctgccgctcggctgccacgacatcatcccgcgcgtgctgccgatgttcagcaaagccgttgaggagcacgggaaaccatcattcacttggtttggcccaacgccaagagtgatgatttcagaccctgaatcaataagggaagttatgtctaataagtttggccactatggcaaaccaaagcctacccgtctcggaaagttgctagcctccggagttgtaagctatgaaggcgagaaatgggcaaagcaccggagaattctgaatcctgcctttcaccacgagaaaataaagcggatgctgccagttttttctaactgctgcacggaaatggttacaagatgggagaattcaatgtctattgaaggaatgtcagaggtagatgtttggcctgagttccaaaatcttacaggagatgtcatatcaaagacagcattcggtagcagctatgaggaaggaaggagaatttttcagctgcaagcagagtcagccgaacgcataatacaagcctttcggacaatttttataccaggatattggttcttaccaactaaaaacaacagaaggttgagagaaattgaaagagaggtcagcaaacttctacgaggaataattggaaagagagagcgggctattaaaaatggtgaaaccagtaatggtgacttgttgggcttattggtggagtcaaatatgagggagtcaaatgggaaagcagaactaggaatgactacggacgaaattattgaggaatgcaagctattttattttgcaggaatggagacaacatcagtattgctcacttggacattaattgtgctaagtatgcacccagagtggcaagagcgagcaagagaagaagtgctacaccactttggaagaaccacaccagactatgatagcttaagtcgtctgaagattgtaacaatgattctgtacgaggttcttaggttgtatccgccagtggtgttcttgaccagacgaacatacaaggaaatggagctcggcggcatcaaatatcccgctgaagtgacccttatgttgcccattttatttattcaccatgatcccgatatttggggaaaagatgcaggtgaattcaatccagggaggtttgctgatggcatctccaacgcaacgaagtatcagacctctttctttccatttggatggggtccccgaatctgcatcggccagaactttgcactattggaagccaagatggctatctgtacaatccttcagcggttctcctttgagctttcaccatcgtacatccacgcaccattcactgtgataactctccacccacagcatggtgcacaaattaagctgaagaaaatctaaccatgctgctcacttgctcggattggtcaaggagaaacaagtcagtttgataagttatatatctttctcttttgtaaacagaggtagtctacaggtttcgtattcgaactagaaagattttacttattgatatactagcttttatgcagataaaaacatggtgagtgaaataatattccgagtttttaatacaataaaagaatgatttttaggctcttgaggatgtatcatattttatagtgtaaaatttaatctctctaatacaatgacatatgaaaaatttgcattaaaaaaaaaaaaaaaaaaaaaaaaaaaaggggggggcccttttaaaggatcaaagtttccttccccggggatgcaaaggaataatttttttttgggggcaccaaaattaaattaatgggccggggttttaaaacccccggaattggaaaaaccttggtgttcccaaactaaatggctttgaaaaaaatcccctttttcccagttgggtaaaaaaaaaaaaggcccgacccaatcgcctttcctaaaaatt

SEQ ID NO: 81990 - DNA, 483 bp, Oryza sativa
  Clone ID: PAT_MRT4530_81461C.1
cccacgcgtccgcttcgccgcatttcatccatgagaacgtgatctactacctctgcctgatacatccgtgtctttgaaatctcatttcgcacaggtcgaacaccctgcgtcgagctcgtcgtcgctcccgacgtccagagcgccgccttgcgtcgcatcgccgttcccgtccatccggtggatctctggccgagccactgcgccaacgacgtcgcctaggtccagggagaaagacgcccaggaagatcgaagccaatacaccgccgttgaggagatcgaactcttcttccacaagtccggccgccggatatcgtcgtcgaatccttgcatccgagccgaagcatggggagtggtcgtcgccgtcgctctgccattctttgccgccaccggagtacttctaaggtcgccatcaccgtccatccatcaccgacccacaggcgatattccactagtggtcaccgccgctcgcgctgcctccggcca

SEQ ID NO: 81991 - DNA, 243 bp, Oryza sativa
  Clone ID: PAT_MRT4530_81462C.1
atgtcacattccgtaaaaatttatgatacatgtataggatgcactcaatgtgtacgagcttgtccaacagatgtattagaaatgataccttgggatggatgtaaagccaagcaaattgcttccgcgccaagaaccgaagattgtgtgggttgtaagagatgcgaatccgcctgcccaacagattttttaagtgtccgcgtttatttaggacctgagacaacccgcagcatggctctatcttat

SEQ ID NO: 81992 - DNA, 231 bp, Oryza sativa
  Clone ID: PAT_MRT4530_81463C.1
atggagggcggcggtgctgcagatctacaggatggcgttgtagggcggcggtggtgcctgatgtcgctgttcggctggtgtgcagcggtgatgcgcgatggcacggtaggcaaggaggcggcgttgctgaacgacgcggcagtggtgggcagcggcaacgccgctcctgccaaatttcgccctgctgggccacactgtgggcaacatcctggaccaactcaactcgagtga

SEQ ID NO: 81993 - DNA, 184 bp, Oryza sativa
  Clone ID: PAT_MRT4530_81464C.1
atttgttcagagctaggtatagattgctcggttgaaggaggggctgtgccacggcgactggccaccgaagaactatcgttaaactggacaggagtatcaacagtgtcctcgagggagctaaccgtgcgggatcagcaagaataaaggtccagcgcacagctatctccgaggaacatggcagaac

SEQ ID NO: 81994 - DNA, 456 bp, Oryza sativa
  Clone ID: PAT_MRT4530_81465C.1
tccctggcagcttgggacatggtatgcaaacccaagaataaaggaggagttctgggagtcattgaccttgaataccaaaacattactcttctaatgaaacatcttgacaaattcttcaacaagcacgagctcctatgggtaaagcttatctggaccaaatattatctcaacgctgacctgccccctcatgcttgcaaagaaacagggtccttttgatggaaagatattttcagactaattcctatgttcagagcaatcacgacaataacaattcaaagtggagacacggctcttttctagaaagataactggaattggacaggcaactccttggaacaacaatttgccactcttttctcctttgttgcaaaagaagatatctcagtctttggttttctatcagaacaaaatttagaaaacctgctacacacacctttatctacccaagcaatgcag

SEQ ID NO: 81995 - DNA, 1684 bp, Oryza sativa
  Clone ID: PAT_MRT4530_81466C.1
aacctaaaacggaggtagtatatttcattcatgtaaaatcatttatattttgaggtggacgaagcaattctaaatcaggccgcagctggatcgaacgatctgcctcttaaccgacacgggcagaatcgcatcacgggcgcgctggcaccggcaccggcacggccttgagcggcgtgaccatgttgagcgacgtgccgaaccggcccctgacgtcgacgtcgcacggccgcatcccgccggggagccgccactcgaacgcgtggagcagcgacgccaacaccagcgtcaccaccctcgtcgccatcggcgtccccgggcacgccctcctccccgccccgaacggcatgaactccagcatctcgccgccgcggaacgacccgccggccgcgacgaagcgctccggctcgaactcctccgggcgaggccacgacgccgggtcgcgcatgatggaccacacgttgacgatcaccttagtgcccctgggcaccgcgtagccgccgaccgcggcgccgtcggcgacggcctcgtgcggcatcagcagcgggctcggcgggtgcagccgcatggtctccatcaccacggcgctcaggtacggcagcctgccgatgtccgactcgtccgggtgcggcttcgcgcccagcgcgtcgcgcagctcggcgcgcgccctcgacatcgccgccgggtgccggagcagctccgccatcgcccactccaccgtgatcgagttcgtgtctgtcccggcggtgaacagatccccaagaaaggtcttgatagtgtcaaggctgagctgatcagctgagtgaagctgaagtagcacgtccaagaaatcctccttcctttcgccttcgccgccggcgttctgacggcggctgatgatctcgtcgaagaagtcatggaacttcctgatatgcacggcggttcgccggcggcggccctgcaggtccagcgcggcgagcacggggaagaggtcggacaggttcggcttggtggcctcctcgaccgtgtccctgacgagcatctccagctcctgcgcccggtcggagctcaggtcggcgacgtcctcggagaagagcacgttggagacgaggttgatgaccgccgagaacacgacgcgcccgacgtccacggccgccgcctcctcctcgccggcgccggcggcgtgccctcggaggtgctcgaccagctccctcaccttcgcctcccgcacggcgcgcgtcgcgtcgagcccgcgcgcggagaagaggtggttggtgcacacagcgcggaggcgcttccacagcgcgctgctcccggggagccatacgatggaccgctcgtgggtgccgagcgcgcgggcggcgtcgcacaccgcccgcgccgcgaggacgtggtcgtacctctgcagggcgtcgcgcgccgccgcggcggaggaggcgaccacggcggtggccgtgccgagcttgagcgacatcacggggccgtgctcctcggcgagcctcgccagcgcgaggtgcagctcgccccggaggtcgaacacgttgccgaggaggaggacgggggtcgggcccggcggccgccgcgcggcgatcttggggtggccgttcttagtggaaacgaagactttgtagaggaggcaagaggcgagcgagacgtagaggagccataggatggttgaagcttccattttttcgttctctcctcgtgc

SEQ ID NO: 81996 - DNA, 162 bp, Oryza sativa
  Clone ID: PAT_MRT4530_81467C.1
ctcaccgaggtccgcaagaacagcacctacacctggctcaggccgacagcaagacccaggttaccgttgagtacctcaacgacaccggcgccatggtgcccattcgcgtccacaccgtcctcatttcacccagcacgacgcagacgtcaccaacctagggat

SEQ ID NO: 81997 - DNA, 344 bp, Oryza sativa
  Clone ID: PAT_MRT4530_81468C.1
gaggagaagagattgtatcccaccatagatcgaatccgccattacaattagctgattaataagaagtcctaggataagaaacgcgagaacattctacactaaacacaggtgattaatagggcgattatgagagaagaagaggaagacaaagaagtgtgggtgacgaagacgtttttgtcggcgaacttgacctccatggggctgtcgttcttgacgatgctgcggaagttatggtcgccgtgctggctgacagaatgggcctattctgggaaactgcgggcataacaggggtggtgctgcaaatcctttgttgtgcatgaaagcctgaataggaaagctaaaat

SEQ ID NO: 81998 - DNA, 261 bp, Oryza sativa
  Clone ID: PAT_MRT4530_81469C.1
atggagaagagagaagatctgaagctgacctcgaaggagaagacgagaggaggaggctgcggcggcggcggctgggatgagacgggagaagggaggggttggggcgagaggattgcttcttatataggcagccacggaaacacaaatatggacctgatcgataggcaggcagctatggctacaccgccgctgcgtgtgtgggacactattgatgtcatctacaacacgaccacagaccctatatctccaacgatgaaatga

SEQ ID NO: 81999 - DNA, 322 bp, Oryza sativa
  Clone ID: PAT_MRT4530_8146C.1
ctttatttcgagcggccgccctgttgttttctccatgggtggtttgacccgtgtgcacagcggcatcggctctgactgggggagcgagcctaagcactggactgcttggagaagacatttggtgcgctatcgcaagcactacaaaggcgttgatgaagagcctgctcaggcaggattacgctccgtgctggaggaaagatcccttcaccctaagatgcctttggttcttagcaataaattggaggaaaaggacaggacagtttggtagccctgcggtatttgattctatccccggaccttgattgagactgtagaccagttc

SEQ ID NO: 82000 - DNA, 518 bp, Oryza sativa
  Clone ID: PAT_MRT4530_81470C.1
gaggcaaatgccggctgcgggatcccggcggtgaaggagcggacgccgacatgggtgggcttcgtgtcgacctctccggcgcggagatccgcgtggaccccgcgtgcggcgccgccgccgacgatggcgggagcccgcccgtgttcctcccccgccagcccgccgcgcccccgctcctcgcgctcgacatcggagggactctgataaagctggtgtacacggcgagctgcggtggcggaggcgcggagctgcggttcgccaagttcgagaggcggaggatgcaggagtgcttcgacttcgtcagggcgcagggtctcgtccaccgcaatggatcaactatgggttcaagcaaagaaaatatagcattgaaggcctcaggtggtggagcatataaatatactgaagattttcgtgagaaattaggagtttgtcttgacaaggttgatgaaatggatagtgttgtttctggagcaaactttttgttacagagtgttcctggagcagccttcacacacatg

SEQ ID NO: 82001 - DNA, 1712 bp, Oryza sativa
  Clone ID: PAT_MRT4530_81471C.1
gcggacgccgacatgggtgggcttcgtgtcgacctctccggcgcggagatccgcgtggaccccgcgtgcggcgccgccgccgacgatggcgggagcccgcccgtgttcctcccccgccagcccgccgcgcccccgctcctcgcgctcgacatcggaggtacgcgcgttttcctcgctctctcacgcgcgaagtagacgatcgtggtggatgaactcgctccggggtggtgtttttttttttttccgcagggactctgataaagctggtgtacacggcgagctgcggtggcggaggcgcggagctgcggttcgccaagttcgagaggcggaggatgcaggagtgcttcgacttcgtcagggcgcagggtctcgtccaccgcaatggtagtgcgtttttttgcgctgaaatttaatgtgatcaacactgtctgcaggcctcaggtggtggagcatataaatatactgaagattttcgtgagaaattaggagtttgtcttgacaaggttgatgaaatggatagtgttgtttctggagcaaactttttgttacagagtgttcctggagcagccttcacacacatgaatggaaagaaaagttctgttgatatttccccaaataacttgtttccttaccttcttgtcaacattggctctggagttagcatattaaaggtcactggaaataggaaatttgaaagggtaactgggacacatattggtggcggaacaatgtttggtttagcaaaacttttaacaggctgtaagagttatgacgagttcttacaattaagccagaaaggggacaattttgttcttgatctaattgtgaaggatatatgtggggaacttgtttgccagaagcaaggactttcaacttcaactcttgcttctagttttgggaaagttatcacttctaagaagaagttaacagattacagacctgaagatctagcatccacattgttgagcgcttttacctataacattgcacaaatttctttccttgttgcatcaatcttgcatctcagaagagtgttctttggtggatcttatatacgtggacataagagcacgatgcaaaatatttcttatgcaattgacttctggtccaaaggccaagttcaaacaacatttctgtgccatgaggggttcttgggaacactaggtgcattttggagctatgagaacatgggtattgacggcttggcagcacatgaagtcataagggaggtcttgcttggcgctccttacactgggccatgattccatggcaacaagagaaggtgtttgagggcaaaagttcaatggccttgttatggagatcggagaggcagaggctgttcaaccagccgaccacctgagccgagcgctagcttgatgctcgaagctctagaggttggcagtgacttggattggcctcctggtggcagcgaacacccttctccttgccagctcctctcctgtcgatcgcgatccttctccctgccttctagccaacttctctcccatcggccatagcccttcccccgccacttgccgcacaccacccttcttctcgccagttcctctcccatcggccgtggtccttctccctgccgcccacagtgcatcacccttcttctcgctggttgatctccccaccgcttgctgtgcgccatcccttctgcctaccaattcctctcccgtcggccgccgcctcatccttctccccat

SEQ ID NO: 82002 - DNA, 450 bp, Oryza sativa
  unsure (1)..(450): unsure at all n locations
  Clone ID: PAT_MRT4530_81472C.1
ggcggggtttgaacgtgttcaacatgtcccgggaagaggaggaagcgaagaaattgagtcacagtgagctaagactacggccgctggacttcgtgcactccttcttcacggcgatggtgttcctcaccgttgcgttcagtgatgtcgggctgcagaactgcttcttcgggcagaatcctggcggcaacaccaaggagctcctcaagaacctgcctcttggcatggcgttcttgtcgagcttcgtcttcttgatcttcccgaccaagaggaagggcatcggatacaacgacaatacacccaaccgcaaggccgaggatgtaactaaaaattaaattaaagctcttatatacgtagctaggtcacacgtacatgtctctcaaaaatttcttgttagaatatatatataatgtaattaacaagtatttgattggagatcagttaattanaatt

SEQ ID NO: 82003 - DNA, 411 bp, Oryza sativa
  Clone ID: PAT_MRT4530_81473C.1
atggccacaccatccttcctcaccatggggttgaagtcagagccgcagctggtggtggtggtggcggaggagcgtgagtgtgcggcttggactcgagcaatgcggatgccacgacgaggtagggttggtacggctgctgccggcgacggcggccggggtgtcatcgtccttgctattggctaccaccgctaccgctgccgctgccattgggaaacgagagacaagggtttaggtgctgcccttgtcgcgatggctgcgcgcccattggactcgaccccgccggctgaggagaagccacactggcgccgcagcggcgatggagacatgatgatggtcgtcggtgtcagtgagcaaagatgtgacgagagggaagaagacgggagaaagaaggaagaagacggaaaggaatga

SEQ ID NO: 82004 - DNA, 186 bp, Oryza sativa
  Clone ID: PAT_MRT4530_81474C.1
aaaaaaaaaaaaaaaaaaaaaaaaaaaaaaaaaaaaaaaaaaaaaaaaaaaataaaaaaaaatattctccttgctattgatgaatgcggcgcctctgcacaaggtggatgttataggtcaaagatataggcaatatcaagctgcagtcgcctgtcctgctacagcttcaggtgcttcgcccatata

SEQ ID NO: 82005 - DNA, 1709 bp, Oryza sativa
  Clone ID: PAT_MRT4530_81475C.1
tttggatggatgtaatgtaatactacagattttttttttatgggaaaaggaaatgctggtataaaacgcaccaacattactcggtttaagtagagtatttatcagcagaaacaatcttagacaaagagaagaaaatgatgaaaatcaactattagcagcacacagcatactgcatgagttttcaatctcaatacaccatcacgactgaatagactttatgagttaggcaaatgcttcatgctttacagccaacttattaatttttcccacgggtccagcaacaattaggatctggaaacagtagtaggatataccaacatgggctgagagggccttatgctgaatgggagcctcagtgctatgatccttttacctgcccttcctacaaaaacagaactcaccaccctacaaaaatagcagttgataatgaccagcactaactccaatttcttcagtctgatatcctcatctctactcctagaactttttgcacaaactcgtatgtcacgaatgcaatagcgatagaaggcaccaccttcactgaattgggcacaagacccttgtacaaagcaccaacaccttcatagcgaacagttttcctgaatgcatcgatcataccattgtactggagcgcctctttgccttctccagtaacaatagatgctgcattattccaaccaaccatctgcattctcctcctgatgacatcaagagggtaagcaacagtctggcctatggttccagccacagctccacatccaagccttgtaactacatgcaactcattgtccttgccaagatcatatggatttgtctgaagcagccagtccttcagagactcgtacacagcaaagttgaggccaacatacggaaccactccgataacagatggaagccaccctctgtatagagcacggaagccttcttcacggtatactgaacccaatgcatgaaacataccacggtactgataaggagacttttccgtctgcacggtaatcctacccctaaccatatccatcgggtaagtagcagacatggctatgataccagcacaagcaccagctccaaggcgcaatagtggactaagctgagcatcctcattccctgtttgttgccgataaagccataaaattccacttgatgcttgctcatagctaaaaaacttcacggcagaatttggaacaattctggcacaattggtaccattgcccttaaaaagtccacggagaccctctgttctccatatgtacttaagaccttgaattgtaccgttgtacttgatactgtgagggttttggacctgaagcagaatcttcattcgttcgagcggagcaacagcagtacgtgatactccaccggcgacgccaccggcgaagagagacttgcagatggagagcacctggtaaccaggccccttgaccccctcccgcgcgagcttggcctcctccgccaggttgacgatggtggtgaccgcggtgtcccccctgctcttccccaccacgtcctccgatgccatgtccacccggcccgcaccgcaccggatcgcccgttcgcctcgcctcgctgacgagatcagcccccgcgcccgtctcctcctctcggcctcgggtttttgcggcggcggcggcggcgggaggaggagaggaggggagaggtgtgcgtgcgtgcggcggggagcccggccgggttgcctcgtaacctatttc

SEQ ID NO: 82006 - DNA, 112 bp, Oryza sativa
  Clone ID: PAT_MRT4530_81476C.1
atatacatctcaatccatcatccatatcgggctacattccccaccttctacttctacctcacattttatttaccctcaacattatttctttagcctaactccttattccaaa

SEQ ID NO: 82007 - DNA, 2389 bp, Oryza sativa
  Clone ID: PAT_MRT4530_81477C.1
atggcgcactccacctatcaccgtggattcggaggaggatcccgtatagggggatctgcgcgagcggctgggacactcgaggcaactggcctgagttctccgcgctgccgcgggctaccggggaatgtgcggaatgtattagacaagttctttgtgggtctttgcaagaaatcgatggtacattactcttcttgtaaacatgagcaggcggtcaccatcgacgtgaatgcgtggaccgatgctggtcatgctgtgaatcatctctatgatatgctatacatgatgggccgtgatgacatcccagttggtgttggtggtgatggtggtatatcaggccatggcaccatacacccgaacgttggtggttatttacctctgattgatcagggcatgacaacctttgggccctgccggtataggcaggctattccacttgaaggcggtgggcggttggacatcgacacaaactctggcataagaaaaggcttccttccacagggtaacagaagatacataccacttcatcagtctacagcacagcaagtgttgatagagacaatatcagcaggccctacaaccgtcatgctaatagggtcacatacgaacttcgccatttttcttatgacacatccacacctgaaaaaaaatgtggagcacatatacattatgggtggtggagtgagatcggagaaccctacaggttgctgcccaaaaaattctaccacatcttgcacgccacagcagtgtggtgaccatggtaacctgtttactagctacagaaccaatccgaatgcagaattcaacatgtttgcagatccttttgctgcatatcaggtgttccattctggcattgcaatcacccttgtccctcttgatgcaactaatacaattccggtcaatgaggagttcttttatgcattccaacaacaacaaagtacatatgaagcacaatattgttttgactctttaaaaatggctcgagacacatggttcaatgatgaattctatacaagctactttatgtgggattcctttacttctggtgtagctctatccagcatgcgcaatgacaataatcaatctgagaatgatttcgccgctcttaaagatatgcacataacagtaataaaatcaaataaaccatatggtatacacgatggctcaaacccattgttcaatgatcatgtcattcccaagtttggtaatcaaaatggtggagttcatagcggtcatgttcagactggaattacagatagcttctgccttgcaaaggaaagtaagaaaggaagatgcgaggatggatatactaaggaagagtctggtccagaagcagttcgcgtttgtgttgctacaaaggctaaagtaaatgtagataaaagtagcctgctagatagggaattctttaagagcttcctcgagaccctaaatctccctgagaacactggtctcttgaaaaatacggcccagtttccattttacagagaggttctatacagtccagacttccagtagaaacgcaaggccagataagtgttatttgaaacacacacgaaacctacggatggtaatgaacttatataccttttgaaggtgcctacaaaactagtagatgtaatggggattttcgttggggaaatagataggcaaacattggcaaattctttagcaaagagacatctgccgttattggggttttgaagaacaaaaggcaatttggagcaggccggtaaatagttcagggaatataaaaaaacaaaagtgaacttttgtagtagcattagcgtgctaaaaaaatatattaaagattacatagcacaggtaataagaaagctgacatgataatgcttgaagtggctgaagaacgggtgtcactgggtgctgaagaatcgctccatgagtcgcgaagtaacctggagaattaatcatttatcttttttcttttgattacacaaaaaggaaaattatgtttctttctgaattttgtaccgtagttgagcattgatgtgaccagcaaatctgggatacgtttttcagtttgtgctctgaaccactgaatcattcaagcagtataaataattacagtctgaaattatttaaatcaaaaaaaaaaaaaagtattgatattgtttatgacattctacatatgatgggccgtgatgatattcctgttggccgtggtagcacttctgcattaggcactgaaagtcttggttgcaagtatgtcagtgctattccccaaggtagtggtgggcttcttgattctgacactctctatggactagctcggtcattgccaagaagtcctagaaggtatccttccagtgaccaaatgacaaatatacaattcaatgtgcatggtgtaaatatttacacttttatgctttcataa

SEQ ID NO: 82008 - DNA, 411 bp, Oryza sativa
  Clone ID: PAT_MRT4530_81478C.1
cccacgcgtccgttgtaactacaacttatactaacctccaacgcaacactatgcgtgcactggaccagagtctctgagcaaataatgccgatccaacagttgactagaaaaaccatatcgaggatcttgatggcctaaaccggtcatccaaatactacgttgcggctgagactgacgcagtcatgaaccacgagagagagcgcttgtgctagaatagtggctcacgactactaatagccctagatggactgcggcgccaccatatccattggcgaccacatggtagggagcgccacacagattctgatcctgcagatggcggcagctgatctacgcctcctgtgcacagtatggccaaaatagacaaccggcgatgccttattcctacaaaaactttgcgcgatccatgac

SEQ ID NO: 82009 - DNA, 282 bp, Oryza sativa
  Clone ID: PAT_MRT4530_81479C.1
atggggggaatcaaagcagaggagaacacactgagaggtggtggtgatgggtggcagggtggcaccaagagcctcctccatggcctccgctcaggcgacagatgcggaggctatagtgaggtcgtcaaacacgactgtggggctcgcgacaagtggaggaccaagctgagtggagcccttgaagctggcactggtaacgctactgtagtcgctggtgacggagcaagggctcccaccggcggactttggtgccttgtcgatgccactgcttcagggtgctga

SEQ ID NO: 82010 - DNA, 522 bp, Oryza sativa
  Clone ID: PAT_MRT4530_8147C.1
gggccgccgtcgtccttctgccgccggtgaccacccatcgggcctccatgtcgcatgttacatcctcccctgtcgacgatgggaatcgaaccgtcttgccgctcgctgatgtgtcgacggtaccgaaacagaacaagttcgttcctcttttattactgctacttttcagcgtttatccttctgtttgtttttatagcaaagctgcccttttcattgcgcatagaacagaagctattgcctttaacattaaacatatttttttgaatggaatctatcattaaacatattggatcgtaattttgtacaaatttgtttatcgactagtcaacggataacaaaatatttgttctagttgtgaacgttgcactcagtgtatgttggctgtattcttgctttgcgccatgtgcctttggtagttttaacaaattagctcttgaagtacgcagttcacctttaattgaacaaaaataatctgaagaaccacattatctattgtctgttccaactgaagtcagctttacc

SEQ ID NO: 82011 - DNA, 303 bp, Oryza sativa
  Clone ID: PAT_MRT4530_81480C.1
tcggttgccttgtggctacactggctgcctggggggcggccttccatcgatcgatggtgcaaacaggccagtgcatgcctgtttagcttctcatcctactatttgatttcccttttcttaagctataccttatatgggaacatcctaaaatatctggtctctcttcagcacctctgctactattcatctgaaagttgcgacaagctgcttaattaaccattgtattaattaaattcagcttgctcatcatcacctactgttatatatttgcttgagtccaaccagctgatcgatcatcaattg

SEQ ID NO: 82012 - DNA, 513 bp, Oryza sativa
  Clone ID: PAT_MRT4530_81481C.1
atgttgtcctccgctatgacctgctctgcctgtgaggagaaaatcaagacattgctggcattagcacgcctcgccttggagcaatgtggatccctctcttcatcagagaaggtcgtagacacttacccggtggatggcgcgatcgaggtggtcgagggtgagaagctggcgaacatcatcggtggcaatggatttgcgagcgaggtggggccggcgagcggtggcgatgcgcaagacggcgagccccaggagggtcttgagcttgctcgtctgcttggaggtcttccgatggaggaaccccattgtgtagcgcagcagcagcagcagccgtgcatcgatccaaactttgtgcaaatagcgtgcagagttgtgcaattcatcgatcaccccctgttaagccaggggatccctttccctgtatctccagggatcccgcgcgacgaacctccggtttgccagcaaaaaagcaacggcccccagttctcctgcaccggaattcaacagctgagctga

SEQ ID NO: 82013 - DNA, 4369 bp, Oryza sativa
  Clone ID: PAT_MRT4530_81482C.1
ctagtgttgtgccaaacaaaacgtgaactgggctaagtcaaataagtgagtatttgttaccagttccaagtagtcttcatcttcgatgattgcaattgttccttttagcttgcggcactgccttttgagctcttcgctttggctttcataaacatgtagtacttctagtgaactcggaaaacagcccttgggcagcgaatgaatgtttggacagtatgcgatctctaatctcttgagactggtgagtctatgtaacccagcagggagagactgcagcttcgagcattgcacaaatataaggacctcgagggaggagagcagctgaagggccatgttttgctccttggtgaagcgctctaccttgtggttcatgcttaagcttaacttggtgagtgatgaagagagaagcctgcaagtaggctcaacaaatacccctacgatgtcatccatgtagagctgttgcagccccgatggcttggacccaacaaagaattcgggagttttatggacagccagcactctaaggtggccttgggtgaggagggaacacatgctcccgcttcttaaatccccaaagtcccatatggacaatctagtgagagagctgaggttttgtaccagagtttccatgcctctcacacaatcaataatagccagatcttgaagggaggatggaaatgggaaacaagacaaggagggtgagtaggaggagagaaaattgggacaatgctttatacacaatgattggagggagcgcaggtattgtaatcctcctcctacacctcttattaggttgcgtgttgtgtcgcctacaaatgaatcgagctgcaggatcagctttgagcagtgtctgatgtccaagttctgtagttggtgaggcaagagcagtagtcctgtaaccaccgatgctattccattgtctcctcttggttgttgctgatcattcccaatctgtgcatcctcagacttattataagaaagtgatggtggagatgctagcgttgccatcatctcttgccctgccacaccaagccctgttatcttttgacatttttctattctcaagttcatgagcttggggaaataagatagcagttgtgtcatttctatcccactagcactgcactcatagatctcgagttgctcaactagaaaatgatatgtgactgtgctttcacaatcagtcggcaacaaggcaatacctgaatcagtaatggagagcctcctcaaagctgatagcaacttaagatgtttgagaggcaaaggagggcatttcttcatcttcaactctcttagttctgtaagattacttaaagccaataacttccagaatgtactatccagagggccatcctttccctcaatttgtaacccttgttcagattggttgtttctctgataatccaagagatgaaaatgcgatccaacttctttaatcagaacatggcatggagagcttgtccaaggaaggggagacaatggtaatagctttgggcattttgcaatctcaaggttctgtagtctggagaattgagacaagttcatctcctgtcttgaccaaggacaagtggaatgtgaaaatggcaactctatgagttctgggcactctcttacaataaactcctccaacagggagagcacacaacaagcatcatttccggcccattttgctagtcttggtatagcaactagctctaacctttttaaatactggaagctgcggccacttgcacaagccaggaatttttcaccatgcttgttaactaaccacaacccccctagaggtggaaacttgtcccaacatacaccgtttatacaaagtgattgcaaacctttgatagataagttaggacccaaccatgaagggcaagtggtacccccatgcccttgaatatgtagctcccgaagattgctatgtggtctaagattttcaagaatatgttcttcttgtgaataatcctttgtagaatggttaacattccaatctaatattaacttgtgtaagtgacttttgtttaaaagttttgcctcctctgccgcctttgcattttcaagatcataaattcccaacgatccttttagctcatccagctgccctatttggcttagtgcaaatgccttaacttgtcttttgacctcaaatctccttaattcttgtaaacactttatcttacccacattagcaatgtcagagtagagtttatcatcttggacaacaaaatgccgcagttttacaaggttattcatatctcttggtaaaccaaaatgacccttgcattgtcgtacatcaaggattctcaagtggtaaaatcttgatatgatgttgggtagacttaattttaatgtgatgaaatccttcttgatgttttcaaaagtcactctatcatttacgtccatgtcatcaaccacaatagataagtgtcttatagatggtagaatttgtatagatttgacatttgaactacatatggtaagacattcatacgatgaaaccttcaatgctaactcatgtagtaggtcatgcataacgtagtatgaagacccatcttctacatgtttttcaaaaaatccatagctaaccaaatcattcaatcggctcaatccaatgtcttcaattttcttgttttgatcctcccaactgttttcgctgccaaaggggaacccttcagatttttttgatatcatttttccagtctcaagtaaattagcatgatcatttgctgatttctcatcaccaaacacagatgctttgaataattcccaaaactcttgaggatcaagcccttttagttgtattggactatcaattgttttaaccatttctaccactgctagaaaatgagtggtgactagaattatgtttcccttggtttgtccttttttgagagatgctaatagatatttccattcatcctcgtggccacaattccacatatcatccaagacaagtaaaaactttgatcccaagctttgcacaatcaaatcatgcggaccactgtttttctcatctttgagttgagggatcgacttggcaatgtcttctttcaatctatacacattgaaattgggagttacacaaacccagacggtaacatcaaagtagttatgtacttctttgtatatatactgtgcgagagttgtcttccctatccccccgcttggaagaacaggtgcatgccctggtttcttggaaaactcggcattgagactcatggcaatgtactggccaatgctgcgatttgattccaacaactctagattgagtatggtagagactttggcacacaatggcttcagctgttcgacaatgcgcttcattctttgggacagatccaccctatcgaacttcagctttggtgttttcatcgtatcctccctctgcaataccctgccgcaggaacaggtgcagcggaggaactggcttccgatgtgatgggtgttgccgcgagcactgggagagagcttgtgcatgcagcagttgctggcaacagcctcctcgtcggcggcggcgtggagagtgcgcgacggcgacgagccgatctgacggttcatcacttgaccaccaccagcacacgaggagccgatctgacggttcttgtcttctcccgaccgccgaccgtcagcgtcagggtgatcatcaccagcgcacgggaggagcactaggttgctcgcgacgctgagggctgtatggcgagtgttgaggaagaggttgtggacgacgcagcccttggcgtgctcgtcggcggcctcgcaggtgccgtcgagctcgtcctggatgcggaagtagtcgagctcgtcgagcacgtcctcggcgtcgacgcgtcgtgggcgaggccacgcagctccaggagcagctgcctcagcgcggggctgcgggcctccctgccgccggtgccacgggcgttgtcgagcatcccctgcgcgtacagcagctccatcttgacggcgccgacgttggggccgagctccttgctggccacccacgcctccacgaaccctccggacagcgggctcagcgccttgctgaccacccgccgcgccgcgttcacggccaccgactccatcgctcgatctcccccccggcgccggcgattgagcggccggagagcgcagaatgtcactgcttcgatcgtccacgatccccggctttactctgatgaaagacaagcccccctggcactgcacgggatgccggcatcggcatctgttcgcttcgttcgagatggtccatgtctgggcacccgatgccacagcaagccaacaagcaagcgcctgttcgatgccagctccttccctttgtgctgcgtaaccaagaattttttgttcatcttcaggcttcagctgcttcataggaagatagacaaagctg

SEQ ID NO: 82014 - DNA, 606 bp, Oryza sativa
  Clone ID: PAT_MRT4530_81483C.1
aaccaagggaaacataattctagtcaccactcattttctagcagtggtagaaatggttaaaacattgatagtccatacaactaaaagggcttgatcctcaagagttttgggaattattcaaagcatctgtgtttggtgatgagaaatcagcaaatgatcatgctaatttacttgagactggaaaaatgatatcaaaaaaatctgaagggttcccctttggcagcgaaaacagttgggaggttactgaaaaatcaccttgatttggaacattggacaagtgtcctggaaagtaaagaatgggaattacaaaccggtgagaatgatattatgccagcattaaagcttagctacgattatctcccttttcatctgcaacaatgttttacatattgtgctatgttccctgaagaccataaatttgctagtgatgagataattcacttatggataggactagacatcctacattcacaggatcaaaacaagaaaattgaagacattggattgagccgattgaatgatttggttagctatggattttttgaaaaacatgtagaagatgggtcttcatactacgttatgcatgacctactacatgagttagca

SEQ ID NO: 82015 - DNA, 1157 bp, Oryza sativa
  Clone ID: PAT_MRT4530_81484C.1
gatttttcggatcgggacctctcctccactcctctgccggcagcagggcggcggcggcgggtggcgttggtttctgccctccggcggatctggccagaggtaggttctcgatggctacagggatgatgcagcgtcctggattcgttcccgctggttgcaggaacgggctctccatctcgatgtccggcgaggaggcagggacggtgacctccatatctgctgcggaggaaacgccggaggcgcgttgctcctacgatggtggccatcgtcgccccccctcctccctccaaccatttccccctttttttggatctggagaggcaacaggtaggaggtggcaaagggggaaaatgggagatcggtaggtttccagccctagcattatgtgttcccatcgttgctgctgctgcgccgccgttgtctgtcattgccagccatcgccgccggtggttttcttcggttcggtttctttctgcgtgtttctacttggtgttcccacacgccaggaaggaatagagggagaagaggaagaacagataggaacacagttaggaagaaaagaaaaaggaacttggggatctttgtgaattcacaaatttctcgggttcatgtcaaattgagttgttcgcttaaaggttgactgggtgcagctttctcttggtgtgcttctgcctgccatggcaaggccaacaagatgggatgaggctccgctagatagaggggattgaattgaaatcagagtttactacttacgtcagcagctgcagtgtgcacccttgcaggaggcacaactcgatggcaagaaactagaaaaggacgacaagagaagattatgccagtggtggtggcgccactggaatgccatcctggtcgtcatcctcgacatgggcatcgtcaaagctcgtcgccggtggccaaccttcaccccttgccagaattggataaacaatgatgggaatagtagtgctggaccatgagctggtggattgattttcttgtggttgataactgagtctggtgccggccatatccatcattgttggtgttgttgtaatttttttatttgtatttgtgcattctaccaatgtttcgtattgcgtatgtgatcagatagttgttctaatataaaatcttgtccaaaaaaaaaaaaaaaaaaa

SEQ ID NO: 82016 - DNA, 550 bp, Oryza sativa
  unsure (1)..(550): unsure at all n locations
  Clone ID: PAT_MRT4530_81485C.1
gaatgaggtaatctttgtctgacgatatagaggccattctaggtcaggtccggtccgggcaccccgcatctgatttatttattctatattttttnnnnnntttatcctgaccaaagtaaccatgccccatattctctacctgctgtctctgnggggggtttccctgccatctcatttacactcatatcattacttccatattacctccttggcaagtcccaactacccatgggaacctcatccctttgatttgatgtatggtgctcctgactactgtgctggagtaccagctacagtaattgcaattcctcctttactactctgatgttatcatattccaacccaagttccaattcttggtatcattcacaaggtcaaaaggtctggttaccatccttcaagaaaccatttttattaccgaaggttgttagggcactctagtcctaatgtgcaatacgttatgatgtaaggcccttctttggaacaattgtagagaagttttgtagaacttgaatcatatatatggtaatttctttcctatttggttctt

SEQ ID NO: 82017 - DNA, 989 bp, Oryza sativa
  Clone ID: PAT_MRT4530_81486C.1
ttgcacaacaaaggagagcgttgacgtcagcaagaccggcgggactaacccgtcagtgactcaagagggttcggcccatggtggaccaagtccacgagaccggggcgggtgtaccatgtggcacacacgtggcaccgacaaggcggccacgtggcgtacacgcggcggcgcgcgagcgaccccgatctgtcaaggggcggatcggacggcgggtcgcgacgtcggctgcagccatcccaactgggaggcggcggccatctggtgtggcagcgatacagcgacacggtggtgacgcagtggcacggtggcggcgacacaacggcacgcaggaaagaggaggagggcatcaccgatggcgacgacaacggcgcggaggaggcgacaactgtggtgaggggccgacaggttctagcgatcccaaagggagaggaagagatagattagaaagatagagaggaagagggacaaccgggagaggtggccggagttggccatcaatggcggctcaccggcaagcggagggcggtgacaaaccggcggacggcacggctctcggcctcacgaatccgacggtggcgacggcgtggcgaggcgcggtggacggaagggtggaagcggcggcggtgtagaataataatattccactagtattaggttcactaaccttttgcagagaataaccataaagtggaggagaatcgacatcaacttagacgataaatcaatcggacgatgtcgagaatcagacttatgcatgaatgggccaagaactcagaattgacacaacgaatcgggccaaaattcacaagtctgcgaagagaagcaacagaggaggccgctagccgaaattgggcaggattgggccggccccaggttcggccgaacccccagcagctccgtttgatccagggttcccctggacggctgagattgctccccaatgacggttggagggtattaccgaccattccaaccgtcacaaccgtcat

SEQ ID NO: 82018 - DNA, 112 bp, Oryza sativa
  unsure (1)..(112): unsure at all n locations
  Clone ID: PAT_MRT4530_81487C.1
aaccagttgaaaccgataagagtaataattgtatctcgggataatgcagtgtcagatgtaatccaaagtgtcttnttgcttgggatatgtaatncngttgagacttaggagt

SEQ ID NO: 82019 - DNA, 248 bp, Oryza sativa
  unsure (1)..(248): unsure at all n locations
  Clone ID: PAT_MRT4530_81488C.1
cgccctcgcggccccaggccgtccgcgccgacctccgaggccgagacgccgcgcacgcccagcctcgtcgcgcgcctcatgggcatcgacggcctccccgactcgccctcgccggctacctcctccaactccaagccgcgcgagaagaagaagcgcgtcatcccggagtccatcagcctccgcnagcngctccgcgacctctcccgctccctcccggacacgcggcggccttcacgtcgtcgctcaan

SEQ ID NO: 82020 - DNA, 669 bp, Oryza sativa
  Clone ID: PAT_MRT4530_81489C.1
atggcaaccgatgagagccttaaatatcctagacattctcatccgatggtgcttgcaatttccgacgacgtggctcattcttctttcaagcagcttgctgctttcacctatctagaatccttatggtcagaggtaacacaagctttggctaccatccctgggcaacactcagctgataggcctgatattattaatcatgtattccatgttaagctgcacctcttcatgaacgacatcgtaaagaagaaatttttttggccctgtcactacagactaatatcggcacagcttccagatccatccattgatcgagttggttatgacgctgttgcggcattcatgatgcatggaccttgtggtgatgcaaatccatattgttcatgcatggttgacagtaaatgctcaaagaattacccaaaggaatattgtgataaaacaacaatcctgccaaatggccatgtaagggttggtctcaagcgcaaacgggcatgtgctggaactaatgagattcatgactatttagaatgtagatgtatagcgccgaatgaggcagcgtggcgtttgcttcagtttaagattcactatactgatcctgctattgagcgtctccatgtacatatgccattagagaatagtgttacattcatagaggatgataatctagaatag

SEQ ID NO: 82021 - DNA, 213 bp, Oryza sativa
  Clone ID: PAT_MRT4530_8148C.1
atggataggggggatacctataaaatcttggggtgtttgaggcaattaaaataattcaacgttcctcagatgggaaaattttttgggctttctagaggggataattatggggttggtgtttttcgtcccccgtgtaaaaaaaatattttgagccctttttggcttatttataaaaaaattaaaactttttttttttttttgcagatttttttc

SEQ ID NO: 82022 - DNA, 2577 bp, Oryza sativa
  Clone ID: PAT_MRT4530_81490C.1
atgggtgtaaatgtcattgattctatcaatgatggacgaggcccatatgttttcaagattagtggccagctctgccactgcattgggtcactcataccaaaagaaggaagacgaccagagtatgctcagttatatatctttgacacagaaaatgagattaggaataggatgaatgttggaacctatgcaaataggagtttttgtcctaatgaggatattgtggctggacttatagacatgttcaacacccacaatcctattgtccacctatttaggacagctcgtgatagattggctgaaaatggtgatgatcgatacatcataagattatttggtgatcccgacaagcatggtgatatatttagtgctccagttgcatcagaggttgttgggttagttgttggtgatgtaggtataagtgatgttggccatgaccttattgtgcaggaccaagcggaggtaacacaagctttggctatcatccctgggcaacactcagcagataggcctgatattattaatcgtgtattccatgttaagctacacctcttcatggacgacatcgtaaagaagaaattttttggccctgtcactgcagttgtgtacacaattgaatttcagaagcgtggacttccacatgttcacatcatattgtggttagataagagtggtccgttgacacctgctgatattgacagactaatatcggcacagcttccagatccatccattgatcgagttggttatgatgctgttgcggcattcatgatgcatggaccttgtggtgatgcaaatccgcattgttcatgcatggttgacggtaaatgctcaaagaattacccgaaggaatattctgagaaaacaacaatcctgccaaatggccatgtaagatgtatagcgccgaatgaggcggcatggcgtttacttcagtttgagattcattatactgatcctgctattgagcgtctccatgtacatatgccattagagaataatgttacattcacagaggatgataatctggaacagatcttggataacccacgcaatcgtgttacgaaacttacagcatggtttgctgcaaatagagaatactctcaggctgctgcatatacatatgcagagttcccagaatactttacctggcatggtaatggcaaatattgggctccacagaaaaattgccgcaagaaaattggaaggatagcacatgtttgtcctgcccaaggagatgtctactaccttagaatgttgctgcacattgtcaaaggagcaaaatcctattctgatctccggaccattgaaggacatgtatatcctacattccaagctgcatgtcaagccctaggccttcttggtgatgaccgtgaatggtccttcgcaatgactgatgcgactcattgggcacttccctaccaactccgtgagttatttgtaacattgcttcttttctgtgatgttacacacccactgagtttatttgaagagcatctgtcttcaatgggtcaagatgcagcctaccaccttaaccatgccacactaggtataaattcttctgcaccttcagtcatacaatatgtcaagtcctatgttctttccgagatcgatagcatacttagaaatgttggtcgtactttggcatatttccatttacctgagcctactattcaaagcacatccatccttggcaataggctgctaatagatgaacaagcatatgatctagagaagatatcgattgaagcggctgatcagttaggcaagttaaatctgaaccagagacatatatatgatgctattctcaattctttaaatagtgacattgggcataccttctttatctatggctatggagggacagggaaaacattcctttggaataccttactaaatagtgtaagggctgaaaggaaaattgctttggcagttgcttcttctggtatagcatcacttctacttcctggtggccgcacgcctcattcttgctttagaataccattggacatacaagagcattcagtttgttctattaagaagaacactcacttggctcaattaattcaacaaacctccttagtcatatgggatgaggcacctgttaatcacaaacattgctttgaagctcttgaccgaacattgagagatattcttgcatccaatgatccatcacttgctaacaaacagtttggacgcattacagttgttcttggaggagattttaggcaaactctcccgctgactactcaagaaatgtcatactacagttcagatacaattgaagatactacaagtaatcgtgccactcttgatgctctttacccaactgagttcctgaacactataaaaatcagcggtttgccagaccatcaccttcaactaaaaataggagtgccaattatgctgctgcgcaatctgaacccatctaaaggtctctgcaatggaaccagacttatagtgactcaattgactcgtcgtgtgatagaaggggagataattacagggaaggctaaaggatccaaggcatatataccaaggatccaaggcatatataccaaggatagtaaccacttcaattga

SEQ ID NO: 82023 - DNA, 171 bp, Oryza sativa
  Clone ID: PAT_MRT4530_81491C.1
atgaggaccccgtccccgtcgatagcagtgctaggagatcaggcagggccaggggcggagccacatggtggcggtgctgacctcagccccaagcagtgctggtatggaggaagcccagaccccggtgcgggaataagtacgctggagatgactagaactgcattatcatag

SEQ ID NO: 82024 - DNA, 3856 bp, Oryza sativa
  Clone ID: PAT_MRT4530_81492C.1
atgtcagtctcttctgggccatcaacacctaaaccagcttgcaagcgcaggcaacccgagagagcttttataccttcagggaatattcctagcgatggcgttgttctgctggctgatgacgccctctcccatgtttgtgatttccctacaagttttcatttgccatcaaggcgctctatacgtcgaagactacttactcagtctgctggatttccccacccggatcctgtaacagctgctcaatcacgtcgaaagcgtaagcttgctatggctgccaaatcatctagagtcatccaccttggttcctatcaattgtggccatacacaaccttttgcaactgtcgatggagcatgttcatcgtcgacctcttcagccctattgtctccatctcccacacatcaacatcactcatacagtatgatgctcgacttgctgttcgactcactaatgtaattctgatgctcgacctgatgttctacaattcgatgtttgccttcacatcgatgggtgtaaatgtcattgattctatcaatgatggacgaggcccatatgttttcaagattagtggccagctctgccatcgcattgggtcactcataccagaagaaggaagacgaccagagtatgctcacttatatatctttgacacagaaaatgagatcaggaataggataaatgttggaacctatgcaaataggagttttcgtcctaatgaggatattgtggctggacttatagacatgttcaacacccacaatcctattgtccacctatttaggacagctcgtgatagattggctgaaaatggtataagtgatgttggccgtgaccttattgtgcaggaccaagcgggtcatttacaaaaagttgaagaaaagcattgtaaatttatgtcaatgcaatatccaattctatttccatatggggaggatggctatcatgaaaatatcacataccgacgttgtgctcgattacaagctatcaaaagaaagaagtctactatggttgaatactttgcatataggcttcatgacaaagctgatgacttcaatactcctatgcgctgcaagagaggaacccaggcctatgtcatagatgcctattgttgtatggaagaatctcgcctgagtcactatagatccaagacatttcagcttaagtatagaacaacttcatttagtgaggtaacacaagctttggctatcatccctgggcaacactcagcagataggcctgatattattaatcgtgtattccatgttaagctgcatctcttcatggacgacatcgtaaagaagaaattttttggccctgtcactgcagttgtgtacacaattgaatttcagaagcgtggacttccacatgttcacatcatattgtggttagataagagtggtccattgacacctgctgatattgacagactaatatcggcccagcttccagatccatccattgatcgagttggttatgatgctgttgcggcattcatgatgcatggaccttgtggtgatgcaaatccgcattgttcatgcatggttgacggtaaatgctcaaagaattacccgaaggaatattatgagaaaacaacaatcctgccaaatggccattttgagattcattatactgatcctgctattgagcgtctccatgtacatatgccattagagaataatgttacattcacagaggatgataatctggaacagatcttggataacccacgcaatcgtgttacgaaacttacagcatggtttgctgcaaatagagaatactctcaggctgctccatatacatatgcagagttcccagaatactttacctggcatggtaatggcaaatattgggctccacggaaaaattgccgcaagaaaattgaaaggatagcacatgtttgtcctgcccaaggagatgtctactaccttagaatgttgctgcacattgtcaaaggagcaaaatcctattctgatctccggaccattgaaggacatgtatatcctacattccaatctgcatgtcaagccctaggccttcttggtgatgaccgtgaatggtccttcgcaatgactgatgcgactcattgggcacttccctaccaactccgtgagttatttgtaacattgcttcttttctgtgatgttacaaacccactgagtttatttgaagagcatctgtcttcaatgggtcaagatgcagcctaccaccttaaccatgccacactaggtataaattcttctgcaccttcagtcatacaatatgtcaagtcctatgttcgttccgagatcgatagcatacttagaaatgttggtcgtactttggcacatttccatttacctgagcctactattcaaagcacatccatccttggcaataggttgctaatagatgaacaagcatatgatctagagaagatatcgattgaagcggctgatcagttaggcaagttaaatctgaaccagagacatatatatgatgctattctcaattctttaaatagtgacattgggcataccttctttatctatggctatggagggacagggaaaacattcctttggaataccctactaaatagtgtaagggctgaagggaaaattgctttggcagttgcttcttccggtatagcatcacttctacttcctggtggccgcacgcctcattctcgctttagaataccattggacatacaagagcatccagtttgttctattaagaagaacactcacttggctcaattaattcaacaaacctccttagtcatatgggatgaggcacctgttaatcacaaacattgctttgaagctcttgaccgaacattgagagatattcttgcatccaatgatccatcacttgctaacaaacagtttggaggcattacagatgttcttggaggagattttaggcaaactctcccgcactgcattctcatgcatcttacggaaaatatgaggcttcaatccccaacattgtctaatactcatcgtcaacgccttcaagaatttgcagaatggttgttagcaataggggagggagcagtagcagattcttcacctactgatcgagaggatgtttcttgggtaaaaataccagagtatttgcttttgccagatgacacaagaaacctttcaggccttatctcttttgtatatgatgcctcaatcaattctcacacagccaattatctctgtgagcgagcaattctagccccaacaaatgaaatcgctgcaagtataaattcccaaatgattgctcagctgactactgaagaaatgtcatactatagttcagacacaattgaagatactacaagtaatcgtgccactcttgatgctctttacccaactgagttcctgaacactataaaaatcagcggtttgccagaccatcaccttcaactaaaaataggagtgctgattatgctgctgcgcaatctgaacccaaccagacttataatgactcaattgacttgtcgtgtgatagaaggggagataattacagggaaggctaaaggatccaaggcatatataccaaggatcatatataccaaggatagtaaccacttcaattgataagaagtggccttttaaattaaagcgccgacaatttcctgtacgtgtgtcatatgcattgactataaataaaagtcaagggcaaacacttagtagagttggtgtctacttacctagccctgtcttctcacatggacaactttatgtcgcactctcacgtctaacatcgcctgatggtcttcgtattctaattgagaatagtccaactgagcatgtgaccagcactcacaatgttggttacaaagaaatatttaacgatctggatcaacaaggaatgcatacatga

SEQ ID NO: 82025 - DNA, 667 bp, Oryza sativa
  Clone ID: PAT_MRT4530_81493C.1
aatgcaatatccaattctatttccatatggggaggatggctatcatgaaaatatcacatcccgacgttgtgctcgatcacaagctatcaaaagaaagaaggctctatggttgaatactttgcatataggcttcatgacagagctgatgtcttcaatactcctatgcgctgcaagagaggatcctaggcttatgtcatagatgcctattgttgtatggaagtatctcgcttgagtcactacagatccaagacatttcagcttaagtatagaacagcttcattcagtgaggtatccactatggtccattcaggcatcacagaagcatcatatgccgggcagcgagttatattgccttcttcttatattgggggcccaagatatttatatcaaaattacttagattcagttgctctatgtagaaaatatggttgccctgatttgtttatcactttcacatcaaattccttatggtcagaggtaacacaagctttggctatcatccgtgggcaacactcagcagataggcctgatattattaatcgtgtattccatgttaagctacacctcttcatggacgacatcgtaaagaagatattttttggccctgtccctgcagtactgcacacttcatatattcaaatattttgcatgtgtcattctcacattg

SEQ ID NO: 82026 - DNA, 710 bp, Oryza sativa
  unsure (1)..(710): unsure at all n locations
  Clone ID: PAT_MRT4530_81494C.1
ttcggggcggaggaagtcggcgcggcagaagccgcggccatggcagagaggcgggcggcggtgctcgccgtcgtggcgccagccgccgccacgggcgaggtccgcctggaccaccgccacagcggcctcacactgccgtccggttccccctcctcttctcacgccgcgcgccgccgtgcatcctccgccgacgagagagagattaggaagagagaaacagggggtatgacatgtgggtcccaccatttaaaaaataaaatgctgactacactgccacgcgtacgccacgtagatcaaaaccaccgcggattggatcgaggggggtaattcgtccggtttgcatagttgagggtgaagaatatccggttttgtggttcaggggtaattcggacgaccatgataattttggggggagtaattcgtactttttcctttcttatattgtgctaacattataacattttttattggactactcggtctaataaaaccatttttcacatatacttgtattcaattaactgccagctcgatactcttgcaaatagctaattaagaatttaatgtngttgattaatataatatagctttaactatatgttgtcaattcattaaataaagttgttaatcatttgaccgtcatgtctttgtcgtatcaaactaattgatcgatggaatcggttaaaactgcttatctttattcctataca

SEQ ID NO: 82027 - DNA, 1077 bp, Oryza sativa
  Clone ID: PAT_MRT4530_81495C.1
tttttttttttttttttttttgaccaaacatatctttcataagccttcaattcatacatcatgtaggcaagatagcaaccatgcttcaactagcagcggttgatgcataaaacagtaaggcatgatatacgacagggttgcttgaaacgcgagcgagctaaacattaccgaacacgacctaagaacctatacatcgccaatgcagatcatttccaagccgggtacgagttgtcccgcctgttgttcctgaaagcgcagcacccaacggagtagacgatgatgaggaagatcaggaagatgatgttgacagtcgcaatcttcttccagtcattcttcaggttagcgagcacaccagctttgcatgactggcagtcgtagcacagggcggtctgatcattcgaccatgtcgtgcagtccgggtcatcggtagagttaaagccagaaggtttggtccagacggtctcgctcacgtaggcgaagttgcatcctgttgggggcttgcagcatccagactgaatcggggagagattgctgccgacgaactggtccatggtctcgcgcctggccccaagcttctcgcagaccttgccgtcctggaggcagctccggatcttggcccagttcgcggagttctccaccctcctctgcagccacgtggagtagtccccgaggcggtactccctgtaccctctcccggagacgacccagccggcgccgcggttggtgacgacgaaggcgaagacggtgaagacgaagagggcgaggatgaggaggaagagcgcgaggaggtagagccacaggaggcaggaggcgccgcagagcgcgccggcgaggccggcgagggagagcgcaaggaggagcacgcccagcgcgacgacggggcgctccatgaaccgctcgcagtcagtggtggcggcgcggttgctgagccagatcccgccgcccagcaccaccacggcgaggaccagcacgccggcgttgaggaggccgaggaggccgttgctgcaccgcgccatggctgcgaggttgcggccgcttggcttcttcgtcgtcgcctgcagcccggggatccactag

SEQ ID NO: 82028 - DNA, 276 bp, Oryza sativa
  Clone ID: PAT_MRT4530_81496C.1
atggcggagacggtgctgagcatggcgaggtcgctggtgggcagtgccatcagcaaggccgcctctgccgctgccaatgagacgagcctcctgctcggcgtcgagaaggacatctgctcctacgtgccgacgtcgcggtacttgccggcgctcctagcgcacgcaccgtcgaaccacaccgtcaccgaccaactacccaccgccgccgacttctgcctcatctgccatcgtggccctagcccaagttatcatcgtggcaattgccgaggctcctaa

SEQ ID NO: 82029 - DNA, 211 bp, Oryza sativa
  unsure (1)..(211): unsure at all n locations
  Clone ID: PAT_MRT4530_81497C.1
gattcagacacacatcgtgatgattgggagcattccacaaggacagattggtattggtttcgaactccttggggttcaaatcatgttggtgatattccacagttgttattttgactttgtaatatagtatccagctggacatagttttggccagtatggaagaatacatcaataaatatcaaatgctctntaaaaaaaaaaaaaaaaaaaa

SEQ ID NO: 82030 - DNA, 403 bp, Oryza sativa
  Clone ID: PAT_MRT4530_81498C.1
cttgctttcactctagctgacgggtggggcccacctgtgatctccctcctcgcgccgagccgtcgaccggccgtgcccggggatcctgatcctgctcatggtgatgctgctgctgggggtgtgggggatctttacgtacgaggacttcatggaggaggcggcggagcagctcaggtgggcgctggtgctagcacccgtggaggtcgtactcctgatccgatggatgtccttcgtagacaccttcgacggctactttagcttgtacccaaccgagcgcctttggaaccgctactaccagaaccccgacgagaggagctacccatggggcgtcgccatggacgtcctgctcatactagtgctggactacttgcactacaccttacaggacatgtggaagccctga

SEQ ID NO: 82031 - DNA, 693 bp, Oryza sativa
  Clone ID: PAT_MRT4530_81499C.1
gggttttgtttagttttcactttaccttttcccgcacggcgacgaagaggaggaaggagcggcgccaccaccaccaccaccaccccacgccatggcgaacccagcgcaggggcctctgagagcgaggacgaagcccgcggggaggaggggcggcgctccgccgcccgccgcggaggatccgtcccgggcggcggcggcggcggcgaggcgctcggtgcggaagtggagcacgtggacgatgaagacggcgaaggtggcggcgtactacggcttcatccccctcgtcatcgtcatcggcatgaactccgaccccaagccctccatcggacagctcctctccccgctgtgattccgcttcgacccccactcgactctgcctccgcttttcttgggctctgctacatgatcgtacttactgcgtagttgatctgcaattagtactattttgctactagtatattcgctatgtgttagcaatattctgcactgttaatttgctgggaactgggaagttagtacttgcatcgatcgtcatgtaacctttgtgatgaatttggtgatgcctgcgtttgattttgatgcgtgccaggcatgtcgaataccatggttcggtgcttgccttgcgagatgcctcttgatctattattgtgtggaccttgttcaggagagggtttttggccaatagctttgagc

SEQ ID NO: 82032 - DNA, 214 bp, Oryza sativa
  Clone ID: PAT_MRT4530_8149C.1
gttttgttgcgaagtgatcatgaagccgtgtgcgtctcctgcgtttgggtcgtggggcggtcttccagcgaggctacgggcgcacctcaccctgctcaccgtgtatctgagcggttgtgctccgggtactttgttggcatcatgtcgtcatatcatccgggcgcctgcgagcaagccgtaccagacggacatactgtcgagcgccgagcacctc

SEQ ID NO: 82033 - DNA, 610 bp, Oryza sativa
  unsure (1)..(610): unsure at all n locations
  Clone ID: PAT_MRT4530_814C.1
gtctacagaggacagacattggctttctactgtttccaaatatacaactgtaacaccaaaagaaaaagaaaaaaaagctaacaagggcacgcatgtccttggaacatttacacgtacaaggacatgaaagagcagaaagaattcagttcagatacacagatccaacaacagcgtggaaatttcgccagcagtgttttgtaaaggaaatctcaagcaaagatttctctaacaagccagtctaggctagggtaagcaaaatacaggatcaagaaggagggcagagcaaataacacggtgataaggatgtttaataacaagacagctgcactagcagggattgcatagagcactatgaagaagaaaatgaacaccaggggaaacttggcatcaggtgaacccagaaggacagcgacttgcgccacaccctgtnccctctctgcttccanatnggaccccctgantgcttggtcccactggggattntnttccaccgtggtggattgaantctgantggatcaatacctcntcccttgccatgtctgaaccnttttgtcccttacctcatccncccggatccttttctaagccccccngngancctttttcctt

SEQ ID NO: 82034 - DNA, 1236 bp, Oryza sativa
  Clone ID: PAT_MRT4530_81500C.1
atgagcgctgctcagtctccgcggcggccatggccgcacctctccgacgacctcctgtacgagatcgtccgccgcatcccgtgcgaggtcgaccgcctccacatgagccgcgcctgccgctcctggcgcgtggcgctcacgaagaccgagcccccggcgccggcgccgccgcccgcgctcccgtggctcctcctcccggaagtcgacggcgagcacgggcttaccttctcctgcgccctcagcggctggcgccgcacccaccccttcttcctcccgcacgcggcgcgccgcgcccgctgcttcggttcgtacgacggcgcctggctcttcctcgccgtcgatggccaaggaccccgaggtgaagaccacgtcctcgtcaacctcaacaacttcgagtacatcgacctccccaacgcgatcttccacttcgactggattgatcccgagaacgtcgacatcgtcgccgccaccctctcgcgcgctccaaccgagcaaggatgcatcgtcgccggtatcatcaattcctttctctcccaccaccaaatcgcgttctggcacatgggcgatcggttgttctcagaggcagagcagatggtgtggctttctcccctggaacaagtggaggacctcctctacctcgatgaggacttccttttcctcaccgaagaggaacacattcgtgtgtgcccagagctaacaatcttccatgaatatcccgagcggatactgtggcgcttccagcgccggcgccgtggcgaggaggaggagcaggtccttgctcgctacctcgtggaatcccgagggagtctgctcatggtggtcagactagctagcgggcgttgtcagaatttgccgacgtcggagttccgggtgtttcagaaagagaagttcagcaatggcgaagaagaagaagaagaagacgcgtttcagtttcatgagtactactggagcgagctggacaagctcgaaggccggatgctgttcgtcggacgaggctgctccagatcctacgaggcggccgatgggcacgccggcatggagggcgtctacttcttggatgaccggagcttcgtcgaggccgccattggtgatgcacccaagctgccgtaccgctgcagcgacaacggcaaatggtcgaaatcaccttcccagtcacagggccaggtcgagcgctgcttcccggagcgaggccagccgagatccaagtactcgcctccagtttggattctcccttga

SEQ ID NO: 82035 - DNA, 632 bp, Oryza sativa
  Clone ID: PAT_MRT4530_81501C.1
atgggggagaagcgtcggagcccgcttcccctcctctcacaggggccgccgctgtcgaacctgtgttacctgggggcggagttcaggttccagcgggcggagctcggggcggagatgatgaccgacgatgtggtaacagccttcgagctaagccgggccatcgacgatggagtgctgcagcctttgccctttggttcgctgacatgctgttccttctatatcgcgtgctttttccaccgctacaagtccgagcagccaagcacttatcgcaagaatggaaaaccagctgccattcaatatggcactggttcagttgatgggtttttcaacgaggatagtgttacagtaggtgatctggttgtgaaagatcagaaaatagctattggagatgaggtgaatatttggctttgaaccgcttcagtggatggcctgctccccgtcgatagggctccggttcgggtgctgggtgtgtcagcgaggatagtgttacagtaggtgatctggttgtgaaagatcaggtgaatatttggctttgattggtgaaaaattaatggagcggatataatcgaacttggacttgctacgcattgtcccatcagtggtgccagcactggctcgcgcatgtgtttgat

SEQ ID NO: 82036 - DNA, 663 bp, Oryza sativa
  unsure (1)..(663): unsure at all n locations
  Clone ID: PAT_MRT4530_81502C.1
cggnattggccccctacgataatcaagatgaactagggttcaagtgaagcgatgatgatacaagaggtagtatcgcatcgggatgtgccttggacgtacgtagagatgccaattntgctgggtccctagtcaacgtgaatacccccctngatgtgttggtcgatgctacccctggcccccccgttgtttgcggttagtcgtgatggcgtgaagtgcaaatgcaataacccccntatgggcgtgttagcgtagttattgaagaagtgntagaacgtgcccgtagtatggtgtgtagtccgtcttgtgggtcccgtgtgtgtgtcgtgtcgtcnttggncagataagagtgtntagggccaaagaagtgttagtcagtgtagtgtgcgtagtgtgcccccgtcgtctaacgtcccgtctccaacgtcttctgtgagtgcgtaaagtagtgttagtcgtacgtagccccagccaccccagtccagaagtagagcagntaggtaggtagaggtgtacccccgtaccgtgtggtagttaaccagcagccgattcccccggataaatttgtgtaagctctgtagctcgagataaaaaaaaatggcgatcgaacgaacgaacaaatggcgtatgtattgtctgatctttgatataaaaaaaaaaaaaaaa

SEQ ID NO: 82037 - DNA, 493 bp, Oryza sativa
  Clone ID: PAT_MRT4530_81503C.1
ggacggggggaaatttttttttgggaacgggaagcaatattacttacgggtcccaatatgttctttacagtattagggaccagagaaatttcacataaaacatcgatcaaaagtccaaggtttgggctgtttaacttgcagaggggggagacactatgcaaggggggtatatattaaaaaattttataatttcttctcttctttatttcccttttatttcacatcattaaaattttccatcttctattctttatactccaatttattttctcccttcctctcttctttggagggtccaacaaaaacaatggtaatcttcccaatctttttaaacttttttgaaatggccattgtgcccatttcaccgaagaggaggatcttattgcccttaaaatttcccgctatggaatcgaccccgtaaatgtttgaaacggctacaaaggctttctgtttaattttaggcgcggcccggacgcgggggtcaacccggaaa

SEQ ID NO: 82038 - DNA, 276 bp, Oryza sativa
  unsure (1)..(276): unsure at all n locations
  Clone ID: PAT_MRT4530_81504C.1
gcanttgatttgagccttttgcagtgccagnttgcagnncccagngcagtccttattncaactgcgaactgggncggttgcccgaaatacatccttgtttgacatttttaacagacaggnaggccccaggtncaacagttgacacaaagtncattatgttgaaacggtcactaatcgttncttggactttgnggnaacttcggaaggatgcccatcatctgcacttcccgggaaaacgtccaaggacatccccttggcaggggcaatgtggttgga

SEQ ID NO: 82039 - DNA, 876 bp, Oryza sativa
  Clone ID: PAT_MRT4530_81505C.1
atgggtgaaccttccaaattctcgactctgttggatccggcgacgggcagcgctgtgggggaagaggccgccggggggaggggagaggaggaggcgtcggggaagaaggtgggcgcggcggcggaggctagggggttgccgcggctggtgcggtacaaggtgctggtgctcgtgctcgtgctgcagtttctgtacagcaggcaggcgtcggtggcggcgcccaagagcgggccgctcccggggtgcggcgcccggggttgctggcacacgcggtgcggcgccgccgttgacctcgccctcgacacgctggaaagacttgcaaactctcagatgatggacagtgtcatcgaccataacccgcgccacgtccaaggccgcctccggtggttccccggccatcccgcctccgacaacggcgccacgctttccgccgccgagggctacgacggcgaggaccgcgtcagcgcgctccccgacgacctcctcgtcgcccgcctcccgtcaaggacgcgactcgcaccgccgcgctcgcctcccgctggcggcgcgtctggagctccacgccgctcgtcctccgcggcaagccccttgtgcgccggcgtggagggccctaggggcggcgtggtcgacgatggccgccgcccacggcgaggtccccgtggaggcgccgtcggccgcgccctcgccggtcacccagaccccttccgcgtcgtgcaccggtccgagctcgccgggtcctcaaccatctgcttgcctgcaagcctcgcgctcgcgctcaacaggcagagagagagaggaggaaccgaggagcagctgacgtggcattctgacatatgggacccacgttggttccatgctgactcagccgtcacatag

SEQ ID NO: 82040 - DNA, 786 bp, Oryza sativa
  Clone ID: PAT_MRT4530_81506C.1
atgggtgaaccttccaaattctcgactctgttggatccggcgacgggcagcgctgtgggggaagaggccgccggggggaggggagaggaggaggcgtcggggaagaaggtgggcgcggcggcggaggctagggggttgccgcggctggtgcggtacaaggtgctggtgctcgtgctcgtgctgcagtttctgtacagcaggcaggcgtcggtggcggcgcccaagagcgggccgctcccggggtgcggcgcccggggttgctggcacacgcggtgcggcgccgccgttgacctcgccctcgacacgctggaacgccacgtccaaggccgcctccggtggttccccggccatcccgcctccgacaacggcgccacgctttccgccgccgagggctacgacggcgaggaccgcgtcagcgcactccccgacgacctcctcgtcgcccgcctcccgtcaaggacgcgactcgcaccgccgcgctcgccttccgctggcggcgcgtctggagctccacgccgctcgtcctccgcggcaagccccttgtgcgccggcgtggagggccctaggggcggcgaggtcgacgatggccgccgcccacggcgaggtccccgtggaggcggtggtggccagcgcgtggaggaagcgcggcggcggcggcgctggtcgccgatctcctcctctccgccgccgaggccgtgggcgttgcagccgtcggccgcgccctcgccggtcacccagaccccttccgcgtcgtgcaccggtccgagctcgccggccgtcacatag

SEQ ID NO: 82041 - DNA, 1347 bp, Oryza sativa
  Clone ID: PAT_MRT4530_81507C.1
ttgcactcctctctttctctcgttctctttctttttctctcgctctcccctgcgccgccgcatcctcaggtctcgccgccgctccaccccacgccggccgatgctccctgcctccggcagccgccccgcagccgctgccggcctgaatcggtttcgtggctcctcatgagtctatccccaaactaaccctagccatcaacccctctccaatcgatgctgctgctggctactgctctcaacgactgggattggaattttcccagccccggcgcccctgatccaagcatgactcagaccagccgtgtctccccgagctccttctctctgatcccttcattccctacttctgtgatgtgatctgattggtgttctattatatagttacctactgtgaatttctatgcttgtgaactagtcctaatgaccaacttgatgatgctatactcagaattatcctgctatctgtaggttctagattaattgatttgctataattagatgataaccatatgctatggatggatgaatgaatgcttgcataatatatcatatgaaaatgcagtactgaaactaaaaacacactaacatgattttgtccttatatacctttgcttacttgtagaattaactgaaatactgaaattgttaaaacactaacatgatcagatccttatgtatatgctttgcatgttgaaataaccgaatttctgaaattagtaacacatcaaccggattagattcaataataaatcttattgaatggtgatgtaacttgcatggttctatacttgatgatcatggcaagatgtatgctatagataatggaattatgtaaatgttgactaatttccttaaataatttactgctactgactatatgtactacctcttgcctctatgtaatttacttgatttgaaatattcatgcaaggagaaattagactatttgatgacctaactgtatgctatggtttttattcagatactatactctcctgtttcctgacaattttataaactgcgatttcatatacttaaactgaagatatatttgcgcacactaatagatgccattcttttctctaattatgctctgctcctacgcatgcattaaaaattcatcctatgacggctttactgaaccttgatttatatcactgtatacagatataaatccttaactcaaatgcgcttatagatcatccaagataattcttgctgtcaaccatgcactgagatggctgatctatacttcaattatcctactaagagtccattaaattttagacgatactatcttgtccaattactcataaaaattatgtcttgcttattgaactaaggatg

SEQ ID NO: 82042 - DNA, 1385 bp, Oryza sativa
  Clone ID: PAT_MRT4530_81508C.1
tcaggatgccacgtcagtcggcctctcccccccctcttctcttcctcggttcctcctctctctctctgccaattgagcgcgagcggcgaggcttgcaggcgagcagatggttgaggactcggcgagctcgaaccggtgcacgacgtggaaggggtccgggtgaccgacgagggcacggccaacggctacgacaccgacagcccgccggcagagaggagatcggcgaccagcgccgccgccgccgcgcttcctccacgcgctggccaccaccgcctccacggggacctcgccgtgggcggcggccatcgtcgacctcgccgcccctagggccctccacgccggcgcacaaggggcttgccgcggaggacgagcggcgtggagctccagacgcgccgccagcggaaggcgagcgcggcggtgcgagtcgcgtccttgacggggatgcgggcgacgaggaggtcgtcggggaacgtgctaacgcggtcctcgccgtcgtagccctcggcggcggaaattgtggcgccgttgccggaggcgggatggctggggaaccaccggaggcggccttggacgttgcgaggaccacgtcgagcccctcgtgcgccggcttgtagggacctatgtgtggcgaggtcgacgttggccgccgcccacggcgcggtggtggccggcgcgtggaggaagcggggcggagcccgagccatcaggctcgcagtcgcggaggatggccagcgcgccggtcgacgggctcgagcgccggtcgacgggctcgagcaccggtctctagtggtgaggccctccagggtgggcgccggtcggtgatgacaacttccagtgcggtgtccaacagcgaagagcccctctgcctccacgctcgcccacgccgtcgcctttagcttccgattctgggtcggtgccggcctcccctcccgcgtcgcagctgccgtcgatgctgccgcctctctgtcaccgcactcgcccgccgacgccgcctcgccttgccgccgccctccccttctcccgtgtctctgccgccgcgtcaccgccgccgcatcgccggccagcgtgagcagcgcgacgacggcgacgactgctcgtgatcttgcgccaatgacgagcagactggtgtgcctcgacggcgagctccctgtctctaagttgcatcgttgcctcctctcatctgactctagcaacaactcgcccgccttcgctcgcacaactcctgcctcgccaccggcccgcccgtctgcccctgcaacgtcccatgcctcattgtatgcactgacaacccgctgctcgttgtcgccgcgctctcttggctcgacgacgacgtatgcactctctcgacgctcttcctgttcctccccgcacatgcccacctccat

SEQ ID NO: 82043 - DNA, 945 bp, Oryza sativa
  Clone ID: PAT_MRT4530_81509C.1
gataaacacttaaaaaactatttccaaatttatagtccatacaatataaagttgagcgaacaaataattttttttcacttatttaaggggatcaccaaacattgaaatggacgagcaaacctttctgatcaacagggagagagctgttgactacttgaactcccttgataaggtaggctagggctatcacaccttcatgaatattgaatgttgtggctgcagtttggtgatataatcctgtaatgtttctgagtaagtagaaagcttctggatccgtgaacttccgtgttagtgccttaaaaaccaaactcaaccaccatgcatccggtatatatagtaacatcttcaatagtgaagtattattgtaggatccagaaaacctatcgaggaagctgcagggcaaagtagccataaagatatgaacaaacacttgcatatggtacaaactgcagaggaatgaatagtgtggtaacagatgatattcaagcctgcagaaacgaacagtactacaattcagtttttaacataataaagtgaaatcatctgaaaacatttgcaggatctcatgctacacgcttttttcattgaatgaacagatataaactgaagtcaagaaaagaattattgctaaaataatataatagtatggaataatatgaaatacatgtaccctataattagtactccctccgtcccaaaatgttagcatttttagcatagttgcaaattaaacatttttaattttgactattaatagcaaaaaaataaaaaagatcaataatgtaaaattgatgttactagatttatcattaaagaaactatcataatatgtaaattttttttatttgaaacatcttacttttatagatattattggtcaaaataatatctcggagaccgtgtcagagtccaaaaaatacttatctatcggacgcgtggcggacg

SEQ ID NO: 82044 - DNA, 1072 bp, Oryza sativa
  Clone ID: PAT_MRT4530_8150C.1
ccggccgggttccccactcactcactcctccctctcactccccacttcactctcacagcaaccgagtactagttcaaagttcttcgaatcccaccgccgccgccgccgccgcagcattgcgcgatggccggattcgcgacctcgcgccccgcatccctcgccctcgcggcgctgctcgcgttcctcaacctcttcgccttcctcctcgccgtcggcgccgagcgccgccggagcacggggaaggtggtgccggacgagtacgacctgcggtcctactgcctctacgacaccgacgcctccaccgtctacggcgtcgcggccttcttcgtgctcctcctcgcccaggcgctcgtcaccgccgccacccgctgcctctgcctcggccccgcgctctcctcccgcggctgcgccgtcgcctccttcgtcctctcatggataacatttctcactgcagaagcctgccttattggtggatctgtgaggaatgcgtaccacaccaagtatcttggttactacatgaagcatgacttggtcacatgtgccacgcttcgcaagggagtctttgcagcagctgctgccttgatgcttataaatctcctggcatctctcatgtactactgggagtactcgagagctgcaacaggtgggttcatcaagcaccagaacgaagttggcatgagcatgacggattacggccttgacaagggtggctctatgccctgagtactggagtagcatcatgttgctctttgttcatctggcggctatgacgagttacgagatttctcagctttctgtgccagaaggtatgttcttgctgtgcacagtgatgcagtggatgacacacaaatccggttatgatatatagtggtagttttattgtatgtctctaaattattacaacgttaaaactctttaggtcctggttgttaattgttatatggcatgtgcctgcttgcccttgggcattggctatcagcactacttttagtgcaaatacagctttagattgtttgtgctggaaaaaaaaaaaaaaaaaaaaaaaaaaaaaaaaaaaaagagggcctcgtgc

SEQ ID NO: 82045 - DNA, 306 bp, Oryza sativa
  Clone ID: PAT_MRT4530_81510C.1
acaagaaaactgggggggaacaaaattacaaaaatttggtatggatggggccagagaaaaaccagacatgagttggggcagtgtacatttacaagagctgtgacgaacttcggtctaaatgggctgggaccttgaaaatttagggggtggggtggttagtttacagctttttattgcctgaaaaaagtgcagtctgttttgaatgttcgggaaagatttatggagaggaaatgttgagacttcatagaggttgacacttagttgcagacttcaaaggctttggagtaaagtttgatgaacttttca

SEQ ID NO: 82046 - DNA, 444 bp, Oryza sativa
  Clone ID: PAT_MRT4530_81511C.1
atggcgatgactccccgcttctcaatggccgacgatagtggtggcgagcctagcgcgacgacggcgacgactgctcgtgatcttgcgccaatgacgagcagactggtgtgcctcgacggcgagctccctgtctctaagttgcatcgttgcctcctctcatctgactctagcaacaactacaacattgccaccgtagatatcaccgcagacctcgcccgccttcgctcgcacaactcctgcctcgccaccggcccgcccgtctgcccctgcaacgtcccatgcctcattgtatgcactgacaacccgctgctcgttgtcgccgcgctctcttggctcgacgacgacgtatgcactctctcgacgctcttcctgttcctccccgcacatgcccacctccatgctcatgaagctatgctaggacaacgaggatgcacgcaccgatga

SEQ ID NO: 82047 - DNA, 2111 bp, Oryza sativa
  Clone ID: PAT_MRT4530_81512C.1
atggaggcgaaagacgggcaagcatggctggggacgaacggatacgacaccaggagggaggaagacggcgtgtgccaccacgacagcgcgacaccggggagggcgaacactgtcgacgagctacactcgctgcagaggaagcctcaggtagtggaggatcgccacaggctgcagcttcagtccatcagtgcgtctttggcatcgatgacatgtgggattgggccaaaactcgtcaacggtgacccagcaaggaaaaaagaaatggctggcaaggctgtgacacatcaccaacaccatatcactgtccccacgatcactgtgagcgacagtgacctcaagttcacccatgttctgtacaacttatccccttctgaactttatgagcatgcaatcaaatatgagaaagggtcattcatcacatccagtggggcgttagcgacgctatcaggagcaaagaccggtcgatcacctagggacaagcgtgttgtcaaggatgaaacaacagatgatctgtggtggggcaagggatcaccaaacattgaaatggacgagcaaacctttctgatcaacagggagagagctgttgactacttgaactcccttgataaggtgtttgttaatgatcagttcctaaactgggaccccaacaataggataaaagttcgaatcatctctgcgagggcctaccattctctcttcatgcacaacatgtgcatccggccaacatacgaggaactagagaattttggcgagcccgacttcaccatctacaatgctggacagttcccgtgcaaccgttacacgcattacatgacatcgtcaactagcatagacttaaatcttaagcggagagaaatggtcatcctgggaacacaatatgctggagagatgaagaaaggcctcttcagtgtgatgcactacctcatgcccaaaaagcagatcctctcgttgcactctggctgcaacatgggcagagggggtgatgtagccctgttttttggattgtcaggtactggaaagacaactctgtcaacagacaggaataggatcttaattggtgatgatgaacactgctggagtgataatggtatctctaacattgagggcggctgctatgctaagtgcatagatctttctcaggagaaagaacctgacatttgggatgcaatcaagtttggcacagtgttggagaatgttgttttcgatgagcactcccgtgaagttgattatacagaaaaatctgtcacagagaatacccgtgctgcttaccctattgaatacatagctaatgctaagataccatgtgttgggccacacccaaagaatgttatcctacttgcatgtgatgcatttggtgtcctccctcctgtcagcaagttgagccatgcacaaaccatgtaccattttatcagtggctacactgcattggtcgctggaactgaagatggtatcaaggagccacaggctacattttctgcctgctttggtgcagcttttataatgctccacccaactcggtacgctgccatgctggcagataagatgaacaagcatggagctaccggatggcttgtcaacactggttggatcgggggaagttatggtgtaggtgagcgaatcagcttggcctacacaaggaaaatcatcgatgccattcactcgggtgagcttttggctagaagctacaaaaagacagatgtctttggactagacatccccacaaaagtggaaggagttccatctgaattgcttgacccaataaatacctgggaagacaaagactcatacaagttgacacttctaaagctgtcagatctgttcaagagaaatttcaaggtatttgcaaattacaagaaaggtggtgttagtgatctggctgatgagattgctgctgcaggaccaaatttctgaaggctagggctatcacaccttcatgaatattgaatgttgtggctgcagcttggtgatataatcctgtaatggttctgagtaagtaaaaagcttctggatccgcgaacttccgtgttagtgccttaaaaaccaaactcatccaccatgcctccggtttatatagtaacatcttcaatagtgaagcattatcggtgggatcc

SEQ ID NO: 82048 - DNA, 118 bp, Oryza sativa
  Clone ID: PAT_MRT4530_81513C.1
gttcagggacggtagaattcaaaacagacagcattatcatcaggggcaacagactagtcttagaaaaccagattgatttgccacataacatagggttacatcaaaccatggcctacaa

SEQ ID NO: 82049 - DNA, 3458 bp, Oryza sativa
  Clone ID: PAT_MRT4530_81514C.1
atggcggcggcggcggacgcgcggcgcttcgcggtcgtgccgcagctagatattgcgcagatactgaaggaggctcaacaacgatggttgcgtcctgctgaaatttgcgaaatacttaaaaactacaaaagtttccgtattgcaccagaaccaccaaacaggcctcaaagtggctcgcttttcctatttgatcggaaagtattgagatactttaggaaggacggccataattggaggaagaaaaaggatggaaagactgtcaaagaagcacatgaaaggctgaaatctggaagtattgatgtgcttcactgctactatgcacatggagaagagaatgagaacttccaaaggaggacttactggatgttggaagaggattttatgcacattgttcttgtacattatcttgagaccaagggtgggaaatctcgtactaggggcaacaatgacatgcatcaagcagctgttatggatagtccattaagtcaattaccttcacaaactatagatggtgaaagctcacttagtggacagttctctgaatatgaagaggcagaatcaggaggaaccggataccactctttcactcagatgcagcagcagcaaaatggaattggacctgtgactgatgcttctatgttcagttctcgtgtttctgcttcatccataggtaattatcagggacaacatgctatgggacatacaacaaacttctattctagtagtcaacatgattcacctcttgttctcagtgatccaaaccttgaacttgcaaataatggacatgagtcattgtggaatggggttatgaaacctgatgaagggactgttcaaatgactcatctacaacctcctgttcatcctgagcaaggcatgttcaccacagaaggccaaggggttgaatatttgacattcgatgaagtatattctgatggactcagtctgaaggatataggtgctgcaggtgctgatgtagaaccattctggcagttttcttcaaacagctatctaacagaagccattgcatttcagctctctagtgctactgctgatatatctgcaacagagaacagcgtccaacaaaatgatggatctctaggggcagctattggcttcccatttttgaaaactcagtcatccaatctatctgacatcctgaaagacagctttaagaaatctgacagttttacaagatggatgagcaaagagcttcttgatgttgaggattcgcaaattcagtctagctcaggggcatactggaacactgaagaggcagatagtatcatcgaagcatcaagccgtgagccactggatcagttcaccgtggcccctatggttttgcaagaccagctattcagtatagttgatttttcgccaagctggacatatgcaggctcgaagaccaaggttttagttactggtagattcttacatgctaatgaagtcacggagagatgcaagtggtcatgcatgtttggagaagttgaaattcaagcggagatttcagcagatgggactcttcgatgttattctcccccgcataaaccaggcagagtccctttctatgtcacctgttccaacaggttagcctgtagtgaagtacgtgagtttgaatttcgaccaagtgactctcaatacatggatgctcctagcccgcttggtgcaaccaacaaagtttatttccagatacgtcttgacaacctattgtccctggggccagatgtgtaccaagctactataactaaccccagtaaggagatgatcgacttgagcaagaagattagttcactgttggcaaacaatgatgagtggtccaagttacttaaattggctgatgataatgagcctcttagccatgatcagcaggatcagtatgctgaaaacttaattaaggaaaaattgcatgtctggcttctccataaagtaggcgatggtggcaaaggacccagtgtgttagatgatgaggggctgggtgttcttcatcttgcagctgcccttggttatgattgggccataaggccaactgttactgctggtgtgaacataaagttcagagattttcatggatggactgcattacattgggctgcattttgtggcagagaacggactgtagtagcacttattgcactgggagcagctcctggagctttgacagatccacatcctaattaccctgctgaaagcacaccagcagaccttgcatctgctaacggacataagggcatctctggtttcctggcagagtcctctctgacaagtcatcttcaagccctcaatctgaaggaagccaatatgtctgaaatatctggtctacctggtattggagatgtaactgagagaaatgcatctcagcctgcaattggagattccttaggtgctgttcgaaatgccgctcaagctgctgctcgaatatatcaagttttcagggtgcaatccttccagaggaaacaagcggtccaatatgagggtgacaaaggtggcatatcggacgaacacgcactttcactcctgtctatgaagccatccaagtcaggccagcttgatcccctgcatgctgcagcatctcgtatacaaaataaatataggggatggaaggggagaaaggaatttcttctcttcagacaacgaattgtgaagatccaggctcatgtgcgaggccaccaggtgaggaagcattatcggaaaatagtttggtctgttgggatagtggagaaagttatattgcgctggaggcgaagaagggctgggttacgtggttttaggcctacagaaggtgcaatagagagcagcagtggtggcacaagtagcaatttggtccccacgcgtccggctggagatgattatgatttcttgcaagaaggacggaagcaaactgaagaaaggctgcagaaagctcttgccagagtgaagtccatggttcaatacccagaagcaagggatcagtaccaaaggattttgaatgttgtttcgaaaatgcaagagtctcagaccgtgcaagaaaagattttagacgaatcaaccgagatggatgaaggtgatttcatgagtgaattcaaggagctgtgggatgatgatacaccactccctggttatttctagtgttctagactaactggtggtgtctctgtaaatctcttctcttcagttctgctgaattgacacctgccgataacccaaactctcaacatagcatgaatagcatgatcttaaaatcttgaatgcttggatttggattcagttgtggtattcttgcttttatgttatagcgttatgtacagtagaatcttattttatcattgaaggagccatgtatatgcagtatgaaactaatgcagaaagttggtggttgtatcatttgaattcaaagctgcatgtgtgctaagcaatttcttgcattagagaaattcgatgtagtgtggtaacttttattgaaaggatgcagtgtggtaattgat

SEQ ID NO: 82050 - DNA, 162 bp, Oryza sativa
  Clone ID: PAT_MRT4530_81515C.1
atggcgcgcacacggcgaggacaagcgcggggaagggcggtcggcgaggacagcgcagtcatcggtgctcaggacgtcggcacggaggcggatgcggaggaggagcgtatcggcggagctagctcggtggaggactccgactccagcgacttgttgatgtga

SEQ ID NO: 82051 - DNA, 388 bp, Oryza sativa
  Clone ID: PAT_MRT4530_81516C.1
tcacgggatgttcttctggcgccccctcgactcgtacgaggcagcccccatggtgccgagggtggtctccgacgccttccccggaagatgtgggacacttcggaggcgactcgccgacgagcctcccggcgcttttgcaacgtggacactccaccacatcggtcggaaggttgagtgttctgcctatactggactgcgtcgaacatctggtctagctagctatggctacatataacctagctgtgcactgtatatgtggttgatggcttatactaaaaaatgaatgtaagtgattttccattattgctcttggaagcaataatgtgatggatgaaataaaatgatgaactccgatgttccatctctataaaaaaaaaaaaaaaaaaaa

SEQ ID NO: 82052 - DNA, 625 bp, Oryza sativa
  Clone ID: PAT_MRT4530_81517C.1
ggcgaaaatcagattttcgcttgtgggtgcgccacccgcatgcaaaaatcatgattttcatagatccttgggtgcgtgagggccaccctcccacacgcgaaaatcacatttgaccgcacggaaaaaccgctcttctagtactgtttagacattagacaacatgaaggtctttattgaggatggtacagttacaaaaacaaaagaaagataataaagtgtttaattattttgttctagttaggaatttatccctccatcctagtttaatcagctcctaagtaaaaggcacaatattcatcattcttaaattaatcctcttcagttaaggtgcttcgtcgcttcgtgttccatggattgctcatactttaaatgttgcatgtcattgtactaataaaaattactcttgattggttgcatgcaacacctttaatgatgcatatttactgtttgcacaaataaatgaaaatacacttgttagatgatggtcatttcgagaagacgtagaaaaacttaggggatgatcaaaatggcatgaatggagtagtgaataacggatgtataattggttctttccgtgcttgcaggaagaatgctcaacacacctgttcagttgttagagcaactc

SEQ ID NO: 82053 - DNA, 162 bp, Oryza sativa
  Clone ID: PAT_MRT4530_81518C.1
tccaagctcgcgggaaaagccaaagcagcagccaaagaaatccaccttttctagacaaaaattttagacgaaccgcgagactgatggccggcttccaaatccggcagccgggcgctttccctctcgattccccgctgcagatgagatgagatgagaggagag

SEQ ID NO: 82054 - DNA, 375 bp, Oryza sativa
  Clone ID: PAT_MRT4530_81519C.1
atggcggcagcgtcggcggcggaggaggaggctgcttcggcttcggcgacggcgcacggtgactgtgtcctggctgcagcgtgcagggtattcgacggtgagcccgtcgagctgtccgcgaaggtcctgctcctgcggttgcgctccgcggaggccatcgcagggatccatggcggctactggtgcacgaggatgggcgcggagttcatctcgccggaccactggccgttcgtacagctggtgcgcgccatggagcgccccgaggaggcgcatgaggacgacctccccgccgccggcgccggcgggcggctcgccgtgccgtccagcggccgcgcagcagaagacgccaccgcgaagcaagtgcagacagtgtag

SEQ ID NO: 82055 - DNA, 684 bp, Oryza sativa
  Clone ID: PAT_MRT4530_8151C.1
atggccggattcgcgacctcgcgccccgcatccctcgccctcgcggcgctgctcgcgttcctcaacctcttcgccttcctcctcgccgtcggcgccgagcgccgccggagcacggtacgcgccccacgcgctgtcctctctctctctgtctctcttccggtgtggtggtggtggtctctgaatagcggggcggcgcaggggaaggtggtgccggacgagtacgacctgcggtcctactgcctctacgacaccgacgcctccaccgtctacggcgtcgcggccttcttcgtgctcctcctcgcccaggcgctcgtcaccgccgccacccgctgcctctgcctcggccccgcgctctcctcccgcggctgcgccgtcgcctccttcgtcctctcatggataacatttctcaccgcagaagcctgccttattggtggatctgtgaggaatgcgtaccacaccaagtatcttggttactacatgaagcatgacttggtcacatgtgccacgcttcgcaagggagtctttgcagcagctgctgccttgatgcttataaatctcctggcatctctcatgtactactggagttactcgagagctgcaacaggtgggttcatcaagcaccagaacgaagttggcatgagcatgacggattacggccttgacaagggtggctctatgccctga

SEQ ID NO: 82056 - DNA, 1742 bp, Oryza sativa
  unsure (1)..(1742): unsure at all n locations
  Clone ID: PAT_MRT4530_81520C.1
gagaaaagcncgaggaaggggcncccatgtcggactcggagctgtcccagagcacggtggtgttcgggctccgcatgtgggtgctcgtcggcgtggccgtcggcgcggcgttcgtgctgttcctcgtgctcctctccgtgctatgcctcctcgcttctcgccgccgccggcggcggcgggggccgaacacctccccggtgcagcagctccccgtctccgccccgcccaagaacccccagaaggtcaaggcgcccaaggacatccaggaagtccccgcccaggccaccgccgccgccgcggcgaagacgccgctcgcccaggtgctccagatgcccgcgccgccgccgccgccgccgccgatggcggcggcggcaccgcctccggagaccgtccagatcgccaccggcaaggagcaccgcattacgtacccggagccgccgcaccgcagcggctcgtcgtcgcacggcagcggcgaggcgccgtcggtgccggaggtgtcccacctcgggtggggccactggtacacgctcaaggagctggaggcggcgaccgagatgttcgccgacgagaacgtgatcggcgagggcgggtacggcatcgtgtaccacggcgtgctcgagaacggcacccaggtcgccgtcaagaacttgctcaacaacaggtaccctaccactaatagtagtcaactccgttgcactgaaattactacagctacccaacttgattgtcttcgtgtgattgccacggggattgatcatccaagaacagttgatagggggcaagcagagaaggaattcaaggtcgaggtcgaagcgattgggcgtgtgcggcacaagaacttagtgcggcttctaggatactgcgcagagggcaatcagaggatgcttgtgtatgagtatgtcgacaacgggaacctagagcagtggctccatggggaagttggacctgtaagccctctttcgtgggattccagggtgaagattatactgggaacggcgaaagggttaatgtatttgcatgagggacttgagccgaaggtggttcaccgtgatgtcaagtcgagcaacatcctccttgataagcactggaatgctaagctctctgattttggtctagcaaagcttctaggctcagagcggagttatgtcactacacgagttatgggaactttcgggttagattcggcacactatgaacatacccctagaatcccagatgaatgttcatggttactaattttttccactctctacaggtatgttgctccagagtatgcagggactggaatgctaaacgaaacaagcgatgtatatagttttggaattcttatcatggaaataatatccggtcgagtaccggtggattataataggccaccaggagaggttaatttggttgattggctgaagacgatggtgagcacccggaattctgagggggtcgttgatccaaagatgcctcagaagcctacctctagagctctgaagaaggctttgctagtggcattgcggtgtgtagacccagatgctcgtaagaggccaaagatcggccatgtcattcacatgcttgaagttgatgatttcccgtatagagatgaacgacgaggcgctcgagctccggtgcaggcaagagtggctgacaaaccggtggccattgaagcaggcgaccgtgaatccgacagcagcggtaacaacagcgcgcgacaaaccgaacccttcagatggagaaacccagagtcctag

SEQ ID NO: 82057 - DNA, 1034 bp, Oryza sativa
  Clone ID: PAT_MRT4530_81521C.1
acacctctcccctgacttctcccccctcaaatccccaaatctaaccggagaaaaccccaatctctcgccgccgccgccgtgatgtctcgccggtacgacagccgcacgacgatcttctcgccggaggggcgtctctaccaggtggagtacgcgatggaggcgatcgggaacgccgggtcggccctcggcgtcctggcggccgacggcgtggtcctcgtcggcgagaagaaggtcacctccaagctcctccagacctcgcgctccgccgagaagatgtacaagatcgactcccacctcgcctgcgccgtcgccgggatcatgtccgacgccaacatcctcctcaacacggcgcgcctccacgcccagcgctacgccctctcctaccaggagcccatccccgtcgagcagctcgtccaatccctctgcgacaccaagcaggggtacacccagttcggcggcctccgccccttcggcgtctccttcctcttcgccggctgggacaagcaccatggcttccagctctacatgagcgatccctccggcaactacagcggctggaaggccgcggccgtcggggccaacagccaggcggcgcagtccatgctcaagcaggactaccgcgacggcctgacccgggaggaggccgtcgccctcgccctcaaggtcctgagcaagaccatggattcgaccagcttgaccgccgagaagctggagctcgccgaggtgttcctgcagcccggcaccggggaggtgcagtaccaggtgtgctcccctgaggcgatggggaagctgctcgccaaggccggcctctcgcagccggcgcctgaggcttgatgtgctggtttgctgtgccttgtgatgcctgctgctcttagatggttttatcattattatgcttcttgttatctaaaccaaactatctgataatcatgtgttttaattttatgttggacatgcttgggcggtcgatgctttatctatgacagtgaattcccttaaaaaaaaaaaaaaaaaaaaaaggccccggggtgggc

SEQ ID NO: 82058 - DNA, 460 bp, Oryza sativa
  Clone ID: PAT_MRT4530_81522C.1
caatttgatggactatccacaagttcgtgtatgctcataaagcccgagcttttgaccacgcagacaacgaattgcttaatcgtcgtattactttgggattggtgttaacagtgaaatttgcctgcttcttgactgctaataaaggtttcattggggtttcagccgataagttatctggatattgcatcggcttacaaggattacatccgattggtttctactggattatattgttgttatattatattatcatcagccgattgcctttttattggtatttacatcaagtgtcggaatatacattggacatatggtcgatagctcgaaatcctattgctatcggctggatcaaactgactggcacgcccgcatctcatcaacctttggacctgcattggagctaagcagatctcctaggccagtgtgtactttttgcatcaataattgggtaggcactacg

SEQ ID NO: 82059 - DNA, 1171 bp, Oryza sativa
  Clone ID: PAT_MRT4530_81523C.1
ttggaatatatgcatgtgacacatatgactttggtgattcattattgattatgcttcaattggctaagtgttttgatgtcatgatgattattgtttcaaaagccaattgaattagtattcatctagacatattagttgaatgttataatttttcatatgtctatagagaaggaattttggtccaataatttgatataccaagcatctagctattatgtgaaaaaaaaaattatatactaaaggccgatgcttgatttcaaaagttcttggcgaattcctttgattagatatttgaaagatcctacacttaagattgatcggaagattcggcggcaaatgttcaaatattatatcgccgaaaaatagatggagtattgttgaaatgcttagataatgatcaatctaaagttgctgggagagaagttcatgaagggatttgtggaattcatcaatcggcccgtaagataaattggttgcttaagagagtgggggggtgaatggccgacaataattgatgattgtttcaaatactatagagagagtgaagcttgttaacggatcggcaatgttcaattaacgcctaccgctgtattgaatcctatcattaaactatggccgttccgaggttgggctttggttttcattggtcaaatttatccttcgccatcaaaatggcattggttcgtgctagttgcaatggattacttcactaagtgggccgaggttgtgccgctcgagaatattacttatgcggaagtaattgactttattttgaagcatatcgttcatagattcggtattcctaaaacattaaaggagcttcttttatgtccaaggaagtgagaagttttgccgaatcttatgatattaagttggtgagttcttctctttactacgctcgggctaatggataagccgagtcgagtaacaaaacattgttgaaattgccgttttgccagttgaggtaaatcttggctctcttcggtatttcaagcaaggcgacttgtcggttgaagattacaagaccttgatgggaagtaatttttgaagatgtcatcgacgagcgtttgaagactttgagggagatgaagacacttcaagacggtgttttcagagatcaattaatgggaaatacttaaagaaatacttcccgagcatttggcaagatgct

SEQ ID NO: 82060 - DNA, 552 bp, Oryza sativa
  Clone ID: PAT_MRT4530_81524C.1
cccacgcgtccggttgaaacttgatgtcatatggaatctaaataaaatcacctatttaaatagcattcaaaaaaaaaaaaaaaaaaaaaaaaaaaaaaaaaaaaaaaaaaaaaaaaaaaaaaaaaaaaaaaaaaaaaaaaaaaaaaaaaaaaaaaaaaaaaaaaaaaaaaaaaaaaaaaaaaggggggggaaaagggggcgcccctttaaaagaaccaaagttaactaccccgggcttgcaacgaaaaagtttttttatggggcccccaaaataaaattaacggcccgggttttaaaaacgggggaacgggaaaaccccggggttacccaaattaaatcccttggaaaaaaatccccttttcccaagtggggtaaaaacaaaaaagcccccaaccaatcccctttccaaaaatttgcccaccttaaatggaaaagggaccccccccttaaggggccaataaagcgcgggggggggggggtttcccccaaggggaccctttaaatttgcaagccccttagcccccgtccttttagttttttcccttccttttc

SEQ ID NO: 82061 - DNA, 1513 bp, Oryza sativa
  Clone ID: PAT_MRT4530_81525C.1
gcacgagggccccccctttgtttttctgtggggtgtttttttgtgctggggggtgacatgagatggctgcctcgtgcgcgagccgtcctgccctcaggggcgtctaggctgtgtccggaggtttttgccggccggtgcaatactgcaagtcctctgctgcggtgccgaggccctgcactacctttctcagagccatcttcgggattgggtttgtgcggcctgctcggctactgtctgttggttaggaagtttcctctacactgactgtagtctttctacctttcttgccatcaacatataattggtggccatatgacataaatccccaaatggccatcagcatagctataatctttactccatccatcttgtcatgaaagaaaatcacagcaaaaacaggaatgatgggtagagctagggtgcttatcacatttgaaaacagcgatgacaccacaaagatcaatcccaccactccaactgatgctacctgccaagatatagccgtccacagcagtgtcattacatatgacagcttcccagactggaatgcatgcatctctccttgtaaagtcatccattcaccacttgcaaataacccaacaagagaagccaatgttgccacgagagctgtatatatctgcatgttcaacacaactgagaaggtctccctcttaataaccttctcaaatgtgacttgcatcagggagagaatgagcgagtatgtagctgatgcccctagtgtcaacaggaaacccaaaatgtacttcccatgtgatatactagtagttccctgagaatcttcatcaactccaaggagtgaagcagaaaacgtaaggaggactacggaattgaaaatcagaggggtgaatttttgagcattgaggaaatatgagaagacagcattgaaggcaagctgactagcacagatgagcgaatatgttgagaccggaagatatagtaggccataggaatacatcaagtcgtctgcagcaatgatgaggcccaggacaacatatatcagagtaattttggggatagaaattgtaggggcaggactactagtgactgtttgtgtagaagatgtctttgaatggaaaagaaatagggcaatgaacaaaatcggaaagccagcagtttggacgaatgtggacatccacttgctattgccgccttgattgtagtagaacctcccaagaagtgtagatgcggtctgaccggcaatgaggaagaacatgttaactcccaccatcagccaccattgccaactcttgacaggagagttctgtataggtacttcatgagttgacgaagttgcagctttggatgaatagtattgtccattggtgaaactatcaaatgaaagcgagttacttggaatctcagggaaatcatgcctactctgccactcgatgatgtcacgatagtctgaaaagttaatatggtctgcgatctgtatctggacctcctcatcccggttgctaccgccgtcgctgttgccgctgtcaccggccat

SEQ ID NO: 82062 - DNA, 1040 bp, Oryza sativa
  Clone ID: PAT_MRT4530_81526C.1
atgtggttaacacgctttcattatcatatcagtccagaaggcatcgaaacactctgttctcaccttgaagttcctcatacagatgtccggattctgatgttagcatggaaaatggggtgtgaaaagcaagggtattttactttggatgaatggcggtcaggattgaaagctctgcgagctgatactatcaacaaattgaagaaagcatttccagaactggtgcaagaagttacaaggccatcaaatttccaggatttctatccatatgcctttcgttactgcctgacagaggataagaagaagtgtatagaaataccagttgcttgtgagctgctgaatctagtattggggttgcagtttcgcccccaggttgacaaacttgttaactacctcaagcaccaaagtgaatacaaggtgataaacatggaccagtggatgggctttcttcgtttctgcaatgagataaacttcccatcacttgacaattatgattcagaccttgcttggcctcttattttggacaattttgttgaatggttacgagaaaataaaagttagctctcttttattcaagtgctggtgaagatgtggttcaaatgtagtattcaagaatgctttcagcaccttggggggcctctgaaggatgcaatttcagttttcatagttctgtggtggaggctggtttcagcatgatcattcaatcgccttcttatcttgtctttttctttccccatttttgaagctagaaaaaaaaaagtttgaagagatgtcatcttgaaattttgcttggatatgctctatatttgtgagactcaatgctattattgcattggatgggttttttttaggtatagcttcaaaagcatggaaattggctgagaaaggcatgtgtagctatgttgtttgctacctcttctcccttgcttagaagaacagacacccccatgtcctttatttgtgtacccccgttattttaggggatatttcattctgtataggtttattcatcagcagctaccgactaaaaaaaaaaaaaaaaa

SEQ ID NO: 82063 - DNA, 561 bp, Oryza sativa
  Clone ID: PAT_MRT4530_81527C.1
atgagacgacggaaggagtaccctggtacgagaaaacagtctggtgattggctggccatggtctgcgacgtacggcgtagcctgcacaaacgtctatatgtagttgccgccaaagagcagcgggtctgcacaagaaatggcggcgaagaaacttttttaagtagtacaccatttagcagtttaaaaaacgtgcgcgtgaaaaacgagggaaatgtgttgggaacgaggggttgcaacacagcaagtctgacccttaccaatattccgctcctgcgaaaatcacctactacttttcgatctctatcgaatcctggtgttcgccggcgacggcgaccgatgtcctccgccgcgtctcccggcggcgcgagggagcgcccctcctcgcgcaactccgccgtgtggcccgtgccctcctctccctcgcaactcgcatcgcgctgtctcgccgcctctgccgatgcgcacgattgtgcccatctggcaatggtccaccgtccagtccacgcacaacacaaactaattgcgatgtctgtgctcaaatcgaacaaaatttacaaccaa

SEQ ID NO: 82064 - DNA, 1245 bp, Oryza sativa
  Clone ID: PAT_MRT4530_81528C.1
atggacggcgagacgctctcctgggcggagccggagtgcggcgacgagttcgcgcttttcttcctcgacaaggccgcctgcaccaccgtctccggcgccatctccacggtgacggcctcgcggacaggctcgccgggctgcgcgtggcgaggcaggagggtgcccccgccggaggccggaggcgacgatgagcagcggctgcgcgacgacgggagcggcggcgacggcgaatgctggcggaggcggagcggcggctgcggcgacgcggctgttggcgacggcgacgacgacgacgacgggagcggcggcgcgacgacggcgacgacgaccatggagagtgtcagtgagagcttcgatggcatgaacaaggccagtgccatcgcccactgtttaatgatcagtgaaccaccctgttgctgttccacacatggcactgccagggttggtgtcgattaccacagcgacgacgacgggattgtttcgattttatttttttttgttcgtttttttttcttgcgggtggtgaaactgaccgcacgcggtcgacttaatacgaccgcacgggataatcgattttcccgtgcggtcgacttaacgtaaccgcacgaaaaaatcgattatcccgtgcgatcgtattaagtcgaccgcacatgataataggttatcctgtgcggttcagttacaccacccgcacgggaaaaaagcaaaaaaaaaatgaaatcgaaacaatcccgtcgtcgtcgctgtggtaatcgagaccaaccctggcagtgccatgtgtggaacagcaacagggtggttcactgatcattggacagtgggcgatggcactggccttgttcatgccattgaagctctcactgacactatccatggtcatcgtcgccgtggttgcgcagtcgccgtcgtcgcgccgctgctcccgtcgtcgtcgccgtcgacgcgcagccgccgctcgtcgtcgccgtcgccagcagccgcgtcgccgcagccgccgctccgcctccgccagcattcgtcgtcgccgccgctcccgtcgtcgcgcagccgctgctcatcgtcgcctccggcctccggcgggggcaccctcctgcctcgccacgcgcagctcggcgagcctgtccgcgaggccgtcaccgtggagatggcgccggagacggcggcgcaggcggcctcgtcaaggaagcagagcgcgaactcgtcgccgcactccggcaccgcccaggagagcgtctcgccgtccat

SEQ ID NO: 82065 - DNA, 342 bp, Oryza sativa
  Clone ID: PAT_MRT4530_81529C.1
atggagagaggggagatggaaagggaggaggaagaagatgagggggggcccatgccctccccggtgagctccaccggccgtcggtccccaacgggcactgccgccgtcttgggggcgatctccatgggcgtattcgcagatggggcgatgtggatgctgcacgctctcctccagcaggcagtggaaggcaaggccctcgaggaaaacatcagcgtgacactgccaccaaacattttgctttctgccaacctcgacatcatgcgcttcggcatgtaccggggtgccttcactggcgtccgccgccctgttcctagccgtccccatcccaatcccgccttctaa

SEQ ID NO: 82066 - DNA, 680 bp, Oryza sativa
  Clone ID: PAT_MRT4530_8152C.1
gactcttcaaaccgatcattgaataaataagggcaaaatcccacatttgtctcactctagaagtacactttctgccaatagctataacaaggttaaaaatcccatttggagaaaaataaaattttataaaatcgactgcagtatgtagcgagacaaaaaggagatgtttctctctagttccgcttttttcacgattttggcattcccatgcacttgacatgtgaaaaaagattatgctacctgcttccctttccttagtctatctagttctgactcggcctcttgcagtgctgattttagtagtgatactctctgttccacctcctccactgtacctcttttcagagcagccttgtatggtgtaaggaaatgccgtgaaaagttctgcagagcctggacgccgcatacctcttctggaagcaagggcaacttggttatgttgaagtcatcatataacatatggaactgatcaatatatttttgttgcatttttatccgtgcctttagaagtttagactcaacggcttcctcatcaaagagaacttgattgataataatattatgtgcatcaatctcgaactttgccaactcttgcaccaatctctccgtttcatacaatgaaaggaaattcaggaataccaacacatacgaaagttgcaaagtctggatctttaaattgc

SEQ ID NO: 82067 - DNA, 1086 bp, Oryza sativa
  Clone ID: PAT_MRT4530_81530C.1
gcagcaacaaatccggccataataaagggtcccttggtttccgcaaatttccaccggaaaattcttaaaaaaacctggaaatatagatagaaatcacgtggttcactgatcattggacagtgggcgatggcactggccttgttcatgccattgaagctctcactgacactatccatggtcatcgtcgccgtggttgcgcagtcgccgtcgtcgcgccgctgctcccgtcgtcgtcgccgtcgacgcgcagccgccgctcgtcgtcgccgtcgccagcagccgcgtcgccgcagccgccgctccgcctccgccagcattcgtcgtcgtcacgccgccgctcccgtcgtcgttgccgtcgtcgcgccgccgctcccgtcgtcgcgcagccgctgctcatcgtcgcctccggcctatgctgagcgcagcaagcatagctccggcgagcctgctgagcgcagcaagccggccggcgatgtcacctccggcgggggcaccctcctgcctcgccacgcgcagctcggcgagcctgtccgcgaggccgtcaccgtggagatggcgccggagacggcggcgcaggcggcctcgtcaaggaagcagagcgcgaactcgtcgccgcactccggcaccgcccaggagagcgtctcgccgtccatcctctcgaaggcgtcgccgagaagggaaggggaggggaggaaagaggaaagaggcagatgtttacaaagagagaggaaagaggcgtgtggcaaaatacaggattcatcactaagggtgatccctcctaggtctcaacggccagctcaggaatcataccagattgccaatccgttgaaggtgagcagcactatcctcaaacggcggcggcggccgggcggccacggaggcggcctcgcgcggccgggaagcgcggaggcgccctcacgcggcggccgggcggcgacggaggtggcctcgcgcgccctcacgcggtggccgggcggcgaggcacagcgcgcggcggcggtggggcagcgcgcggcgcggactgcggggccgcgcacggagcggcaccacgccggctctcctttcttttttttttataatttgtga

SEQ ID NO: 82068 - DNA, 331 bp, Oryza sativa
  unsure (1)..(331): unsure at all n locations
  Clone ID: PAT_MRT4530_81531C.1
ttgatagcgatcagatcactagacctgangagcaaagctatgactgacaaatgaccgatcacctagtgcagccatgatagagagaagatgtaactaccacggctgcaccaccgagctggctatccgtgaggacatgacagtgatcctctacgctcataccattatatacgactgctactcgatgatccacagcatacttgtgatgtgctactggtacacacctcactgtgagcctaagcgaagtaacaagatgaacagtggcgccaagatcttgatccaaccttatgtcatgcatgcgtgcactggtacagtatagatctggagtacacac

SEQ ID NO: 82069 - DNA, 1081 bp, Oryza sativa
  Clone ID: PAT_MRT4530_81532C.1
cagctactactgcacctgccgaccgcccagccggtaaaaaccatgctacaaaaggggcggcagcgtcgacaggagcagcacataatcacatatgcatgcggcaagctattttacacaacatgcacaacgctgcactgaactgcactccactgctctgctgcagaaaaccccaggacagaggagtactgctgcactactgcacagcagaggcatgcaggaggaggcagctcgccagtgccagttttgggctggccaagcaagccaaggcaacggcggcctttagttaccagaaatgggttaaaagtaacacaacacaaggatagatcgatcgatcgatcgatctcgatcatattcacagctaccagtaccacggagctaactacactagtacagtaacacttcacagttgttcacagtcgtcgggttgatcgatttatttcttcgtcgcggcctcatcgttggcagcggcgtgctgcagctcgtaggggccgaggcggttgtcgccgaggcgcgtcttgtaggcggccttcttgtactccccccaggtgaactccctgtacaggctctgctccccctcccgcatcacctgctccagcggcgcgatccgctgcgacgccgctggcccgccgaagtagatcaccgacagcctcgactcctccccctccggcgccaacaccctgtgcttcacgctcctgaacctcccattcgtcaacacctcttctcccagttcgtaacccctatagtttcgggttgtaaattggagggagtcgccgacgttgacgaagaaggaatcggggtcggggggcacggggacccagcgggcaggggaggagtagtctccgcggaggaggatctggaggcccgcggtgcagttggacctgagcacggagatgatctgtgggtccgtgtgctccccgaagcccgtcacgccgcactcgtcccggtcgcggcccggcgggaggaggcacggcgggtagtggttcacccgcagcatctcgtcgctgccctcgcaccccaccaccatccgccgcagcacgcacctcccctcctccgacgcccccagccccagcccctccgccat

SEQ ID NO: 82070 - DNA, 231 bp, Oryza sativa
  unsure (1)..(231): unsure at all n locations
  Clone ID: PAT_MRT4530_81533C.1
tttttttatttccggcatatttcccaacaaattcggttgcatacacttttgacagtttacaccacttgctacactcccccgaaaaatctcctncagcacggactcctcaccacctcctcctccacctgcaccgccgctggcgcggcggnggcggcggcggtggcggagcangcagnactntccccagatcccctcgaggacctgatccaggctggcggggaccccgaacgt

SEQ ID NO: 82071 - DNA, 476 bp, Oryza sativa
  Clone ID: PAT_MRT4530_81534C.1
ccgaaaacaaacattcctctgataattaagttatattatacttccaaagaatcatcgccatcatgagtgtggagatcctcgacggcaagacggtcctgagcttcgtggaggacgagggcgccttcaactcctccgtcgacggccgcttcgccgcgctcgacaccaaccgcgacggcctcctctcctacgccgagatggccaacgagctcatgagcctccgcgtgctggacaagcacttcggcgtcgacgaggccgccatgggcgccgacgagctcgtggagctgtaccacggcttgttcttgcggttcgaccgcgatggcagtggcgccgtcgacctggaggagttccgggcggagatgaaggaggtgttgctcgctgtcgccaatggcctcgggttcctgcccgtgcagatggtggtcgaggaaggcagctttctcaaggttgctgtcgacagagagctggccaaagcggcttga

SEQ ID NO: 82072 - DNA, 1650 bp, Oryza sativa
  Clone ID: PAT_MRT4530_81535C.1
atgaggataactacacgcccctcttcttcggcgtattcatggctgacaacgaaacggaagaacagcgccgagcctaagaagcggaccaagatcgcgcacgacaagaagctgaacgtcgccgactggaggaagtgcgacagcgacagaagcgagaacgaatacagcgtgagcaacaagatcgcgaacgggttgcaaaggaggctgaagatcgacggcaacgcgctttggaatccggcggtctttcgcaccccccagcagaacgcggttgcagcaatcactcttctcgacaccctcctcaaagaagacgcactcaaccaagctgatcatgtcgtcaacatcttgaaccagacgaagaccatgatcgctgcctcggttccagccaactccgcaagcacccgtaccccgactgtcggctttaagccgactggaatcgagaagtatgacggcaccactaatccagagtcttggctcaccgtctacggactcgcgatccacgcagcaggaggagacagcaaggccatggcaaactatctacttgtggccctagcggactccgcccgatcctgtctccacggactaccccgtggcacgatcggatcatgggtggaacttcgtgatcacttcatcgccaacttccagggcaccttcgaacgccccggaacacagtttggtctctacaacgtcgttcagaagtctggagaatcctttcgagattacatccggcgcttctccgaacaacgcaacaagatctccgacatcaccgacgacgtcatcatcgccgccttcaccaaaggcattcgccacgaggacctagtcggcaagttcggacgtaaacctcccaggacggttaagcagatgttcgaaaaagccaacgagtatgccaaagccgaagatgatatcaccgcgtccaaacagtcgggcaccacttggaagccaaagaaggacacgccgactgcaggggggagtggaagtaacaaccacaaggatcacaagtacggagatcaaggcacatcaaagaagagagatgatgaagacgatgccccgactggttttcaagatcatcgcaaagaacttaattacatcttcggcggacccctgacttatgagtccaagagaaaacagaagctaacagaacgggagatcaatgcggttcagcctaacacgccccaatatcggtggtcagagacagcaattaagttcgaccgctcggatcatcccgaccgagtggtccacccggggcggtaccccctggtactagacccagtggttcgcaatgtcaagctccgacggactctcatcgatggtggcagcgcactcaacatccttttcgctaagaccctggacgatatgcagattcctcgcacggaattaaagccgagtaatgcacccttccatggtgttatcccaggattgtcagctacaccactcggccagatcactcttccagtcaccttcggcactcgggagaattttcgcacaggaaatgtttgtttcgaagtcgctgatttcgagacagcatatcatgctatactcggacgaccggctctagccaagttcatggccatcccacactacacctacatgatgatgaagatgcctggtcatcgaaaatttcagaagcatcaagtgcactcgggccgttgttattga

SEQ ID NO: 82073 - DNA, 1791 bp, Oryza sativa
  Clone ID: PAT_MRT4530_81536C.1
atggcacggggctctgctccactcgatggtagcgtgctgccgctttcccgcatcgtgagcgagaggcaggccgggctgccgcgccgcttcctgccggaatctgccaccggccaggagatagttacgctgggcgagggacgcccggcgccacgctacccggggcggaccgttttcttcctccctttcgcaatggcagggctggttccgctattttcttctttcttcatggatgttctggagttttacgatctccagatggcgcacctcacccccaacgcggtaatgacattggccatcttcgcgcacttgtgcgagatgttcatcggggtgcgcccatcccttcggttgttccggtggttcttcaccgtacagccggtgtcgccgccgtcggtggttggtggctgctacttccagccgcgggggccggtgctgaaccgctacattccttgcgtcctccacaagaagtgggatgactggaagagcgactggttctacacccccctcgccgacgaagcgcgcctccgacttccgaaccagcccccggcgcaggcctccagctggcgggcgccggtagatctgggagatggctacgacgccgtcctcgaccgcctggcgggcctgcgatcccaggggctcacaggggccatggtgtacggcgactaccttcgtcgccggatcgcaccactccagcggcgcgcccggggtgcctgggagtacaccgggtccgaggactgtatgaggacccaccggggggtcaaatgggactgggtccctgaagacttcaaggtaatgatccaacgggtgctgaatctcagctccgcggaggcatcgctcatcccccaaggagtcctccccctctgcagcgatccagatcgcgccaccatcctgaccatcatgaaggcggtcggggcctcagaggagcaggctcctcgaggccatgatggcgcgggcgggagctgcaggggagaacaatctaccccaggagggggtcgtgcttccgggctccgtgacgggggctcggggggctgccgccctgccgacgcccgagggaagaggaagcaagagggttcctcctccccatctcctccccgagggggcggggcggcgcgtgtcagcagcaggcgcccggagggggccgcgccgacgccgcagcccgagggggagcggaagaagatacggcttcgcaagatgggggggacagaaccatcccggggaaaccttatttcccctccaagcgagatctcgtcgcgtccctcccgccattccaagtccggccagtctgaggccgaggatacggcgaccgcggaggcccggaggcgagaatctgaccggcgagaagccgcggatcgcctacgggaagccgaggaggccgcccgggaggccgtccgggctcgccaggctgaagaagccgcttgggaggaagccagacttcgccaagccgaggcggcgacaacttccgaggcagctcgcgacgaggccgcgggcacatcgcttgggcccactccctcgggcaacactcaggacaagccaggtccgggggacgtccccgagcccggcacgtccatcggcgggccgggccgcgcggcatcctcaccgaggcggctctcccccacgccttccgttgccccactgagcgcagagccccttttgcaggccttggccgtcgcaaacaccacggtgttggacgggttaagtgcccagatggaggccctgcaagcagagcgggcggagctcgacgccgcatgggcgcgcgtcgaagaggggcgacactcggtggaggccatggtggag

SEQ ID NO: 82074 - DNA, 140 bp, Oryza sativa
  Clone ID: PAT_MRT4530_81537C.1
aaaacaaacaagatctccaaatttttttcaagtaattcaaaacctcacacagattacacacatttttttgctccgagtaaactggccgggagcccgggaccgaaactaaatcgttgggctacaactacatgcaagttttt

SEQ ID NO: 82075 - DNA, 1551 bp, Oryza sativa
  Clone ID: PAT_MRT4530_81539C.1
gtcgactctagaggatccccgtgtgttgattacaccgacctcaacaagtcttgtcccaaaaatcccttcgggttacctcgcattgaccaggagtccgactgcttgaagacttcattcatcacacccttcggggcctactgctacatcaccatgccttttggattaaagaatgcaggagcaacttatcaacgcatgatccagagatgcttttcaactcagattggttgcaacgttgaagcttatgttgatgatgtagtcgtcaagaccaagcagaaggatgatttgattacggatctacaagagacctttgcgagcatccgcgctttcaagatgaaattaaaccctgaaaagtgcatcttcggagtaccgtcaaggaagctgcttggctttatgtggggacctgaagcacaaaaagcctttgaagacttcaagaaacttctcactactccaccagtcttagcttcgccacatccgcaagagccgctgttgttatacgtgtcggcaacttcccaggttgtaagcacggtcctggttatcgagcgtgaggaagaaggccatgttcaaaaagtccaacaaccaatctatttcgtcagcgaggttttggccgactccaagtcaagatatcctcaggttcaaaagttgctatgtggtgttttaattactgttaggaaattatctcactattttcaaggtcactcggttacggtggttacatcgtttccacttggggatatacttcacaatcgcgaagcaaatgggcggattgcaaagtgggccttagagttgatgtctttggatctatccttcaagccgcgaacttcgatcaagttccaagctttagctgacttcgtcgccgagtggaccgtatgccaagaagacacgtctacggagaagatggagtactggacaatgcattttgacgagtcaaagaggctatcaggcactgtagcgggggttgttctaatttccccgactggagagagactaagctacgtattgtggatacatttttctgcgtctcacaacgtggcggaatatgaggcgcttcttcatggattaaggattgcgatttctgtaggaattcggcgtcttatagttcgtggagattctcagttggttgttaatcaagtcatgaaagagtggtcctgccttgatgataacatgaccgcctatcgtcaggaggtatgcaagttagaagataaattcaatggccttgagctaacccacgtccttcgacataataatgaggcagccgacagactggctaattttggtacaaaacgaaaagcagcttcttccgacgtgtttgttgaacatctttatgagccaaccgtactaaggaaagaaataatcgagaccacggacactcaagaagtaagcacgattgaagccgactggagagagcccctcatcagatttttggctaaacaagagctccactactggagagggagaagctccctggtgctaaaaacacccggcaacaatggaaaaacacccggtaatcactgttgccgtgtacctcactccggaatcattacccgggagtga

SEQ ID NO: 82076 - DNA, 2706 bp, Oryza sativa
  Clone ID: PAT_MRT4530_8153C.1
atggcaactctgctgctcgtgggttccatcctgctacggacggtcatggcaactctgctcgtgggttccatcctagttttggcggcgggagtcagcaaggtggtaggcaccgaggttgagaaaggtgggcatggttggaacaatgggttcgggatgaatgcaggtccgaacgtcggcaatttcagtggtggtggtcagattggtttcaatcctaacttagggtttcagccacagtttggtgcttccggtagccatggtggtaatccagttggcccttttctgccatcaggtgagcctgtgaccaggggttcatctgtagttggtggcgcattccctgtgggtggcggtgctgctttggctggtgtgtctgtccctgtgccggctggtgctggttgtggtgtacatgcgcaagctggtgctgcatatcctgtgggtggcggcggaggttctggtgctgttcttggtggagatgcggtgcctggtggagctgctttttcagttgctgttgcttccttgccgaaggtcgggggagttcagcctagtggctcagctaatgccgcatcaggtggtgcaatcgctcaggtaactggtggttctggtgatagtactgtcaagggtgtagctactttgggtgatggtaagggctctactgctgttgcttttggtgcagaaggtagtgtactctcccagatgccaggtgatttgtataacagaggaaaagctaaggttgataacaaagggttagatggtcttggttttttccatattccactttcagctggacagaggattaggcatgatccaaaggctgttttggttaaagtgactaacggtcagatgacaataaatgctgtcatatctgagctacatagattaatccctgctaaattgagtcgcatggtggagtggggcaaggtacacactaaggttagtgaggctcagatggagattgtagaatggggtgtaggaaatgaggtgaaatatgtggttccgaaggtgtgggtacagtgcaaaggccttccttctgaattgagggagtttttaattatttgggctgttggttccattcttggcattactaaagccgtggatatggttttcactagaaggtatgacatcgctcgtctgcaggttttggtccttgacccatctttgattccggatgtagtggatgtggttattggggatcacctgtatgagctaacctttagagttgaacctgaaaatgggcctgaggagcctatgcccatggagatggaaaatttggaggatggagatgtggagaagaatgatgaggggaatataaatcagaaagttgggaaggaagctggtcttgatgattcaggaaacggttctaagttgggttctggtgttcagtttagtgagaggggttgcccacctgctccttcctcacagctaaatctgatacatgaatatgatggcttgactgcttctgatgaagattttgatggctttgttgaagatactttaatggttgacaaggttcagactcagcaaaatttggtggcaaaactctctgctatccctgaggcagtactctctccatcaaggaagagtaagagaagagcaagtgacagtgatcagcttgttcttgaaagggcggagaagttgaaggctgataagaacttggagaatctgcatactaaagctcagaggaaaaaaaataatgacaactttgatgatagatggccctttctttttaatgctattattgatggtctgagccttagggagttgcagatgtcgggtaggaattttacttgggcaaataacttagcaaatccgacctatgagaaactagataggattttgatgtccactgagtgggaacataagtttcctctttcatcagtggttgctcttaatagagatatttcggatcatactcctttacttttaaatacaaactcatcttctgtgggtaatacacaccatagttttaaatttgaacttggttggttgttacgtgatggctttgttgacatggtgaaggaggtctggtctagtgtcaatgagggtaatactcctatggagcgttggcaggagaagattcgtcgtttaagacaacatttgagaggttgggctaaacatacaagtggcctttttggtcctcctgatgattctgatctccaatttaatgaaaatcattttgtttacattcctcaagtttctcaattggagaatgaagctttaatacaggactttactgaaaaggaaattaaagatgcaatttttcaaatggaacataataaagctccgggtcctgatggatttcctgctgagttttatcaggttttttgggatgtcattaaagatgatttattaaaccttttcagagatttccataatggtacattgcctttattctcccttaactttggtactattattctcttgcctaagtgtgcggaggctatgagaattcaacaatatagacctatttgcttacttaatgttagttttaagatctttaccaaagttgctacgaataggataatgagcgttgctcaaaagattgactttgaaaaagcctatgataaggttaaatggtcttttgttcaacaaacactaaggatgaagggcttccctcctaaatggtgcaaatggatagcttcttttattcaagggggtcatgttggtattaaagtaaatgatcaaactgggctaaggatgttggttcgttga

SEQ ID NO: 82077 - DNA, 1436 bp, Oryza sativa
  Clone ID: PAT_MRT4530_81541C.1
aggctcggaggcgggaatctgaccggcgagaagccgcggatcgcctacgggaagccgaggaggccgcccaggtggccgtccgagctcgccaagctgaagaagccgctcgggaggaggccagacttcgccaggccgaggcgacgacgacttccgaagcagctcgcgacgaggccgcgggcgcatcacttgggctcactccctcgtgcgacgctcaggacaaaccaggtccgggggacatccccgagtccggcacgtccatcggcgggccaagccgcgcggcatcctcttcgaggcggctcttccccacgccttccgttgctccactgagcgcagaacctcttctgcaggccttggccgtcgctaacaccacggtgttggacgggttaagtgcccagatggaggccttgcaagcagagcgggtggagctcgacgccgcatgggcacgtgtcgaagaggggcgtcgctcggtggaggccatggtggaggtgggccgcaaggcacaccgccggcacgtctcagagctcgaagcccgtcggaaggtgctgggggagatcgccaaggaggtggaggaggagcggggggctgccctcatcgccaccactgtgatgaatgaggcgcaggacaccctccgccttcaatacgggagctgggaggcggagctagggaaaaagctcgacgccgcccggggggtccttgacgctgccgctgcccgagaacggcgggcggcggagaccgaggtggcatcccggcggcgcgaagaagcccttgaggcccgtgccatggcgctggaagagcgtgcctgcgccgtggagagggacctggcggatcgcgaggccgccgttgctattcgggaggtcacactggcggtgcacgaagccgcctgtgccgaagaagagtccgcgctccgcctccgcgaggacgcgctcaccgagcgggagcgagctctcgaggaggccgaggccgcggcgcaacggctggcggacagcctgtcctccgcgaggctgcgcaagaggaacaagcgcgccgtaatctggaagggcgcgctagactcgtccgccggggaggttgaggccctccgcttggcaggcgagcgcctctcggagatagccgggactctccaacggctccccgaggagctcgagaggacgattaagtcatcctcgagggacctcgcccgaggagcggtggagctcgtactggcgagttaccaagccagggatcccgacttctccccatggacggcgctggacgagttccctcccgggaccgaggatggcgcgcgcgcgcaggtccgggacgccgccgaccatatcgtccacagcttcgagggttcggcccctcggctcgcgttcgccctcaactccgacgaggaggacgatgacggcggagtgggcgacagtggcgacgaggctggcgacccgggtgcatcggagtaa

SEQ ID NO: 82078 - DNA, 318 bp, Oryza sativa
  Clone ID: PAT_MRT4530_81542C.1
atgtctatgaccatccgtgtttattctgctagtgctatatataggatcgtgccgctcgccgccgacctccgcggcgccgacagcgtggctcagctccacagcgcggcgaaacataacgcggcatgccccggtcaggagccgtcgaggatcatgcagctgtcggagagaaccttcgttgccgtcgccggcaagacccactgcacgtcgccggtgtgcgcgtcggcgaccatctgcaagcccatctgccagccgcgtcgtcgaccaagccggcgcccaagccgcaccctggccagccgccgcacccaacgccgatgctga

SEQ ID NO: 82079 - DNA, 1854 bp, Oryza sativa
  Clone ID: PAT_MRT4530_81544C.1
atggcgtcaccacagagatgcctctcctcctcccccgtggtcggcctccgcgatggagcggcgctcgcatgccttctccaccttgaagttgacacccatcttcttcgacattcctctgatgatgcaaaaagcgagatttcgtcgcgcccccctcgccattccaagtccggccggtctgaggccgaggagacagcgaccgcggaggcccggaggcgggaagctgtccggcgagaagccgcggaccgcctccgggaagctgaagaggctgcccaggaagccgtccgggttcgccaggctgaggaggccgctcgggaggaggccagactccgccgggccgggaagtcagcccgggaggcagaggcgacgcgcgcacgccaggcggcctgccaagcccccgacccgactccgcccgaggcgacgacgacttccgaggccaccctcgacgaggccgcgggcgcgccgctcggacccgacccttcgggcgacgccctggccgccgcgaacacgacggtgctggacgggttaggtgcccagatggaggtcctgcaggcagagcgggcggagctcgacgcggcgtgggcgcgcgtcgaagaggggcggcgctcggtggaggccatggtggaggcgggccgcaaggcataccgccggcacgcctcagagctcgaggcccgtcggagggagctggcggagatcgccagggaggtggaggaggagcgggagactgccctcatcgccaccgccatgctcaacgaggcgcgggacgatctccgcctccaatacgggagccgggcggcggagctagagaagaaactcgacgccgcccgaggagtccttgacgccgccactgcacgggaacggcgggcgacggagaacgaggcggcgtcccggcggcgcgaagaggcccttaaggctagcgccacggcgctggaagagcgcgcccgcgcgagggagagggacctggcggaccgcgagaccgccgtcgctatccgggaggcaacgctggcggcgcacgaggccgcctgcgccgaagaggagtccgcactccgcctccgcgaggacgcgctcaccgagcgggagcgagctctcgaggaggccgaggccgcggcgcagcggctggcggacagcctgtccctccgcgaggcagcgcgggaggagcaggcgcgccgtaatctggaaggcgcccgcgccgagagggccgcactggatcagcgggccgctgagctcgaggcgcgggcgaaggagctggacgcgagggcgcgcaccggcggggcgaccgcgggcgacggcgatctagccgcccgcctcgcagctgccgaacacaccatcgccgatctgcaaggcgcgctggactcgtccgccggggaggtcgaggccctccgcttggcgggcgaggtagggcccggcatgcttcgggacgccgtctcccgtctagaccgcgccgggcggcaagcgggcctctggggcgagcggaccgcgaagtacgccgccaaccaggggggcctcgcccagcgcctctcagagatggccgggactctccagcggctccccgaggagctcgaggagacgatcaagtcatcctcgagagacctcgcccagggggcagtggagcttgtactggcaagctaccaggctagggacccggacttctccccgtgggcagcgctggacgagttccctcccggaaccgaggacgacgcgcgcgcgcaggtccgggacgccgccgaccacatcgtccacagcttcgagggtacggcccctcggctcgcgttcgccctcgactccgacgaggagggcggcgacggtggtgtggacgacagcgaccacgaggccggcgacccgggagcctcgaagtga

SEQ ID NO: 82080 - DNA, 497 bp, Oryza sativa
  Clone ID: PAT_MRT4530_81545C.1
cccacgcgtccggtttattatagctagtgaacactgggaaagaccgtgcgaaagtgagcctgttaatgacatgggcgaattctatcggaggtttttctcatcactctggaggccattttaatgagcccttcattgcggaggatggagtttcaggagttcttctgcatcacaaaacagcaaaggataatcctccggttacttttgctattgctgcctgtgaaactcagaatgtgaatgtgacagtcttgcctgtatttggcctctctggagaaggccatgattcagccaagcaaatgtgggatagaatgaaacagaacggccactttgaccgtgaaaatttcgaagctggtaccagtatgccttcatcttcaggggagacactttgtgcagctgtctcagcatcaacctgggtagagccacatggtagatgtactggtgtatttggtttggcttggtcctctcctaaaataaagtttcagaaaggctgcacatacaac

SEQ ID NO: 82081 - DNA, 3126 bp, Oryza sativa
  Clone ID: PAT_MRT4530_81546C.1
atggcacggggctccgctctgctcgatggtagcgttctaccgccttcccgcatcgtgagcgagaggcacgccgggctgccgcgccgcttcatgccggaatccgccaccggtcgggagatagtgatgctgggcgggggacgcccggcaccagactacccggggcggtccgtcttcttcctccccttcgcaatggcggggctggttccgccattttcttgcttctttatggacgttctggagttctacgatctccagatggcgcacctcacccccaatgcggtgatgacattggccatcttcgcgcacctgtgcgagatgttcattggggtgcgcccatctcttcggctgttccggtggttcttcaccgtgcagtcggtgtcgccaccgtcggtggttggtggttgctacttccagccgcgggggccggtgctgaaccgctacatcccctgcgccctccgcaagaagtgggacgactggaagagcgactggttctacacccccctcgccaacgaagcgcgcctccgacttccaagccagcccccggcgcaggtctccagctggcgggcgccggtagatctgggggatgactatgacgccgtcctcgaccgcctggcgggcctgcgctcccaggggctcacaggggccatggtgtacggcgactacctccgtcgccggattgcgccgctccagcggcgcgcccggagcgcttgggagtacactgggtccgaagactacatgcggacccaccagggagccagatgggattgggctcccgaggacttcaagatcgtggtccaaagggtgctgaatctcagctccgtggaggcgtctcttattcctcgaggaatcctccccctctgcagcgatcccgaccgcgcctctattctgaccattatgataggggtcggggcctcagaggaggaaactcctaagggccacgacggcgcgggcgagagccgccggggggatcaatctaccccaggagggggtcgtgcttctgggcctcgcgtcgggggctcggggagcagccgccctgccgacgcccaggggaagaggaagctgggaggaacacctcccccatctcctccccgagggggcggggcggcgcgtgccagcaatctgcgcccggagggggccgcgccgtcatcgcaacccgagggggagcgcaagaagaagcggctccgcaagatgggggagacggaaccatcccggggaaacctgatttcccctccaaggtggtcatttaaccgaccccctcgcagcgatgtcccgtcgcgttcctcccgccaccccaagtccggccagtccgaggccgaagatccggcggccgcagaggaacggaggcgagaaaatgaccggcgagaggccgcagatcgccttcgggaagctgaagaggccgcccgggaggccgctcgggttcgtcaagcggaggaaaccgctcgggaggaggccgcccgggctcgccaggctgaggcgatggcgtcttccgaggcagctcacgacaaagctgctggcgtgtcgcttgggcccactccctcgggcgacgctcaagcgacggcctccggggcggctcgtgacgaggccgcgggcgcatcgcctgggcccacttctccgggcgacgcccaggaccaaacgggtccgggggacatccccgagcccagcgcatcctccggcgggccgagccgcgtcgcgttctctccaaggcggctcttctcctcgtcttctgtcgccccgctgagcgccgagccccttctgcaggccttggccgccgcaaacactgcggtgctagatgggttcagcgcccaagtggaggccctgcgagcggaacgagcggagctcgaggccgcatgggcgcgtgtcgaggagggacggcgctcggtggacgtcatggtggaggtgggccgtaaggctcaccgccgtcatgtctcggagcttgaagcccgcaaagcggtgctggcggagatcgcccgagaggtggaggaggagcgggaggccgccctcatcgccaccaccgcgatggtcgaggcgcaggacaccctccgccttcaacacgcaaactgggaggcggagctaaagaaaaagctcgacgctgcccaaggggtccttgacaccgccgctgcccgagagcggcgggcaacggagactgaagcggcatcccggcggcgcgaggaggtccttgaggcccgtgccatggcactggaagaacacgccggcgccgtggagaggggcttggcggaccgcgaggccgccgtcgccatccgggaggcaacgctagcggtgcatgaggccgcctgcgccgaagaggagtccgcgctccgcctccgcgaggacgcactcgctgagcgggagcgagctctcgaggaggccgaggccgcggcgcaacggctggcggacagcctgtccctccgcgaggcagcgcaagaggagcaggcgcgccgcaatctggaatgcgtccgcgccgagagagccgcactggagcagcgggctgctgacctcgaggcgcgggaaaaagagctggccgcaagggcgcccatcggtagggcggctgcgggcgaaagcgacttagccgcccgcctcgcagctgccgaacacaccgtcgccgacatgcagcgcgccctcgactcatccgccggggaggccgaggccctccgcttggcgggcgagatagggcccggcactctttgggatgcggtctcccgcctggatcgcgccggtcgacaagcgggcctctggaaaggccaaacaatgctgcactccaccaatctggaaggcctcgctccgcgcctcacgaagatggcctgggctctccaacaactccccgaggagctcgagaagaccatcaagtcatcctcgagggacctcgcccaaggagcggtcgaactcgtattagcgagttaccaggccagggaccccaacttctctccatggatggcgttggatgagttccctcccgggaccgaggacgacgcgcgcgcgcgggtccgggacgccgccgaccacatcgtcaacagcttcgagggctcggcccctcggctcgcgttcgcccccaactccgacgaggagggcgacgccagcggtgcagacgacgatggcgacgaggccggcgacccgggcgcattggaatga

SEQ ID NO: 82082 - DNA, 153 bp, Oryza sativa
  Clone ID: PAT_MRT4530_81547C.1
atatcagatattctctagatacatatcttgggtgtgtatagtcaaagcttagtttaacatatcctaacccaactataatcgttctacttttactataaatctcgcctaagaggaatttaagatcttttattctttattcctttatgagcatta

SEQ ID NO: 82083 - DNA, 942 bp, Oryza sativa
  Clone ID: PAT_MRT4530_81548C.1
atgcaggcggtcggggcgtcggaggagcgggctcctggaggccacgatggcgcgggcgggagccgcaggggggaacaatctaccccgggagggggtcgtgcttctgggccccgcgacgggggcccggggagcggccgccccgccgacgcccgggggaaaagaaagcaggaaggaaccccttccccatctcctccccgagggggcggggcggcgcgtgccagcagcaggcgcccggagggtgccgtgccgtcgtcgcagcccgagggggagcgaaagaagaagcggctccgcaagatgggggagaccgaaccatgccggggaaaccttatctcccccccaaggtggtcgtttagccgacctcctcgcagcgagattccatcacgcccccccccccgccattccaagtccggccagtccgaggccgtggagacggcgaccgcggaggcccgaaggcgggaggctgaacggcgagaagccgcagaccgcctccgagaagccgaggaagctgcccaggaggccgtccgggttcgccgggctgaggaagccgctcgggagaaagccaaactccgccgggccgaggattccgtccgggagccggagaaggcgcgcgcacgccaagcggcctgccaagcccccgacccgactccgcccgaggcgaccacgacttccgaggccacccacgacgaggccgcgggcgcactgctcgggcccgacccctcgggcgacgcacgggacgtgccagcttcgggggacgcccccgagtccggcacgtcgattggcgggccgtgccacgcggcgcccgcaccgaggcggctctcccctatgccttccgctgccccactgaacgcggagcccctcctgcaggccttagccgccgcaaacaccacggtgctggacgggctaggtgcccagatggaggtcctgcaggcagagtggacatag

SEQ ID NO: 82084 - DNA, 3315 bp, Oryza sativa
  Clone ID: PAT_MRT4530_81549C.1
atgggttccgtctccgacattgacgacttcgccttccctcccgggcaggcgttttggttcggcagcctcgacttcatcaccaacgacttcggcaagatctctctcctcgactcggattcgaaccagtcaggaaagaaccaggtctcagccccgttcggtattccgaactcggccgagatctactccaagcttatcttgattgagtcggcttcaaaccactcggacgagatcccatctactccaacaccaccagatcaagatgatgcggcctacccgccaatcctgatgaaactccccgacgatttggctaccgtcttcactacaagggcgtcttctccccgtaggcctaggcggaagtcggcttcaacaccgatcctgcctagctccagggaagtcggcgtcatactccagccactcggcacggtttcgacggatcaattggaaggctacttcagctcccccggcatcgactcgcgactaacagagatcgtggagtatgacgaattcggctaccgctacgacaaccacgacctcgacgacttcgacgaaagcttggaagacaattacacccctctctacttcggcgtcttcatggccgacaacgagatggaagaacaacgccaagcccgagaagcagaagcacgacgcgtacagcaggaggccgagcgacgccgactggaagaggagcgccaagcacaagagcaagaacggctgcggcgagagcaacaagaacgcgagcgggctgcaaaggaggccgaggaccgacgacaaagagccttggacgcagggcgacaagtgcgagatctcatcgggcagcaagatgttgaggggacagcggttttccgcaccccccaacagaacgctgtcgctgcgatcaccctcctcaaggaagacgcactcaaccaagctgaccacgtcgtcaacatcttgaaccagaccaagaccatgatcgccgcttcggtcccggttaactccgaaagcatccgcacgccgactggcagccgggttccccatctccgatctcatgattatcaccagccaagcctcagcatcgccggcgcaggatccaatcgcaggagcaggggccacgacgagcgatctgttcacttgccccctgagcgacacagggtgcgccgagttgaacggcctcgctccccacctcgccggcatcccgtcgatcttcgcgatacgatcaaccagcgccgtgcagcacgaggttaccgccattcaccagatcactacgacgacgacatggatggagtagcttcctttactaacgacctgcgtcgagtggattggccagccggcttcaagccgactggaatcgagaagtatgacggcaccaccaatccagagtcttggcttaccgtctacggtctcgcaatccgtgcagcaggaggagacagcaaggccatggcaaactacttacctgtggccctagcggattttgcccgatcctggctccacggattaccccgtggcacgattggatcatgggcggaacttcgcgaccatttcattgccaacttccagggcacctttgaacgccccggcacacagtttgatctctacaacgtcattcagaagtctagagaatcccttcgagattacatccgacgcttctctaaacagcgcaacaagatctccgacatcaccgacgatgtcatcatcgccgccttcaccaaaggaatttgccacgatgaactagtcggtaagttcgggcgcaaacctcccaagacagtcaaacaaatgtttgaaaaagccaatgagtatgccaaagccaaagacgccattatcgcatctaagcagtcgggtcctacctggaagccaaagaaagatacgccgactacgggagggggtggaagtaacaatcacaaggaccgcaagcgtaagcccgaggaacttgtcgcaactactacacactcctcccgacaacgttcgcgcgtcaacacttttgacaagatcatgaactcccaatgtccgcatcatcccaactcgaaccacgcggctaaagattgcttcgtctacaagcagtttgcagagcaatatgccaaaaatacacggaagacctctaatggagaacaaagcacgtcgaaaaagaaggatgatgatgatgatgccccgacaggttttcaagatcactgtaaggagctcaaccacatcttcggtggccctctggcttacgagtccaaaagaaagcaaaagctgaccgaacgggagatcaacgctgtccagcccgatacgccccaatatcttcggtgcgcactcaatatcctcttcgccaagaccctggacgacatgcagatccctcgcaccgagttaaagccgagtaatgcgctctttcacggagtcatcccagggctatctgcaacaccactcggccagatcattctcccggtcacctttggcactcgggaaaactttcacacagagaacgtctacttcaaagtcgctgatttcgggacagcgtatcacgccatactcggacgcccggcgttagccaagtttatggccgtccctcactacacctacatgatgatgaagatgcctggtcctcgaggagttatatccctacgaagtgacatcaagcaagccgtcacatgtgacaaggaaagttgcgagatggcccaaacccgagagatcgcgatcgctcgagaagacatccgactggctgcaaccacggcaagcgaaggagaggtgcctactaccaagatctcaaagagtggagaaagcgaagccaagactaagaaaatccccctagatccttctgatcctactaaaactgctgtaataggcgccgagttagattatatctttgcgtggaaaccatccgatatgcctggtattcctagagaggtgattgagtactctttacatgttaaggaagacgctaaacctatcaaacaacgactccgccgctttgcacaagacaggaaggacgcaatcaaggaggaattggccaagcttttagcagcgggcttcatcaaagaagtccttcatcccgactggctggctaacccagtcctagttcggaagaagaccgggcaatggcgcatgtgtgtcgattacactgatctcaacaaatcttgccccaaagatcctttcgagttgcctcgcattgaccaagtagttgactcgaccgccggctgcgagcagctcagtttcttggattgctactcggggtatcatcagatccgattgaaggaatccgactgcttgaagacttcgttcattacgcccttcggggcctactgctacatcaccatgcctttcggattaaagaacgtaggagcaacttatcaacgcatgatttag

SEQ ID NO: 82085 - DNA, 788 bp, Oryza sativa
  Clone ID: PAT_MRT4530_8154C.1
atggatgtcggtagcgctgcctgtagccgctcgctactcggcccatgcgcggcgcctgctgcgtgcggccccgctgggcgcggccccgccggccgcctgccaagtgtggtcccgctgggcacgggaagggaggagggggaggaggcggcccttgctgggcgtcggatgggaagggaggagggggaggagagggccgggatgggaggaggaaggggaggaggaggaggagagggagatggatctgaggagagatcagatgggaagggagggggaaggagagtgccgggatgggaggaggaagaggagagggagatggatctgaggagtggtggggccgcgcgctggggcgaggaggtgcgcggcgacatggggatggacagtgggctggagaagacgcagcaccggcatctgccagcggtggaaggcaccgccgcacggaggctgcacgccgtggaggccgagctggggcggtcggcgccggcgcgggaaatcgaggcggtggcacgagatgaggaggaggcagcctcgccgtgtggctgcgccgccaccaacaggaacctcaccatggcgcgctccgtcgcccgcgcggccacgccgtcggcaccaccgtcgtcgccaacgaagacgacgcaggtctgcgcacccgccgtggcctcgtcggacgcatcaccttccccaaagacggcctcgtcgtcgatgatggtgtcggcagtggaggacgccgctgcgccgaggctgaacgttacggggcccgagctggggtgatcggcgccgcgtggccacgccat

SEQ ID NO: 82086 - DNA, 339 bp, Oryza sativa
  Clone ID: PAT_MRT4530_81550C.1
gcacgaggcaggcagaaagcgatgatacggagagatactggcagatgtgttgttcatagttttgggtggagatgagcttgttgctgctgtacatggttaacactactaaactgtactccctccatttcacaatttaagtcattctagcatttctcacattcatattgaagttaatgaatctagacatatatatctatctagattcattaacatcgggtatgaatgtggaaaatgctaaaatgacttacattgtgaaatggaggaagtatgtagttagcctttatccaggattatattgtatataccttactgcagtctatagaagaggccaaaatgttt

SEQ ID NO: 82087 - DNA, 510 bp, Oryza sativa
  Clone ID: PAT_MRT4530_81551C.1
atgacaaattataatacgactagtccagggggcacacatgtagttacaccagtggctaatattccattacctagtaataatttaattgtgtctgatgctgatgatgttgtttctggagaaaatggtacaacacatgagcaggaaatggagaataccatgcatggggacgtgcatggcaacatcgtgcatggggaggcggcactggaatcgacgctacaggacagcagcactgtgcctgaccaggacgctgacagcagtggcgcagcctctgctgcagcctctggcgctggaggggacagtgtcagtctgggagatgccgaagcaaatggcgcagcagcaagtggcgaagctagcagtgcagattcccagccggtgcagcctgatgtgacagctacagcagcccgtgcaccgagaccacacactcgcctgctgagtggtattagaaaagaaaagatatatattgatcgaactgttaaatatggttgttttaattctacttgtcgaaactag

SEQ ID NO: 82088 - DNA, 2796 bp, Oryza sativa
  Clone ID: PAT_MRT4530_81552C.1
atggcacggggctccgcaccgctcgacggtagcgtgctgccgccttcccgcatcgtgagcgagaggcaggccgggctgccgcgccgattcatgccggcatctgccgccggccgggaggtggtcgagctgggcgagggacgcccggtaccacactacccggggcggtccgtcttcttcctccctttcgcaatggcagggctggtcccgccattctcttctttcttcatggatgttctggagttttatgacctccagatggcacaccttacccccaacgcgataatgacgttggccatcttcgcgcacctgtgcgagatgtttatcggggtgcgcccatctcttcggctgtttcggtggttcttcaccgtacagccagtgtcgccgccgtcggtagttggtggctgctacttccagccgcgggggccggcgctgagccgctacattccctgcgtcctccgcaagaagtgggacgactggaagagtgactggttctacacccccctcgccgacgaagcgcgcctccaacttccgagccagcccccagcgcaggtctccagctggcgggcgccggtagatctgggagatggctacgacgccgttcttgaccgcctggcgggtctgcgatcccaggggctcacgggggccatggtgtacggcgactaccttcgtcgccggattgcgccgctccagcggcacgcccggggcgcctgggagtacaccgggtccgaagactacatgaggacccaccaaggggtcagatgggactgggcccctgaggacttcaagatagtggtccaacgggtgctgaatctcagctccgtggaggcgtccctcatcccccaaggagtcctccccctctgcagcgatccagatcgtgccaacatcctgaccatcatgatggcggtcggggcgtcggaggagcgggctcctcgaggccacgatggcgcgggcgggagccgcaggggagaacaatctaccccaggagggggtcgtgcttctgggccccgtgacaggggcccggggggcagccgccctgccgacgcccgagggaagaggaagcaagagggtggtcgttcaaccgacctcctcgcaggttcgttccgcgcccactgtggctgtattcattctcccaatgcaagttttcactcacccgttttgtttgtcttctggtttttcttctgcttcagcgagatcccgtcgcgcccctcccgccattccaagtccggccggtctgaggccgaggatacggcgaccgcggaggcccggaggcgggaaactgaccggcgagaagccgcggatcgccttcgggaagccgaggaggctgcccaggaggccgtccgggctcgccgggctgaggaagccgctcgggaggaggccagactccgccgggccgaggagtccgcccgggaggcggaggcggcgcgcgcacgccaggcggcctgccaagcccccgacccgactccgcccgaggcgacgacgtcttccgaggccacccacgacgaggccgcgggcgcaccgctcgggcccgacccctcgggcgacgctcaggacaagccaggtccgggggacgtccctgagtccggtacgtcgatcggcgggccgagccgtgcggcatcctcaccgaggcggctctcccccatgccttccgctgccccactgagcgcagagccccttttgcaggccttggccgccgcgaacaccacggtgttggacgggttaagtgcccagatggaggtcctgcaggcagagcgggcggagctcgacgctgcatgggcgcgtgtcgaagaggggcgacgcccggtggaggccatggtggaggcgggccgcaaggcacaccgctggcacacctcggagctcgaggcccatcggaaggagctggcggagatcgccagggaggtggaggaagagcgggaggctgccctcatcgccaccgcagtgatgaacgaggcgcagaacgacctccgccttcaatacgggagctgggcggcggagctaggaaagaagctcgacgccgcccggggggtccttgacgctgctgctgcctgggaacggcgggcggcggagaccgaggcggcgtcccggcggcgcgaagaagcccttgaggcccgtgccacggcgctggaagagcgcgcctgcgtgaaggagagggacctggcggaccgcgaggccgccgttgccatccgggaggctacactggcggcgcacgaagccgcctgtgctgaagaggagtccgcactccgcctccgcgaggatgcgctcaccgagcgggagcgagctctcgaggaggccgaggccgcggcgcaaaggctggcggacagcctgtcccttcgtgaggcagcgcaggagaaacaaacgcgtcgcaatctggaaggtgcccgcgccgagagggccgcactggatcagcgggccgctgagctcgaggcacgggaaagggagctggatgcgagggcgcgtagcggcggggcggccacgggcgacggcgatctagccacccgcctcgcagctgccgaacacaccatcgccgagctgcagggcgtgctggactcgtccgccggggaggtcgaggccctccgcttggcaggcgaagtagggcccggcatgcttcgggacgccgtctcccgtctagaccgtgccgggcggcaggcgggcctctggggcgggcggatcgcgaaatatgccgccaaccaggggggcctcgcccagcgcctctcagagatggccgggactttccagcggctccccgaggagctcgaggagacgatcaagtcatcctcgagagacctcgcccgggggtag

SEQ ID NO: 82089 - DNA, 3229 bp, Oryza sativa
  Clone ID: PAT_MRT4530_81553C.1
atggcacggggctccgcaccgctcgatggtagcatgctgccgccttcccgcatcgtgagcgagaggcaggccgggctgccgcgccgattcatgccggaatctgccaccggccgggaggtggtcgcgctgggcgagggacgcccggcgccacgctacccggggcggtccgtcttcttcctctctttcgcaatggcggggttggtcccgccattctctatttttttcatggatattctggagttttatgatctccagatggcgcacctcacccccaacgcgataatgacgttggccatcttcgcgcacctgtgcgagatgtttattggggtgcgcccatctctctggctgttccggtggttcttcaccgtacagccggtgtcgccgccaacggtagtcggtggctgctacttccagccgcgggggcaggtgctgaaccgctacattccctgcgtcctccgcaaaaagtgggacgactggaagagcgattggttctacacccccctcgccgacgaagcgcgcctccgacttccgagccagcccccggcgcaggcctccagctggcgggcggcggtagatctgggagatggctacgacgccgttcttaaccgcctggcgggtctgcgatcccaggggctcactggggccatggtgttcggcgactaccttcgtcgccggatcgcgccgctccagcggcgcgcccgggcgcctggagtacaccgggcccgaggactacatgaggacccaccaggggcgcaaatgggactgggaccctgaggacttcaggatggtggtccaacgggtgctgaatctcagctccgtggaggcatccctcatcccccaaggggtcctccccctctgatgcgatccagagcgcgccaagatcctggacatcatgtaggtggtcggagcgtcgggggagcgggccccccgaggccacgatggcgcgggcgggagccgcaggggggaacaatctaccccgggagggggtcgtgcttctgggccccgcgacgggggcccggggggcagccgccctgccgacgcccgggggaagaggaagcaggagggtacccctcccccatctcctccccgagggggcggggcggtgcgtgccagcagcaggcgcccgaagggtgccgcgccgacgccgcagcccgagggggagcgaaagaagaaatggctctgtaagatgggggggatcgtgccatgccgggggaacctcatctcgcccccgaggtggtcgtttagccgacctccccgcaggttcgtccccgcgcccaccgcggccgtattcatcctcccatctcccaaggcgagttttcactcacccgtttctttttgtcttctggtttttcttctgcctcagcgagatcccgtcgcgcccccccccgccattccaagtccggccggtctgaggccgaggagacggcgaccgcggaggcccggaggcgggaagctgaccggcgagaagccgcggaccgcctccgggaagccgaggaggctgcccaggaggccgtccgggttcgccaggctgaggaggccgctcgggaggaggccagactccgccgggccggggagtccgtccgggaggcagaggcggcgcgcgcacgctaggcggcctgccaaacccccgacccgactccgcccgaggcgacgacgacttccgaggccacccacgacgaggccgcgggcgcgccgctcgggcccgacccttcgggcgacgcttgggacgggccagcttcgggggacgcccccgagtccggcacgtcgattggcgggccgagccgcgcggcacccacaccgagggggctctcccctctgccttccgctgccccactgagcgcggagcccttcttgcaggccttggccgccgcgaacagcacggtgctggacgggttaagtgcccagatggaggccctgcaggcggagcgggcggagctcgacgcggcgtgggcgcgcgtcgaggagggccggcgctcggtggaggccatggtggaggcgggccgcaaggcacaccgccggcacgcctcatagctcgaggcccgtcgtagggacctggcggagatcgccagggaggtggaggaggagcgggagactgccctcatcgccaccgccgtgctcgacgaggcgtggaacgacctccgcctccaatacgggagccgggcggcggagctagaggagaagctcgacgccgcccggggagtccttgacgccgccgctgcccgggaacggcgcgcggcggagaacgaggcggcgtcccggcagcgcgaagaggcccttgaggctcgcgccacggcgctggaggagcgcgcccgcgccctggatgcgaaggagagacctggcggaccgcgaggccgccgtcgccacccgggaggcaacactggcggcgcacgaggccgcctgcgccgaagaggagtccgcactccgcttccgcgagaacgcgctcaccgagcgggggcgagctctcaaggaggccgaggccgtggcgcagcggctggcggatagcctgttcctccgcgaggcagcgcgggaggagcaggcgcaccgcaatctggaaggcgtccgcgccgagagggccgcactggatcagcgggccgctgagctcgaggcgcgggcgaagaagctggacgcgagagcgcacagcggcggggcggccgcgggccacggcgacctagccgcccgacttgcagccgccgaacacaccatcgccgagctgcagggcgcgctggactcgtccgccggggaggtcgaggcccttcgcttggcgagcgaagtagggcccggcatgcttcgggacgccgtctcccgtctagaccgcgccgggcggcagacgggtctctggggcgggcggcacgcgaagtacgccgccaactaggggggcctcgcccagcgcctctcagagatggccggggccgtcgagcggcttgccgaggagctcgaggagacgatcaagtcatcctcgagggacctcgcccggggggcggtggagctcgtactgacaagctaccaggccagggaccctgacttctccccgtgggcagcgctggaagagttccctcccggaaccaaggacggcgcgcgcgcgcaggtccgggacgccgccgaccacatcgtccacagcttcgagggtacggcccctcggctcgtgttcgcgctcgactccgacgaggagggcggtgacgacggtgcggataacagcgacgacgaggccgacgacccgggcgcgtcggag

SEQ ID NO: 82090 - DNA, 332 bp, Oryza sativa
  Clone ID: PAT_MRT4530_81554C.1
ggccgccgtctctccctgctccagtccccgtcctccatgtccacgcccggcgtcaccggcgccgttgtgtgggacagcggcgtcgtcctcgccaagttcctcgagcacgccgtcgactcgggcctccttaccctccgggccgcgcgggcgctcgagctgggagcgggctgcggccttgctggctgcgtcgccgcgctcctcggagcccacgtgctgctcaccgacctccctgaccgcctcaagctcctcaggaagaatatcgacctcaacgtcggggacgacgcaaggggctctgctcgggtcgcccaactcgtctgggctgatgatcctca

SEQ ID NO: 82091 - DNA, 346 bp, Oryza sativa
  Clone ID: PAT_MRT4530_81555C.1
cccacgcgtttttggttttgtggacggacacctggttcacgccgcaggcgtggggaaactacggagggcacaagtgcgcgatggagacgctgtcgatcacaaaccggacgacgttgctggacgtgtgcacggactggaagctgtacgccggggcgcaagaggtgctccagacgttccgccgggtgccggtgcacctttgtcgacattacggtcgctgagcggagctccgtatggatgcgcatacgtctgtgcacacgcatccggatggggaagctgatcaccccctaacaatagttcgaacccaaagaagaacgcgcgattggatccactggtggcttccgggcct

SEQ ID NO: 82092 - DNA, 718 bp, Oryza sativa
  Clone ID: PAT_MRT4530_81556C.1
gctttttagctaattaagcagcaacttaacttgatcttcttgtgaccgatcgatggctcgcccggcgaataataactatgcggcggcggtgatggtggtggcgctgctggtggcggcgccggcggcgagcgcggtgacatgcgggcaggtggtgagcatgctggcaccgtgcatcatgtacgcgacggggagggtgtccgcccccaccggcggctgctgcgacggggtcaggaccctcaactccgccgccgccaccaccgccgaccgccagaccacctgcgcctgcctcaagcagcagaccagcgccatgggcggcctgaggcccgacctcgtcgccggcatcccctccaagtgcgacgtcaacatcccctacgccatcagcccttccaccgactgctccagggtgcactgatgagcggatcaacgtcgacaagtgatgcgacaataataaaggagagatcgatccatcgatctccagctctcatttcgcggttgctatgtgcatgcgccgtcgtcaatgatcgagctagaaatatatatgcatgttgctccttcgttgtgttacttcctgcttacctgctgcggtttgatagttagctagtgtgagagactgtgagggttgattttggggcagacgaatcatgaatctcagaggaccttgtaccactgcacgcttcaatatatatccatcaaatgcagggtcttttaataacaaaaa

SEQ ID NO: 82093 - DNA, 444 bp, Oryza sativa
  Clone ID: PAT_MRT4530_81557C.1
atggagcaacctctctttgagctgtctgctcctaagggcgaattctatgagccacctccttcatcggagccaatttatacaactggctatgaaattcgccccaaactaattacttggtccagattcactaatttagtgcattcaggacaaaccttgtccttacccgagtatgtgcatctgcaacattttcatacgggtctggataaggagtctgcattctatctggacataaccgccggaggatcattcgtgcaaaaaacaacgtcagaaggaaaagtaattctagaccgcattctagaaaataattacttcatgatgcaatgcgatgaaccccagctggaggcatctgtatccaagataaaggagccttcaaccatcgagtcacaatctgaaacatccacttcgaccaactcgattgatgaaaaagttaccgaggcaccataa

SEQ ID NO: 82094 - DNA, 369 bp, Oryza sativa
  Clone ID: PAT_MRT4530_81558C.1
atgtacgcgacggggagggtgtccgcccccaccggcggctgctgcgacggggtcaggaccctcaactccgccgccgccgaccaccagaccacctgcgcctgcatcaagcagcagacgagcggcatgggcggcctgaggcccgacctcgtcgccggcatcccctccaagtgcggcgtcaacatcccctacgccatcagcccttccaccgactgctccagatcgacggcagcaacaggtcaacagcaacaggcagccactggcgccaccatcgtcatctcgacggccgagttctcctgcccggtgttggagagcgagcagctgaacactgtcctgagctccaatgacaatgagatgaactacaaatattaa

SEQ ID NO: 82095 - DNA, 2548 bp, Oryza sativa
  Clone ID: PAT_MRT4530_81559C.1
atggattgggatctcaagatgcctgtttcttgggacctggccgagctggagcacaacgccgtgccgaacatggcggcggcggcgagcgcggcggagccgggcattgccgcggtggcggcgtcgcgcggggcgccgggccggccggagtgctctgtcgacctcaagctcggcgggctcggcgagttcggcgccgcggacgcgctcaaggagcccgccgccgcggcgaaggcgccggtgtcgagcgccgccgccgccgcctcggtggcgaaggtgccgccgtccacgagcacgctgaagcggccgcgcggcgggggcggcggcggcggcgggcagtgcccgtcgtgcgccgtggacggctgcaaggccgacctgagcaagcaccgcgactaccaccggcggcacaaggtgtgcgagccgcactccaagactcccgtcgtcgtcgtctccggccgcgagatgcgcttctgccagcagtgcagcaggtttcacttgcttggggagtttgatgaggctaagcgtagttgtagaaaacgcttggatgggcacaatcgacgccgcaggaagccacaggcagatagcatgagttctggcagctttatgacaagtcaacaagggacaaggttcgcgtccttcactcctccaagaccagagccaagctggcctgggatcatcaaatccgaggagaccccatattacagccatcatcaccaccctcatccggtgatgaccagccggcagccgcatttcgtcggctcgccgtcgtcggcgacgacggcggcgttctcccccaaggaaggccggcggttcccgttcctccatgagggcgatcagataagcttcggcggcggcggtggcgcggcggcggcggcgacgctggagatctcggtgtgccagaccaccgtcgtcgcgccgccgccaccggagagcagcagcagcaacaagatgttctcctccgacgggctgacgacggcgacgacgacgacgaccaccgcccaccaccaccaccaccaccaccaagtgctcgactccgattgtgctctctctcttctgtcatccccggccaactcctccagcgtcgacgtcagccggatggtccagccgtcaccggcggcggcggcgggagccgcaccatgaccaccctccactccagcatagtactgcgcttagctaattaagcagcaacttaacttgatcttcgtgtgaccgatcgatggctcgcgcggcgaataataagtatgtggcggcggtgatggtggtggcgctgctgttggcggcgccggcgggagcgcggtgacatgcgggcaggtggtgagcatgctggcgccgtgcatcatgtacgcgacggggagggtgtccgcccccaccggcggctgctgcgacggggtcaggaccctcaactccgccgccgccaccaccgccgaccgccagaccacctgcgcctgcctcaagcagcagaccagcgccatggggcgacctgaggccggacctcggcgcccggcactcccatccaagtgcggcgtcaacatcccacaggctgtcaggctttcacgcggttacggccactgcaacctgccgccgtcaggccaccaccgccgaccgccagaccacctgcgcctgcctcaagcagcagaccagcgccatgggcggcctgaggcccgacctcgtcgccggcatcccctccaagtgcggcgtcaacatcccctacgctatcagcccttccaccgactgctccagggtgcactgagtggatcaacgtcaagtgatgccacaataataatggagagatggatccatcgatctgcggctctcattttgcggttgctatctgcaatattcgtcgtcgtcagagagatcgagctagaaatgcatgttactcctccgttctgttactatctgcttacctgttgcttcgtcgcggtttgatagtcgtcgttatagctagtgtaagagtgtgagggttgattttgatctgtctcctttacgggacgaggggcagacgaatcatgcatgaatcttagaggacctgcttgcattgtaccttactgcatgcatgcatgcttcaatatatatccatcaaatgaagagtcttttaataaaaaaaaaaaaaaaaaaaaaaaaaaaaaaaaaaaaaaaaagcagctgaacgccgtgctggtgccgggctccaacgagaacgagatgaactaccacggcatgtttcacgtcggcggcgagggctcctccgacggcacgtcgccgtcgctcccattctcgtggcagtagttttgtcagtaactgtatgttgctgccttagtttcagtagagttggttcttcatttcttttcagtgatcaaattatggtttctgttcttatctgccatggtaagttcctttttttgtcttcttcttcttgccttcatttgagttaattacagcattgatttgtgtgaacaaaattcatcataaatcagttcctcgcgagatcatgggtctcaacatgatggtgccaagtgagaactgcagtattgtgcagttttcagttttgagtctaagttgtataaacttgcag

SEQ ID NO: 82096 - DNA, 156 bp, Oryza sativa
  Clone ID: PAT_MRT4530_8155C.1
atggccggcggcgcagcggcgattgctgcggagggcggccgcgcaaggaacgggtacagtgtagcgcctcacaacgtcaccgcgccgcggcaacaacgcctggggacggtcgacccgcggatcgccctcacacaccacgtgttcgattggtggtaa

SEQ ID NO: 82097 - DNA, 282 bp, Oryza sativa
  Clone ID: PAT_MRT4530_81560C.1
aaaaaaactaaaaaaaccctttcaaagacaataatttgggatgttttaaacaaggaaaactggttttggtcgaacccccaaaaaaaaagggataagcttcctgccaccgtttttacacacccaaaaacctcaccggacccctaaaaacatgtaaacggggtccatacctaaaatttattaaaacgcaaaagcatccaaaagcccctaatttgtccataggtccccactggttataattaagatttggtttaagccaccaccaaaaccggactttttaccaaa

SEQ ID NO: 82098 - DNA, 234 bp, Oryza sativa
  Clone ID: PAT_MRT4530_81561C.1
acgcccacacgtccacccactcgttgggatagcgatccatgtatgaccaccgactacatcacatacatgttcaagtgtgacaccggacagagtcagaggaagtattatgaggtccaggacaaggactccaagacccttatatgtagcacgaaagaagttgatgtgctcggcgtgcaggaacaatgaggagatcccatgggctgcggctggagctgaatacactgttgagtctac

SEQ ID NO: 82099 - DNA, 141 bp, Oryza sativa
  Clone ID: PAT_MRT4530_81562C.1
cccaaccaagggctacatatagattgagccaggggtgaagcacaacatgaatggatggaggaagtaaagtcaagatgagcaggacgaagaaaagaccatgacaactgccacagtggctgggctactccacgggaaggcaca

SEQ ID NO: 82100 - DNA, 299 bp, Oryza sativa
  Clone ID: PAT_MRT4530_81563C.1
ggggcctgaaaaatttttttttcctcatcctttttattaattccccccaaaggggccgttcccagggagtttttttggccttataaggcaaggaaggaactaaacccccgggggcaggggaattgttttaaacaaaaggtttattaaactccaggggttaaacaaaccggggggtcaaaggaaatcccgctaaaaaaaaaccccggggaaagtcccccttttttttttggccccaaagccttttggggcacccccccgttttgggggtttttttttcccccggttttttcgcttagggg

SEQ ID NO: 82101 - DNA, 401 bp, Oryza sativa
  Clone ID: PAT_MRT4530_81564C.1
agtttaaaacacatggttagggccgccatcggcgagatatgggagcttaaactcgtcaaagtgccaggttccctttgtacccctgcccgtgaaggaaaatcaccccctggggtcaaaccccacaagaaggttttccctttagtatttctatcaaaggtgggatacgccagtggacctatttgtacttccgcaacaggtggagcaaaatatttttcataaaaaacccttcaaacaagaaaatgcccatcgtgaggcaggaaagcgccgaattgtagaagttgacaacgtcgtcgatgaagaggaatacacccataatattcatgtaagacctcacattggccttgactataatccccaagagcctgtggcatatggtcaccaaaataaaagttgtagttctt

SEQ ID NO: 82102 - DNA, 450 bp, Oryza sativa
  Clone ID: PAT_MRT4530_81565C.1
tcgcgatctagaacgataattggtgatatcatccatgattagattggcactctggaatttgccccatactagaactactcccttcgtttcatattataagacgttttgacttttttctttaagttgtaacttaaagaaatttgacttagaaaaaagtcaaaacggcttataatttgaaacagagggagtaattgataattaggtctagaaggtggcaaatcctttgactacccaatgggtggcatagaaaatggacgcgactccctgaatgttgtgtagatggcccaagtagattcttagggcgagttctaaacagcaaggggaaacagctacttcctcgtcctctgtgagcattgcttcccaaactgctaaataatgtgtttcatgcaaaagttctctatatagaggtttcttcaaaaataaaataaatcctttttctttctagttttt

SEQ ID NO: 82103 - DNA, 2057 bp, Oryza sativa
  Clone ID: PAT_MRT4530_81566C.1
tcaagaggacggcgtggcgggagcaacggaaggaatcggcgcacgagctggggaaggcgatcgaggtcggcggcgggggccgactaggtcggcaacatggacttggcgcgggagtgaggacggcgaggtcaggagcgacggcctctggtagcgggagcgaaggagggcgagctcagcggcgtggaatcggcccgggagagagggacagcgggcggtgcggatctggcgcaggagcagccggggccgcgacctgccccacgacagcgccggtcctctgcccccgtcggtggctctcccctctcccttctccggcatcgtcgggcgaaggaagccggcaagcttcttcagccccaccaccttccccatcgacccagcgagcatccagcggccctcctcccctggccgacgagctcggcgggcgtggagcgcaacgatggacaacgaggtctctctcctccctctcccatccttgacgtgacggtgcggagcacgagcgtgggtcccacctgcgacgaggaacccgtggccaaggtttcctacgtgttcttgaggaggccgcgcggatagaggacatgacaacgaatattcgcctttttggttgaggccgaacgccacgaagacgcactgtgaatggcttggcttcacaagcacagcgttcatattgaaagtgcaacgttcttttctcaaccaatcagatagttcatcagtaatccgcctgcttactccacgtggcgaaggacacactccatagtatgagcagtcccttccttcaactgaggaatatggtgggcccatgacatcaagcactgcacaagcagtttctgcagtgaagcaatgaaggtttcctccactctctgggtatagaaccgttgtcttagatgaatcatcgtagatggtgttagttctcaccttagcaaaatgagcaccattgggagttttaacccagtcatacgactttatgtgcattgagccatgaagaatcttgctaaagacagtcatccctagatggtcatggagtggaatgacagccgattgtggtagacaaaacacaccaaacgagaagttaagactatcatcaccaaagtgcacatatgttactttaggatgcccttgaggatcagctctaaaatacggcatgcttgcatcaagcccaaaatcctctagcttcaaggtatcgagcaacttggtgaggtttgcctcggctaacgatgatggaacaaagcctggcgtggctgcaaagaacacatccctagcgatgtcatgcacttcttggatcttgttcatcgccgagtttggcagttctagttcttcaagagaggaagtaggcggtttcttctgacggcgggtggtcttcttggatgatgagaaggatgactccaaaacacccttgctccctgcccgtttcatcgcgtaacagaccccaaaaggaacccaatgattgagattgtataagcggcgaggaaatgaggcaattagagtaggcacaaaggtgaggaacggccgattgggtatatatgagcgaagggtcgcatatggtgggtttggaggaaggagaaaactaggggcgggctgtataggggacaaaggcgagattgccttgcttcctctagaagattccattttctcgtgggctattgaagaacttggaatccaaaccgctggtttttgtaaacttacgaacttaaccattcaactatatcaacattttagagaaatgaccgtacttaagcattactcaataaactccaatatgtcacatcaaggtaaatcccagaacctcacttaacactaccccgaagtatcacaaatttctagttcacggccgatttgcaaaggtagcccttcctcaccatactctggttgttattcatttgagaatttcattattcaattaatttcacaacactacatacctttgacaaaattatcaccaaactataaatttaaatcatcatatcacaaaccacacatttaatgtcaaacctacctcaaactataggttgaaggcataaaactataaaatttagcatatgatttatctactatagtaaaaaaaa

SEQ ID NO: 82104 - DNA, 167 bp, Oryza sativa
  Clone ID: PAT_MRT4530_81567C.1
gcctcccgaccacgcgctgctgctgctttgctcgcgtcgagctggagcgcgagtgcgagcgtgcgctcggatcctcggcggaagcagcgcgggcatcgggtgcgtgatggcggcggcggcgcagggggaggaggcttcgagggctgatcgcgtcacatcgtatccat

SEQ ID NO: 82105 - DNA, 413 bp, Oryza sativa
  Clone ID: PAT_MRT4530_81568C.1
atattgggttttatttttttattatatttatactattttttttttttttattttttttttttaattacaaaaatttttaattattttttaacattatattctaacaaaaaaaaataatatttatttaatacctacattaaaaaaaaaataaaaatccattacaaaccgaaataatatttatttaccataaatctaataaaaatcctatcttgcaagaaccaactcctaaaaacaaactatgcaacctattatacactcgaattcaataatctacaaagcaaatcttaacctacagtgatccggaattcctgtccattaactcctgtttatacacaaacctttttacctgaaaattgcttactataaatataatccatctatcttgccatcaaaaaaatatatttttattattt

SEQ ID NO: 82106 - DNA, 478 bp, Oryza sativa
  unsure (1)..(478): unsure at all n locations
  Clone ID: PAT_MRT4530_81569C.1
tcgccaagctcaggacgctgacctnttgccctgtttncagcaatgaaatgtaccgcactcatatttttttgacttccaccgaagaaatgttgcaagaatcctaaattgatcagaagattcagaactatcccgacttcgcaaaattcgtcgncggaatggtaaacaagggacagatttttgttatagatgattctggacaagatggtgtcatggntcagcatctttaagcaggaggggcagctgacttcagacatcgtagaattcagttctgctttggtagctgttcacgttttatgttatgactacaccatgattgtaccactagcgttcccagcttcgtttcatttttctttttcgtttgaacctgtatacagattgacattctgttgtaaattttcttgggattgaataaaaagtaatgctgattgttgcaaaaaaaaaaaaaaaaaaaaaaaaaaaaaaaaaaaaaaaaaaaaaa

SEQ ID NO: 82107 - DNA, 266 bp, Oryza sativa
  Clone ID: PAT_MRT4530_8156C.1
gccgctccgcccgctccgtgccactgcctcgctccgcccctgtgctctgtcccgtcaccacctgtcgccccactcctcccctctgccccgccccgttgacatcccgctccgctttgccagcctactccgcccactgctgctctagccactgcccgtcctgcccgtcgcctgctccagccactacccaccctattccactgatcggggagagaaagagagagcggatagagagaaagggcggagagaggatagaaagacaagggtag

SEQ ID NO: 82108 - DNA, 252 bp, Oryza sativa
  Clone ID: PAT_MRT4530_81570C.1
atggccaagcggagcggagcggcggcaacgcggcctaagcggcattggtggtgggtggggctccatctctcctccttctcctacgacagacgcaacgagcggagcggagctctagcggcgtggcccaagcggtgcccaggagtccacctctccttcgaccaacagcgagtggagtggagcggcggtgttgtggcccaagcggtgggtgggagtccacctctcctcctcctccgaccggcggacggcgcgtga

SEQ ID NO: 82109 - DNA, 4370 bp, Oryza sativa
  Clone ID: PAT_MRT4530_81571C.1
atgaagagcaatgcctctcctgagcctgatgggatgaatgtagccttcttcaaggcggcgtggggatggataaaagatgacgtcatgaagctcgttgaagacttctataacacaggtaatcttcccaaagaactgaacaaaaccaatattgtcctcattcctaagaaaaacaggccagctaaccctgcagatttcaagtccattagtctttgtaatgtgatgtacaaaatcattgccaaatccattgcaaacataatcaaaggttttctgctgaaaattgatctctccaaagcttttgatagattggaatgggatttcattgcttctgctatgaaaaagaagggctttcactctaatttcatcaatttggttcagggttgcatcagctcctcttccttttatgtgacctttaatggtcaatcttatgatgctttcaatgctaatagaggtgttagacagggttgtcctctttctccttatctgttcgtgttggctcttaatgagctttctgatcagcttaatgaggatctccttaataatcagatgaaaggcattaaacttagccctcaggggccggccattcactctctcctttatgcagatgatttaatcattacaggtgaagctactgagatcgaagcaagaaaaatcaaagaaatcattgaggatttttgcaacaaatcaggccaaactcccaactggagtaaatctgccatccttttcagcaaatccactcctctttacatccagaattccatcaaaaccatcttccatgttgcttctgttgattccaataccaaacatttgggccatcccctctttgtcactaatagaacaaaaatttttgtctaccaattcattgtggataaattcaaagccaagcttactaatctaaaggctaacaaactttcccatgctggtaggcttaccttaatcaaaactgtttttgcctcccttcctgtttattacatggctaccaccctccttcccaaaaagatcattgccaaactcacttctatcatcagaatcttctggtggacaggagtgagggagggtcaggacaagaagcctctctgccttaaatcctggtctgatatttgcaaacctgttcaggatggtggtttaggtataagagatattcagatggcgaacaggagcctgattctaaatgctgcctggagactagtcagtaagcttgatgagccggtatctcaaatcctgaaagcggggatgtaccagtggcgcaagttcgagttcttcgaggagaaggcggccgggcggggcgtgcccggcgagatcgcctcccgcgtcagctgctgctccggcggccgcggccgcgtcgccgtcggctgcgacgacggcacggtggggctccttgaccgcgggttccgcctctcctacggcttccaggcctacgcctcctccgtcctcttcctccagcagctcaagcaaaggaatgttcttatcacggttggcgatgatgatcagccatcttcactatcgtcagcaatctgtctaaaagttttcgatcttgataaagtacaagaagaaggttcaagtacaacaagtcctttctgtgttcaaattttgcgcatcttcactaagcaatttcctcaggcaaagattacatcttttgtggttctagaagaagcacctcctatactgctaattgcgattggactggacaatggttccatttattgcatcaaaggtgacatcgcacgtgagcgtatcacgcgattcatgttgcaagtcgaggatggcaccagtttacctattactggtcttggtttccgagttgaggggcaagcacaccagttatttgctgtaactcctagttcaataaccttgtttagcttgcatgatcatccaccgaggaggcaaacgcttgatcagattggttgtgagaccaatgctgtggcgatgagtgaccgcatggatctgattattggtagacctgaagctgtgtatttctatgaaattgatggtagaggtccttgctgggcctttgatggtgagaaaaagtttgttggatggtttcggggctatttactatgcattattgaagatcagaggagccggaagaatactcttaatgtatatgatcttaagaatcggttgattgcacatagcatgccagtgggggatgtttcacacttggtctctgagtggggatatattattctgataatgagcgataaaaagattctttgcattggagagaaagatatggagagtaagcttgatatgttgtttaagaaaaatctgtatacagtcgcaatcaatcttgtacaaagtcaacaggccgatcctgcttcaactgctgaggttctaaggaagtatggtgaccatctctatggaaaacaggaatatgatgaggccatgtcccaatatatccacaccattggccatcttgaaccatcatatgttatacagaagttccttgatgcaaaacgcatctacaatctcacaaactatttagagaagttacatgatcgagggttagcatccaaagaccacaccacccttctgttgaattgctatactaaactgaaagatgtggagaagcttaaccatttcatcaaagatgaagatggggtaggtgaaatcaagtttgatgtggaaactgccataagagtatgtcgtgcagctggatatcatgagcatgctatgtttgttgccaaaaaggctgggaggcatgagttgtatttgaaaattttactggaggatcttggtagatatgatgaggcactgcagtatatatctagccttgaggcgaatcaagcaggtcttactgtaaaagagtatgggaaaattcttgtggagcatagacctgctgaaacagttgaaatactgttgagactctgtacagatggtggagatcctatgacaagaagaggttcaaatagcatgcatttgcttatgataccttctccaatggactttgtaaacatatttgtacacagcccgaaacatctcatggaatttctagagaattataccaaagcagtaaaggactcacctgctcaaacagaaattcataacacccttctggagttatatatatcaaaagatttaagtttcccttctatgtcacaagaaaatggctttgaggagcagaatagtaaggaaagaaaaggtaaagaagttgcaaatggctataaatctggcccaagggagaaaggaaatctgggaaaggaagatatgaatgtcgcaaaggatattgttgataggcaaaggaaagggcttgcattgctcaagtctgcatggacatctgagatggatgatcctctgtatgatgttgatcttgctcttatcatctgtaatgcaaatgcattcaaagatgggctattgtttctgtatgagaaactaaaactattcaaagaagttattagttgctacaagcaagctcatgatcacgagggtctaattgcctgctgtaagaagctaggagattcatctcaaggtggggatccatctctttggggtgatctgttgaaatattttagtgagcttggggaagattgctctaaagaggtcaaggaggtattgacctatattgaaaaggaggatgttttgcctcctattgttgtgctagagacattgtcgaaaaacccatgcttgacactgtcagttgtcaaggattacattgcccgcaaacttgagcaagaatcaaagctaatcgaagaagataggaaatctattgacaagtaccaggatgagacagaactgatgaaaagggagatagaagacctcaagacaaacgcaaaggtctttcagcttagcaagtgtacgacgtgcacctttacgcttgaccttcctgcggtccacttcatgtgcatgcactccttccaccttcgctgccttggggacaatgagaaagaatgcccagaatgtgctcccgaatatagatctgtcatggaggcaaagcagaagctagaacataacgctagagaccatgatctcttcttcaggcagctgaggggttcaaaggatggcttctctgtcgtcgcagactattttagcaagggcattgttaccatggtaatggtatttctccttgctgttcttgcaataatacgcaattgaagaaaaccagcttaattactccccatgtacaggattaggcgatgtttaatctcctttcccatggtgttttgtcatcatgtgagtttcagggtccctcacacagcatgtgcaggcctttaatagcgagttcctctagtgtaccaacttatgtatgctttcgggccaattttttgtggccgtgctatggagttctgttgtgcttgacattgtaaatccttctgttggcaaacgctgcctagtttttggcatttagttttgatggaagaagattcccggccatc

SEQ ID NO: 82110 - DNA, 1385 bp, Oryza sativa
  Clone ID: PAT_MRT4530_81572C.1
ttgaagcttttcatcaaaaaaacataatggaagagcgtatccaggatggcgaacatacattgacacaattcttacacatttgcatgcccaaattcagagtcgtagcttagagaactgtacatcgtggttaatggacatgccccgtaccatttacatgttctgtacaccgggaaaacttgccaaaatttccaaaggcaccttcagcagttcgccagaaacaaaaaagaagcatcacgaccagatcgaagcttctcatacaccattccagctcattatttgaggatccgcaacacgggcagcatacagcgaaggtgtctttatggctcgggacttctaactttgatctccattaatttctcaacaggttgtctgcatatggggcatttatctgtttgaaaccttagagtttttgcacattcactgcacatgcacaaatgcctacatggaaaaacagctgtgtcccttggctctgtcaagcagatgacacattctttccccatatcactatcatctgcgtcgggaacatcagcttcagtcgagttgacaatcccataaatttcttgtagctcatacttctcgccatcactccacaacatttgcttgacaactttaactcgaaggtcattgtgatgcttctctataacagcaagagtaatttgtgccctagtggagttaggctggtgactttcctctggaggtggacaagcttctgcataaactaccagtgggaatacttctccagaaggatttgaaagctcatccagagaaaagaatcccaaatcaacaccagatccagaggtctggacaaacttttgagccaatcctttctggaaaggtatctttgtaggtgtttgtaattctggatatactgaagagaaagtacagttttttcggacgcggccaaagtaataaatagttatgctgccgtcggtcacggcgtcgaaggtgaaggcgacgaggcgtcggtcggggtccgtgacgtcgggcacgagccggatggtgtccttgtgcaggttgacgtcgttcttcaccttccgcgcctgctggtgatccacgaactcgggcggcggccccgtcagcgcgggctgctccgggtgcggcgggcgcggcgcggggtgccacgggccgtggtaggcgtgcgggggcggcgggtggtggtagtagtacgaggaggacgaggtggcgtggtgcggcggcggcggaggccggtaggggtgctggtggtggtggtgcggcgggggaggcggtggcggcgggtggtggtggtggtgcggcggcggaggagggggcggtgggtaggtgtagtagtggtgcggcggcggcgggggccgggccgcgtagtactcgtcgcggcggcgccggctggtggaggacgagccacccat

SEQ ID NO: 82111 - DNA, 2676 bp, Oryza sativa
  Clone ID: PAT_MRT4530_81573C.1
atggcacggggctccgcaccgctcgacggtagcgtgctgccgccttcccgcatcgtgagcgagaggcaggccaggctgccgcgccgattcatgccggaatctgccaccggccgggaggtggtcgcgctgggcgagggacgcccggcgccacactacccggggcggtccgtcttcttcctctctttcgcaatggcggggctggtcccgccattctctatttttttcatggatattctggagttttatgatctccagatggcgcacctcacccccaacgcgataatgacgttggccatcttcgcgcacctgtgcgagatgtttatcggggtgcgcccatttctccggctgttccggtggttcttcaccgtacagccggtgtcgccgccgacggtagtcggtggctgctacttccagccgcgggggcaggggctcacgggggccatggtgttcggcgactacgttcgtcgccggatcgcgccgctccagcggcgcgcccgaggcgcctgggagtacaccgggcccgaggactacatgaggacccaccaggggcgcaaatgggactgggaccctgaggacttcaggatggtggtccaacgggtgctgaatctcagctccgtggaggcatccctcatccctcaaggggtcctccccctctgctgcgatccagagcgcgccaagattctggccatcatgcaggcggtcggggcgtcgggggagcgggccccccgaggccacgatggcgtgggcgggagccgcaggggggaacaatctaccccgggagggggtcgtgcttctgggccccgcgacgggggcccggggggcagccgccctgccgacgcccgggggaagaggaagcaggagggtacccctcccccatctcctccccgagggggcggggcgtccggccggtctgaggccgaggagacggcgaccgcggaggcccggaggcgggaagctgaccggcgggaagccgcggaccgcctccgggaagctgaggaggctgcccaggaggccgtccgggttcgccaggctgaggaggccgctcgggaggaggccagactccgccgggccggggagtccgtccgggaggcagaggcggcgcgcgcacgccaggcagcctgccacacccccgacccgactccgcccgaggcgatgacgatttccgaggccaaccacgacgaggctgcgggcgcgccgctcgggcccgacccctcgggtgacgcttgggacgagccagcttcgggggacgcccccgagtccggcacgtcaatcggcgggccgagccgcgcggcacccataccgaggcggctctcccctctgtcttccgctgccccactgagcgcggagcccctcctgcaggccttggccgccgcgaacagcacggtgctggacgggttaagtgcccagatggaggccctgcaggaggagcgggcggagctcgacgcggcgtgggcgcgcgtcgaggaggggcggcgctcggtggaggccatggacctggcggagatcgccagggaggtggaggaggagcgggagactgccctcatcgccaccgccgtgctcgacgaggcgcgggatgacctccgcctccaatacgggagccgggcggcggagctagaggagaagctcgacgctgcccagggagtccttaacgctgccgctgcccgggaacggcgggcggcggagaacgaggcggtgtcccgacagcgcgaagaggcccttgaggctcgcgccacggtgctggaggagcgcgcccgcgccttggtcgcgaaggagagagacctggcggaccgcgaggccgccgtcgccacccgggaggcaacactggcggcgcacgatgccacctgcgccgaagaggagtccacactccgcctccgcgaggacgcgctcaccgagcgggggcgagctctcgaggaggccgaggccgcggcgcagtggctagcggacagcctgttcctccgcgaggcagcgcgggaggagcaggcgcgccgcaatctggaaggcgcccgcgccgagagggccgcactggatcagcgggccgctgagctcgaggcgcgggcgaaggagctggacgcgagagcgcacagcggcggggcggccgcgggccacggcgacctagccgcccgcctcgcagccgccgaacacaccatcgctgagctgcagggcgcgctggactcgtccgccggggaggtcgaggccctccgcttggcgagcgaggtagggcccggcatgcttcgggacgccgtctcccgtctagaccgcgccgggcggcaggcgggcctctggggcgggcggtacgcgaagtacgccgccaaccaggggggcctcgcccagcgcctctcagagatggccggggccctcgagcggctccccgaggagctcgaggagacgatcaagtcatcctcgagggacctcgcccggggggcggtggagctcgtactggcaagctaccaggccagggaccctgacttctccccgtgggcagcactggaagagttccctcccggaaccgaggacggcgcgcgcgcgcaggtccgggacgccgtcgaccacatcgtccacagcttcgagggtacggcccctcggctcgcgttcgcgctcgactccgacgaggagggcggtgacgacagtgcggacgacagcgacgacgaggccggcgacccgggcgcgtcggagtga

SEQ ID NO: 82112 - DNA, 986 bp, Oryza sativa
  unsure (1)..(986): unsure at all n locations
  Clone ID: PAT_MRT4530_81574C.1
atggcacggggctccgctctgctcgacggtagcgtactaccgccttcccgcattgtgagcgagaggcaggctgggctgccgcgccgcttcatgccggaatccgccaccggccgtgagatagtaatgctgggtgagggacgcccggcgccagactacccggggcggtccgtcttctttctccccttcgcaatggccgggttggttcctcctttttcttctttctttatggatgttctggagttctacgatctccagatggcgcacctcacccccaacgcagtgatgactttggccatcttcgcgcacctgtgcgagatgttcattggggggtgggncngggccccncccccccccaaaaatatttttcttcggctgttccggtggttcttcaccgtgcagtcggtgtcgccgccgtcggtggtcggcggctgctatttcctgcggcgggggccgggggtcagatgggattgggcccccgaggacttcaagatactgatccaacgggtgctaaatctcaactccgtggaggcgtccctcatcccccacggtatcctccccctctgcagcgacccagatcgcgtctccatcttgaccattatgacggcggtcggggcctcagaggagcaggctcctaagggccatggcggcgcaggtgggagccgccggggggatcaatctacccccggagggggtcgtgcttctgggccccgcgtcgggggctcggggagcaaccgccctaccgacgcccgggggaagaggaaactgggaggaacacctcccccatctcctccccgagggggcggggcggcgcgtgccagcagcaggcgcccggagggggccgcgccaacatcgcagcccgagggggagcgcaaaggaaaaaggaaaataaggggggccccggggctgcgcaagatgggggagacagaaccatcccagggaaacctaatttcccctccaaggtggtcatttaaccgaccccctcgcag

SEQ ID NO: 82113 - DNA, 529 bp, Oryza sativa
  unsure (1)..(529): unsure at all n locations
  Clone ID: PAT_MRT4530_81575C.1
attcccggngtcgaacccaaacgcgtccgcgtcccttgttagaggagagccgacaactctccggaggaaggaggaagatatggcttccacaggcgcagtggcgtaagctgaggcgtgcatctcgaggacgctgcttgagcgggactctggtggcggcgccgagcgtgctggcatggagacttccactcgatagaccctgctgacactggggagcggatgctgactgctaacactaaaatgaggaaattgtgattcatgggcgctggcatctgatagccgaacttgatcaggacaagaacagtagagccagctgaagagatgttgtaaacaatcatgttgagagtgacctgatggatgatttacttgacatggaaaagctggctgtattgtctgaagtagaacgtgaaagctctagctctggacagaaactgattctgaccaggctgtggctatagataaagactgcagagtggaaactgaaacactanatagccaggtcacagatttgcacgcaaaggttgaaagcttg

SEQ ID NO: 82114 - DNA, 2736 bp, Oryza sativa
  Clone ID: PAT_MRT4530_81576C.1
atggcagggctggtcccgccattctcttctttcttcatggatgttttggagctttatgatctccagatggcgcacctcacccccaacgcagtaatgacgttggccatcttcgcgcacctgtgtgagatgttcatcggggtgcgcccatctctccggttgttccggtggttcttcaccgtacagccggtgtcgccaccgtcggtagtcggtggctgctatttccagccgcgggggccggtgttgaaccgctacattccctgcgtccttcgcaagaagtgggatgagtggaagagcgactggttctacacccctctcgccgacgaaacgcgcctccgacttccgagccagcccccggcgcaggcctccagctggcgggcgccggtagatctgggagacggctacgacgctgttcttgaccgcctggctggtttgcgatcccaggggctcacgggggccatggtgttcggcgactaccttcgtcgccggatcgcgccgctccagcggcacgcccggggcgcctgggagtacaccgggcccgaggacatcatgaggacccaccaggggcgcaaatgggactgggaccctgaggacttcaggatagtggtccaacgggtgctgaatctcagctccgtggaggcatccctcatccctcaaggggtccttcccctctgctgcgatccagagcgcgccaacatcctgaccatcatgcaggaggtcggggcgtcgggggagcgggccccccgaggccacgatggcgcgggcgggagccgcaggggggaacaatctaccccgggagggggtcgtgcttctgggccccgtgacgggggcccggggggcagccgccctaccgacgcccgggggaagaggaaacaggaggataccccctccccatctcctccccgagggggcggggcggtgcgtgccagcagcaggcgcctggagggtgctgtgccgacgtcgcagcccgagggggagcgaaaaaagaagcgactccgcaagatgggggggaccgaaccatgccggggaaacctcatctcccccccaaggtggtcgtttagccgacctcctcgcagcgagatcccgtcgcgcccttcccgccattccaagttcagccggtctgaggccgaggagacggcgaccgcggaggcccggaggcgggaagctgaccggcgagaagccgcaaaccgtctccgggaagccgaggaagctgcccaggaggttgtccgggctcgccaggctgaggaaaccgcttgggaggaggccagactccaccgggccgaggagtccgtccgggagacagaggcggcgcgcgcacgccgggcgggctgccaagcccccgatccgactccgcccgaggcgacgacgacttccgaagccacccacgacgaggccgcgggcgcaccgctcgggcccgacccctcgggcgacgctcaggacgagccagcttcgggggacgtccctgagtccggcacgtcgatcggcgggccgagcagtgcggcatccttaccgaggcggctcttccccatgccttccgctgcaccactgagcgcagagccccttctgcaggccttggccaccgcgaacaccacggtgttggacgggttaagtgcccagatggagatcctgcaggcagagcgggcggagctcgacgcggcgtgggcgcgtgtcgaagaggggcgacgctcggtggaggccatggtggaggcgggccgcaaggcacaccgccggcacgcctcagagctcgaggcccgtcgtagggacctggcggagatcgccagggaggtggaggaggagcgggagactgccctcattgccaccgccgtgtttaacgcgacgcgggacgacctctgcctccaatacgggagccggggggcggagctagagaagaagctcgacgcgtcccggcagcgcgaagaggcccttgaggctcgcgccacggtgctggaggagcgcgcctgcgccctggacacgaaggagagggaactggcgggtcgcgaggccgccgtcgccatccgggaggcaacgctggcggcgcacgaggccgcctgcgccgaagaggagtccgcactccgcctccgcgaggacgcgctcactgagcgggagcgagctctcgaggaggccgaggccgcggcgcagcggctggcggacagcctgtccctccgcgaggcagcgcgggaggagcaggcgcgccctgccgaacacaccatcgccgatctgcagggcgcgctggactcgtccgccggggaggtcgaggccctccgcttggcgggcgaggtagggcccggcatgcttcgggacgccgtctcccgtctagaccgcgccgggcggcaagcgggcctctggggcgagcggaccgcgaagtacgccgccaaccaggggggcctcgcccagcgcctctcagagatggccgggactctccagcggctccccgaggagctcgaggagacgatcaagtcatcctcgagagacctcgcccggggggcagtggagcttgttctggcaagctaccaggccagggacccggacttctccccgtgggcagcgctggacgagttccctcccggaaccgaggacgacgcgcgcgcgcaggtccgggacgccgccgaccacatcgtccactgcttcgagggtacggcccctcggctcgcgttcgtcctcgactccgacgaggagggcggcgacggtggtatggacgacagcgacgacgaggccggcgacccgggagcctcgaagtga

SEQ ID NO: 82115 - DNA, 3006 bp, Oryza sativa
  Clone ID: PAT_MRT4530_81577C.1
atggcacggggctccgcaccgctcgacggtagcatgctgccgccttctcgcatcgtgagcgagaggcaggccgggctgccgcgccgattcatgccggaatctgccaccggccgggaggtggtcgcgctgggtgagggacgcccggcgccacactacccggggcggtccgtattcttcctttcctttgcaatggcagggctggtcccgccattctcttctttcttcatggatgttctggagctttatgatctccagatggcgcacctcacccccaacgcggtaatgacgttggccatcttcgcgcacctgtgcgagatgttcatcggggtgcgcccatctctccggctgttccgatggttcttcaccgtacagccggtgtcgccaccgtcggtagtcggtggctgctacttccagccgcgggggccggtgctgaaccgctacattccctgcgtccttcgcaagaagtgggacgactggaagagcgactggttctacacccctctcgccgacgaagcgcgcctccgacttccgaaccagcccccggcgcaggcctccagctggcgggcgccggtagatctgggagacggctacgacgccgttcttgaccgcctggctggtctgcgatcccaggggctcacggggaccatggtgtacggcgattaccttcatcgccggatcgcgccactccagcggcgcgcccggggcgcctgggagtacaccgggtccgaggactacatgaggacccaccagggggtcaaatgggactgggtccctgaagacttcaagatggtgatccaacgggtgctgaatctcagctccgtggaggcatccctcatcccccaaggtgtcctccccctctgcagcgatccagagcgcgccaacatcctgaccatcatgcaggcggtcggggcgtcaggggagcgggctcctcgaggccacgatggcgcgggcgggagccgcaggggggaacaatctaccccgagagggggtcgtgcttctgggccccgtgacgggggcccggggggcagccgccctgccgacgcccgggggaagaggaaacaggaggataccccctccccatctcctccccgagggggcggggcggtgcgtgccagcagcaggcgcccggagggtgctgtgccgacgtcgcagcccgaggaggagcgaaaaaagaagcggctccgcaagatgggggggaccgaaccatgccggggaaacctcatctccccccccaagatcccgtcgcgcccttcccgccattccaagtccggccggtctgaggtcgaggagacggcgaccgcggaggcccggaggcgggaagctgaccggcgagaagccgcagaccgcctccgggaagccgaagaagctgcccaggaggccgtccgggctcgccaggctgaggaagccgcttgggaggaggccagactccgccgggccgaggagtccgtccgggagacggaggcggcgcgcacacgccgggcggcctgccaagcccccgacccgactccgcccgaggcgacaacgacttccgaggccacccacgacgaggccgcgggcgcgccgctcgggcccgacccctctggcgacgttcgggacgagcccgcgtcgggggacgcccccgagttcggcacgtcgatcggcgggccgagccgcgcggcgcccacaccgaggcggctctcccctctgccttccgctgccccactgagcgcagagcccctcctgcaggccttggccgctgcgaacaccatggtgttggacgggttaagcgcccagatggaagtcctgcaggcagagcgggcggaggtcgatgcggcgtgggcgcgcgtcgaagagggacggcgctcggtggaagccatggtggaggcgggccgcaaggcacaccgccggcacgcctccgagctcgaggcccgtcgtagggacctggcggagatcgccagggaggtggaggaggagcgggagactgccctcatcgccaccgccgtgttcaacgcggcgcaggacgacctctgcctccaatacgggagccgggcggcggagctagagaagaagctcgacgcgtcccggcagcgcgaagaggcccttgaggctcgcgccacggtgctggaggagcgcgcccgcgccctggacacgaaggagagggaactggcgggtcgcgaggccgccgtcgccatccgggaggcaacgctggcggcgcacgaggccgcctgcgccgaagaggagtccgcactccgcctccgtgaggacgagctcactgagtgggagcgagctctcgaggaggccgaggccgcggcgcagcggcgggaggagcaggcgcgcctcaatctggaaggcgcccgcgcagagagggccgcactggatcagcgggctgctgaattcgaggcgcgggtgaaggagctggacgcgagagcgcgcagcggcggggcggccgcgggcgacggcgacctagccgcccgcctcgcagccgccgaacacaccatcgccgagctgcagggcgcgctggactcgtccgccggggaggtcgaagccctccgcttggcgggcgaggtagggcccggcatgcttcgggacgccgtctcccgtctagaccgtgccgggcggcaggcgggcctctggggcgggcggaccgcgaaatacgccgccaaccaggggggcctcgcccagcgcctctcagagatggccgggaccctccagcggctccccgaggagctcgaggagacgatcaagtcatcctcgagggacctcgcagggggggcggtggagctcgtactggcaagctaccaggctagggaccctgacttctccccgtgggcagcgctggacgagttccctcttggaaccgaggatggcgcgcgcgcgcaggtccgggacgccgccgaccacatcgtccacagcttcgagggtacggcccctcggctcgcgttcgccctcgactccgacgaggagggcggtgacggtggtgcggacgtcagcgacgatgaggccggcgacccgggcgcgtcggcgtga

SEQ ID NO: 82116 - DNA, 332 bp, Oryza sativa
  unsure (1)..(332): unsure at all n locations
  Clone ID: PAT_MRT4530_81578C.1
cgaagttctccatgaacatcatcagtgactgagatgcatgccacatgccgttaagagctgtcacggctttacatgagactagcatattcgatctagtagtagaacatgttgtgtataaactgtacctggtagaaatataaactttggaantcacgagctggtgctgtcctgtatgttgtgcaatcttttttttttcttttactgtatagaggtaatgtattgtatttgtatatgttatcaacaccaggtgtggtgttatttttgtaacccttctgatatggctgtagaaatgaaacagttctgtacaagatttgtaaaaaaaaaaaaaaaaa

SEQ ID NO: 82117 - DNA, 615 bp, Oryza sativa
  unsure (1)..(615): unsure at all n locations
  Clone ID: PAT_MRT4530_81579C.1
cccgactccgcactgctgctgctggtggtgtgggttcgcttnccactcactcacacacccacacacactatcctnctcctcctcgncgncgcgacgccgnctttctctccaccgcgatttctatatataaaacgnccccaaaaataccttggcnctcncttactncaccggatctacaccgccaacgcacaaaacacnncatcggatcttgtgggcttgcggctgncggagatcgatggcgcggtggncgaggccagcgctggtgttgctgctcgccgccgcgctgctnctatgnacattgcgnntggaccctncgncgcggcgnnggggaaggttaaggggaagggtgncgncgggcggaaggcgccgacgtncgnagatggaggggaggaggaggaggnnctnctcttctcantctgggctcttcancttctccacctgtnctanacttgctttggggnnnanttnnccccgactggggncangaacaaagccattgactatgataacttnattgaatgctgnctnacagtnaaggggctgactggagaagtnnaggaataagacccagccttctcgggctctggnacttntacttacgaagctttnatgctg

SEQ ID NO: 82118 - DNA, 358 bp, Oryza sativa
  unsure (1)..(358): unsure at all n locations
  Clone ID: PAT_MRT4530_8157C.1
acgaggaaccccgggcttatattttaacttccgaaccacaaaatgggggaaaattcaggggaggggaccgccaagggggggaaaaccacccggggccctaaaggacccggggggggacccatttgttgatgggttgttaaaagccaaaagggctggggccggggccagattccgggcaagggggaaaccgccaaaccgggggggggggggcgggggggccagggccttttttttttttangccccggnngggaaaagggggggccaccaggggggggggggggggggcctggccccctccccanttgaaacaaagttgtttgcaagaaggggcttgccccaatgccggacccgggggg

SEQ ID NO: 82119 - DNA, 3057 bp, Oryza sativa
  Clone ID: PAT_MRT4530_81580C.1
atggcacggggctccgctccgctcgatggtagcatgctgccgccttcccgcatcgtgagcgagaggcaggtcaggctgccacgccgcttcatgccggaatctgccaccggccgggagatagtcacgctgggcgagggacgcccggcgccacactacccggggcggtctgtcttcttcctcccttttgcaatggcagggctggttccgccattttcttctttcttcatggatgttctggagttttacgacctccagatggcgcacctcacccccaacgcggtaatgacattggcaatcttcgcacacctgtgcgagatgttcatcggggtgcgcccatcccttcggctgttccggtggttcttcaccgtacagccggtgtcaccgccgtcggtggtcggtggctgctacttccagccgcgggggccggtgctgaaccgctacattccctgcgtcctccgcaagaagtgggatgactggaagagcgactggttctacacccccctcgccgacgaagcgcgcctccgacttccgagccagcccccagcgcaggcctccaactggcgggcgccggggctcacaggggtcatggtgtacggtgactaccttcgtcgccggatcgcgccactccagcggcgcgcccggggcgcctgggagtacaccgggtccgaggactgtatgaggacccaccggggggtcaaatgggactgggtccctgaagacttcaaggtaatgatccaacgggtgctgaatcttagctccgtggaggcatccctcatcccccaaggagtcctccccctctgcagcgatccagatcgcgccaacatcctgaccatcatgacggcggtcggggcctcagaggagcgagctcctaagggccatgatggtgcaagcgggagtcgcaagggagatcaatctaccccaagagggggtcgtgcttccgggccccgtgatgggggctcggggggcagccgccctgccgacgcccgagggaagaggaagcaagagggtacctcctccccatctcctccccaagggggcggggcggcgcgtgtcagcagcaggcgcctagagggggccacgccgacgccgcagcccgagggggagcggaagaagaaacggctccgcaagatgggggggacagaaccatcccggggaaaccttatttcccctccaaggtggtcgtttaaccgaccccctcgcaggcgggaatctgaccggcgagaagccgcggatcgcctacgggaagccgaggaggccgcccgggaggccgcccgggctcgccaggctgaggaagccgctcgggaggaggccagactccgccagaccgaggcgacgacatcctccgaggcaacccacgaaactgatcggcaagaagccacggatcgccttcgggaagtcgaggaagctgcccaggtggccgtccgagctcgccaagctaaagaagccgctcgggaggaggccagacttcgccaggacgaggcggcgacgacttccgaggcagctcgcgacgaggccgcgggcgcatcgctggggcccactccctcgggcgacgctcgggaccaaccaggtccgggggacatccccgagtccggcacgtccatcggcgggccgagccgcgcggcatcctcaccgaggcggctctcccccacgccttttgctgccccactgagcgcagagccccttctgcaggccttgtccgtcgcaaacaccacggtgttggacgtgttaagtacccagatggaggccctgcaagcagagcgggcggagctcgacgccgcatgggcgcgtgtcgaagaggggcgacgctcagtggaggccatggtggaggtgggccgcaaggcacaccgccgacacgtctcagagctcgaagcccgtcggaaggtgctgggggagatcgccaaggaggtggaggaggagcggggggctgccctcatcgccactaccgtgatgaacgaggcgcaggacgccctccgccttcaatacgggagctgggaggcggagctagggaagaagctcgacgccgcccggggggtccttgacgctgccgctgtccgagaacggcgggcggcggagaccgaggcggcatcccggcagcgtgaagaaaccctcgaggcccgtgccatggcgctggaagagcgttcctgcgtcatggtgaaggatctggcggaccgtgaggccgccgttgccattcgggaggtcacactgacggtgcacgaagccgcctgcgccgaagaggagtccgcactccgcctccgcgaagatgcgctcatcgagcgggagcgagccctagaggaggctgaggccgcggcgcaaaggctggcggagagcgcgtccctccgtgaggctgcgctagaggaacaagcgcgtcgcaatctggaaagtgcccgcgccgagagggccacactgaaccagcgggccgccgaactcgaggcgcaggcgagggagctggatgcaagggcgcgtagcggcggggcggccacgggcgacagcgacctagccgcccgcctcgcagctgccgaacacaccatcgcggatctgcagggcgcgctggattcgtccgccggggaggtcgaggcccttcgcctggcaggcgagatagggcccagcatgcttcgcgacgccgtgtcccgtttagaccgcgccgggcggcaggcgggtctctggggcgggcggactgtgaagtacgccgccaaccaggggggcctcgcccagcgcctctcggagatggccgggactctccagcggctccccaaggagctcgaggggacgattaagtcatcctcgagggacctcgcccgaggggcggtggagctcgtactggcgagttaccaggccggggaccccgacttctccccctggacagcgctggacgagttccctcctgggactgaggacggcgcgcgcgcgcaggtccgggatgccgccgaccatatcgtccacagcttcgagggttcggcccctcggctcgcgttcgccctcaactccgacgaggagggcgatggcggcggtgtgggcgacagtggcgacgaggctggcgacccgggtgcatcggagtga

SEQ ID NO: 82120 - DNA, 1520 bp, Oryza sativa
  Clone ID: PAT_MRT4530_81581C.1
atggtcatcctcacctctccccctctctctctctttttcatcttttctctcctctcactttccatcactggaggcggggcggcggcggcagtgacggcgtatgggggaggagctcgcaggccatccgcgcacgctccaggagctttttcagagaaggtggtaccaccatcttctgtgtcttcgtcggatttggatccgctgttgaaggatcttacagagaagaagttaagctttaggagaaacgtggtgtctttggcggctgagctcaaggatgtgaggaacaaacttgcttcacaggagcagttgtttgttcgggaatcccaaaccagaaagtttgctgagacaaaggcgaggagcatggaggaagaaatcagtaagctgcagaaatgcttgaatgataaagatgagcaactgcgttcgtcgacaggttgcacagaacagatgcacttcctcaataactattctaattatgtgcagtacttccacgagttggacgatcttagatcgaaactgtcagtcacccaagctacagcagaagcaagtgctgcatcagccaaatcagctcagtcacaatgcttgtcattattaaaagagctgaatgagaaggacagctcgctaaaagaacacgagcgtcgagtcaacaagctaggtgagcagctggatcatctccagaaggatcttgaatcaagggaatactcacagaggcaactcaaagatgaagttttgaggatcgaaacagatatcatggatgcagttgccaaagttgggtctaacaaagataatgagcttctaaagatcttatctgatgtatcaccaaggaacattgataatctcaataaacttctgaacgctaaggatgcagagattgccagattgagagatgaaattaggatattatctgctcactggacgaacaaaacaaaggaactagagtcacagttggagaaacaaaagagaaccgaccaggaactgaaaaagagaattctaaagcttgaattctgccttcaggaatcacggtcccagataagaaaacttcagagagctggtgagaaaagagacaagcaactgaaggagctgaaggatcaggtgggcatgaagcaacccagtgtcccataccgtgatgacaagcacaacttctgggagaaccagagcttcaagttcatcgcctccatgtcaatgctcgcactagtgatgctcacaaagcgatgaaacagcatcctgtgtaaagaatgctacttagtagtatattccagtgttaggtgagccccttgctcatagtctatagttcaggaagccagagatgtagtcaagtaggtcattgctgcatgatcagtcgtcagatgatgccccaactgaatttgccgacatccaagattagtctgtagtattgtagtactgtagtgcagttgctgctagcttatgtaagctcataattaagcaatattgtagttacagatctaccttaatttatgtctggccgcgttgcggttatgttaatgctggcatggttcgcttgttct

SEQ ID NO: 82121 - DNA, 1870 bp, Oryza sativa
  unsure (1)..(1870): unsure at all n locations
  Clone ID: PAT_MRT4530_81582C.1
caagatcccgtcgcgcccccctcgccattccaagtccggccggtccgaggccgaggagacggctaccgcggaggcccggaggcgggaagctgaccggcgagaagccgcggaccgcctccggaaagccgaggaggctgcccaggaggccgtccgggtttgccaagctgaggaggccgctcgggaggaggccagacttcgccgggccagggagtccgtccgggaggcagaggcggcgcgcgcacgccaggcggtttgccaagcccccgacccgacttccgccgaggcgacgacgacttccgaggccacccacgacgaggccgcgggcgcgccgctcgggcccgacccctcgggcgacgcttgggacgagccagcttcggngggcgcccccgagtccggcatgtcgatcggcgggccgagccgcgcggcacccacaccgaggcagctctcccttttgccttccgctgccccactgagcgcggagcccctcctgcaggccttggccgccgcgaacaccacggtgctggacgggttaagtgcccaaatggaggtcctgcaggcagagcgggcggagctcgacgcggcgtgggcgcgcgtcgaggaggggcggcgctcggtggaggccatggtggaggcgggccgcaaggcacaccgccggcacgcctcagagctcgaggcccgtcgtagggacctggcggagatcgccagggaggtggaggaggagcgggagactgccctcatcgccaccgccgtgctcgacgaggcgcgggacgacctccgcctccaatacgggagccgggcggcggagctagagaagaagctcgacgccgcccggggagtccttgacgccgccgctgcccgggaacggcgggcggcggagaatgaggcggcgtcccggcagcgcgaagaggcccttgaggctcgcgccacggcgctggaggagcgcgcccgcgccctggacgcgaaggagagagacctgacgaaccgcgaggccgccgtcgccaccagggaggcaacactggcggcgcacgaggctgcctgcgccgaagaggagtccgcactccgcctccgcgaggacgagctcaccgagcgggggcgagctctcaaggaggccgaggccgcggcgcagcggctggcggacagcctgttcctcagcaaggcagcgcgggaggagcaggcgctccgcaatctggaaggcgcccgtgccgagagggccgcactggatcagcgggccgctgagctcgaggcgcgggtgaaggagctggaggcgagagcgcatagcggcggggcggccgcgggcgacggcgacctagccgcccgcctcgcagccgccgaacacaccatcgccgagctgcagggcgcgctggactcgtccgccggggaggtcgaggccctccgcttggcgggcgaggtagggcccagcatgcttcgggacgccgtctcccgtctagactgcgccgggcggcaggcgtgcctctggggcggccggtgcgcgaagtacgccgccaatcaggggggcctcgcccagcgcctctcagagatggccggggtcctcaagcggctccccgaggagctcgaggagacgatcaagtcgtcctcgagggacctcgcccggggggcggtggagctcgtgctggtaagctaccaggccagggaccctgacttctccccttgggcagcgctggaagagttccctcccagaaccgaggacggcgcgcgcgcgcaggtccgggacgccgccgaccacatcgtccacagcttcgagggtacggcccctcggctcgcgttcgccctcgactccgacgaggagggcggtgacgacggtgcggacgacagcgacgacgaggccggcgacccgggcgcgtcggaatga

SEQ ID NO: 82122 - DNA, 4824 bp, Oryza sativa
  Clone ID: PAT_MRT4530_81583C.1
atgggttccgtctccggcatcgacgacttcgtctttctcccgggcaggcgttccggttcggcagtctagacttcatcaccaacgacttcggcaagatttctctcctcgactcggattcgaaccagtcgggaagaggccggatctccgctctgttcggtatcccgaactcggccgagatctaccccaaggtcatctccgacgagtcggtttcaaaccactcggacgagatccaatctacttcaacgccaccagatcaagacgataggtcctacccgccaatcctgatgaaactccccgatgatctggctgccgtctttattacaaggatgtcttctccccgtaggcctaggcaggatccggcttcagcaccgatccggcctagctctagggaagtcggcatcatactccagccactcggcacggtttcgacggatcaattggaaggctacttcagctcccccggtgtcgactcacaaccaacagagatcgtagagtatgatgaattcggctattgttacgacgaccacaacctcgacgacttcgccgaaagctttgaagataactacacccctctctacttcggcgtcttcatggccgacaacgagacggaagaacagcgccaagcccgagaagcagaaggacgacgcgtacaacaggaggccgagcaatgccgactggaagaggagcgccaagcacaagagcaagaatggctgcagcgtgagcaacaggaacgtgaacgggctgcaaaggaggctaaggaccgatgacaaagagccttagacgcagggcgacgagcgcgagaacttatcgggcagcaagacgttgaggggacagcggtcttccgcaccccccaacagaacgcggttgcggcgatcactctcctcgacaccctcctcaaggaagacacactcaaccaagccgatcacgtcgtcaacttcttgaaccagaccaagaccatgattgccgcctcggtcccggttaactccgcaagcgtccgcacaccgactggcagccgagtcccccatcttcgatctcaagattatcaccagccaagccttagcatcgccggcgcgggatccaaccgcaggagcaggggtcacgacgagcgatcggtccactcgcctcccgaacgacacagggagcgccgagttgaacggcctcgctccccacctcgtaggcgccccgtcgatcttcgtgatacaatcaaccagcgccgcgcagcacgaggctacgcccaccgccactcaccggatggctatgacgacgacgtggatggagttgctgcctttactaatgacctgcgtcgagtggattggccagccggcttcaagccaactggaatcgagaagtatgacggcaccactaatccggagtcttggctcaccgtctacggtctcgcaattcgcgcagcaggaggagacagcaaagccatggcaaactacttgcctgtggctctagcggattctgcccgatcctggcttcatgggttaccccgtggcatgatcggatcatgggcggaacttcgcgaccacttcatcgccaacttccagggcacctttgaacgccctggcacacagtttgatctctacaacgtcattcagaagtctggagaatcccttcgagattatatccggcgcttttctgaacaacgcaacaagatctctgacattaccgatgacgtcatcattgccgctttcaccaaggggattcgtcacgaggatctagtcggcaacttcgggcgcaagcctcccaggacggtcaagcagatgttcgagaaagccaacgagtatgccaaagccgaagatgccatcatcgcgtccaagcagtcgggtaccacttggaagccaaagaaagatgcgctgattacgggagggggtggaagtaccaatcacaaggaccgtaagcgtaagcccgaggaacttgttgcgactactacaccctcctcccgacaatgttcacgcgtcaatacttttgacaagatcatgaagtcccaatgtccgcatcatcccaactccaatcattcagccaaagattgcttcgtatacaaacagtttgcagaacaatacgccaaaaatgcacggaaggcctccgacagagatcaaagcacgtcaaaaaagaaggatgacgacgatgatgccccgacaggttttcaagaccattgcaaggagctcaaccacatctttggcggacctctggcttatgagtctagaagaaaacaaaagctgaccgaacgggagattaacgctgttcagcccgatacgccccaatatcttcggtggtcggagacagcaatcaagtttgaccgctcggatcatccagaccgagtggtccacccggggcggtaccccctggtactagacccagtggttcgcaacgtcaagcttcgcagatccctcattgatggcggcagtgcactcaacatcctcttcgccaagaccctggacgacatgcagatacctcgcacggaattgaaactgagtaatgcaccctttcacggagtcatcccagggctgtctgctacgccactcggccagatcactcttccggtcacctttggtactcgggaaaacttccgcacagaaaacgtctgctttgaagttgctgatttcgagacagcgtatcatggcatactcgggcgcccggcgttagccaaatttatggctgtcccgcactatacctacatgatgatgaagatgcctggtcctcgaggagtcatatccctgcggagcgacatcaaacaagccatcacatgcgacaaggaaagctgcgagatggcccaaacccgagagatcgcgatcgcccgagaagacatccgactggctgcaaccacggcaagcgaaggagaagtgcctgcaaccaaggtctcaaagagtggagaaagcgaagccaagaccaagaaaattcctttagatccttctgatcctactaagactgctaataataaagatatctttgcgtgtaaaccatccgatatgcctggtattcctagagaggtgattgagcactctttacacgttaaggaagacgctaaacccatcaaacaacgactccgccgctttgcacaagacaggaaggacgcgatcaaggaggaattgaccaagctgttagcagcaggcttcatcaaagaagtccttcatcccgactggctggctaacctagtcctagttcggaagaagaccgggcaatggcgcatgtgtgtcgattatatcgacctcaacaagtcttgccccaaagatccttttgtgttgcctcgcattgaccaggtagttgactcaacggccggctacgagctactcagctttttggattgctactcaggttatcaccagatccgactaaaagaatacgactgcttaaagacttcattcatcacgcccttcggggcatactgctacatcaccatgcctttcggattaaagaacgcaggagcaacttatcaacgcatgatccagagatgtttttcaactcagatcggtcgcaacgttgaagcttatgtggatgatgtagttgtcaagaccaagcagaaagatgatttgatcacggacctagaagaaacctttgcgagcatccgcgctttcaggatgaaattaaaccctgaaaagtgcaccttcggagtaccgtcagggaagctacttggatttatggtgtctcatagaggcatacaagccaacccagagaaaatcaatgccatcctcaacatgaaaccgccgagctcccagaaagatgtccaaaagctgactggttgtatggcggcgctcagtcggttcgtttcacgactcggcgagcgggggatgcccttcttcaagctattaaagaaaacagacaatttccagtggggacccgaagcgcagaaagcctttgaagacttcaagaaactactcaccactccaccagttttggcctcaccacatccgcaagagccgctattgttgtacgtatcggcaacttctcaggttgtgagcacggtcctggttgttgagagtgaagaagaagaccatgttcagaaagtccaacgaccaatctacttcgttagcgaggttttggccgactctaagacgagatatcctcaggtccagaagctattatatggtgttttaattaccgtcaggaaattatctcactacttccaaggtcactcggtcacggtggttacatcgttcccactcggagatatacttcataatcgtgaagcaaatggacgaatcacaaagtgggccttagaactgatgtccttggacatatcgttcaagccatgaacttcgatcaagtcccaagccttagctgactttgtcgccgagtggaccgagtgtcaagaagatatgcccgaggagaagatggagtattggaccatgcactttgatgagtcgaagagactttcgggcactggagctggggttgttttaatttccccgactggagaaagactgagctacgtgctctggatacatttttctgcatctcacaacgtggcggaatacgaggcgctccttcacggactacggattgcaatctctttgggaattaggcgtttgacagttcgtggagattcacagttggttgttaatcaagttatgaaagagtggtcttgccttcatgacaacatgaccgcttatcgacaagaggtaggcaagttggaggataagttcgatggacttgaactcacccatgttcttcggcacaataatgaagcagctgacagactagctaattttggatcaaaacgcgaagcaactccttccgacgtgtttgtcgaacatctttacgaaccaaccgtaccaagaaaagaaacagctgaggccatgtctaagcatggctaagcaatta

SEQ ID NO: 82123 - DNA, 2679 bp, Oryza sativa
  Clone ID: PAT_MRT4530_81584C.1
atggcgcacctcacccccaacgcagtaatgacgttggccatcttcgcgcacctgtgcgagatgttcatcggggtgcgcccatctctccggttgttctggtggttcttcaccgtacagccggtgtcgccaccatcggtagtcggtggctgctacttccagccgcgggggccggtgctgaaccgctacattccctgcgtccttcgcaagaagtgggatgactggaagagcgactggttctacacccctctcgccgacgaagcgcgcctccgacttccgagccagcccccggcgcaggcctccagctggcggacgccggtagatctgggagacggctacgacgccgttcttgaccgcctggctggtttgcgatcccaggggctcacgggggccatggtgttcggcgactaccttcgtcgccggatcgcgccactccagcggcacgcccggggcgcctgggagtacaccgggcccgaggacatcatgaggacccaccaggggcgcaaatgggactgggaccctgaggacttcaggatagtggtccaacgggtgctgaatctcagctccgtggaggcatccctcatccctcaaggggtccttcccctctgctgcgatccagagcgcgccaacatcctgaccatcatgcaggaggtcggggcgtcgggggagcgggccccccgaggccacgatggcgcgggcgggagccgcaggggggaacaatctaccccgggagggggtcgtgcttctgggccccgtgacgggggcccggggggcagccgccctaccgacgcccgggggaagaggaaacaggaggataccccctccccatctcctccccgagggggcggggcggtgcgtgccagcagcaggcgcccggagggtgctgtgccgacgtcgcagcccgagggggagcgaaaaaagaagcggctccgcaagatgggggggaccgaaccatgccggggaaacctcatctcccccccaaggtggtcgtttagccgacctcctcgcagcgagatcccgtcgcgcccttcccgccattccaagtccggccggtctgaggccgaggagacggcgaccgcggaggcccggaggcgggaagctgaccggcgagaagccgcaatccgcctccgggaagccgaggaagctgcccaggaggctgtccgggctcgccaggctgaggaagccgcttgggaggaggccagactccaccgggccgaggagtccgtccgggagacggaggcggcgcgcgcacgccgggcggcctgccaagcccccgacccgactccgcccgaggcgacgacgacttccgaggccacccacgacgaggccgcgggcgcaccgctcgggcccgacccctcgggcgacgctcaggacgagcctgcttcgggggacgtccccgagtccggcacgtcgatcggcgggccgagccgtgcggcatccttaccgaggcggctctcccccatgccttccgctgccccactgagcgcggagccccttctgcaggccttggccaccgcgaacaccacggtgttggacgggttaagtgcccagatggaggtcctgcaggcagagcgggcggagctcgacgcagcgtgggcgcgtgtcgaagaggggcgacgctcggtggaggccatggtggaggcgggccgcaaggcacaccgccggcacgcctcagagcttgaggcccgtcgtagggacctggcggagatcgccagggacgtggaggaggagcgggagactgccctcattgccaccgccgtgtttaacgcggcacgggacgacctctgcctccaatacgggagccggggggcggagctagagaagaagctcgacgcgtcccggcatcgtgaagaggcccttgaggctcgcgccacggtgctggaggagcgcgcccgcgccctagacacgaaggagagggaactggcgggtcgcgaggccgccgtcgccatccgggaggcaacgctggcggcgcacgaggccgcctgcgccgaagaggagtccgcactccgcctccgcgaggacgagctcactgagcgggagcgagctctcgaggaggccgaggccgcggcgcagctgcgggaggagcaggcgcgcctcaatctggaaggcgcccgcgccgagagggccgcactggatcagcgggccgctgaattcgaggcgcgggcgaaggagctggacgcgagagcgcgcagcggcggggcggccgcgggtgacggcgacctagccgtccgcctcgcagccgccgaacacaccatcgccaagctgcagggcgcgctggactcgtccgccggggaggtcgaggccctccgcttggcaggcgaggggggcctcgcccaacgcctctcagagatggccgggaccctccagcggctccccgaggagctcgaggagacgatcaagtcatcctcgagggacctcgcccgggggacggtggagctcgtactggcaagctaccaggccagggaccctgacttctccccgtgggcagcgctggacgagttccctcctggaaccgaggatggcgcgcgcgcacaggtccgggacgccgccgaccacatcgtccacagcttcgagggtacggcccctcggctcgcgttcgccctcgactccgacgaggagggcggtgacggtggtgcggacgacagcgacgacgaggccggcgacccgggcgcgtcggcgtga

SEQ ID NO: 82124 - DNA, 2355 bp, Oryza sativa
  Clone ID: PAT_MRT4530_81585C.1
atggcgcacctcacccccaacgcgataatgacgttggccatcttcgcgcacctgtgcgagatgtttgtcagggtgcgcctatctctccggctgttccggtggttcttcaccgtacagccggtgtcgccgccgacggtagtcggtggctgctacttccagccacgggggcaggcctccaactggcgggtggcggtagatctgggagacggctacgacgccgttcttgaccgcctggcgggtctgcgatcccaggggctcacgggggccatggtgttcggcgactaccttcgtcgccggatcgcgccgctccagcggcgcgcccggggcgcctgggagtacaccgggcccgaggacatcatgaggacccaccaggggcgcaaatgggactgggaccctgaggatttcaggatggtggtccaacgggtgctgaatctcagctccgtggaggcatccctcatcccccaaggggtcctccccctctgctgcgatccggagcgcgccgacgtcctgaccatcatgcaggagcgagatcccgtcgcgcccccccgccattccaagtccggccggtctgaggccgaggagacggcgaccgcggaggcccggaggcgggaagccgaccggcgagaagccgcggaccgcctccgggaagccgaggaggctgcccaggaggccgtccgggttcgccaggctgaggaggccgctcgggaggaggccagactccgccgggccggggagtccgtccgggaggcagaggcggcgcgcgcacgccaggcggcctgccaaacctccgacccgactccgcccgaggggacgacaacttccgaggccacccacgacgaggccgcgggcgcgcggctcgggcccgacccctcgggcgacacttgggacgagccagcctcgagggacgcccccgagtccggcacgtcgatcggcgggccgagccgcgcgtcgcccacaccgaggcggctctcccctctgtcttccgctgccccactgagcgcggagcccttcctgcaggccttggccgccgcgaacagcacggtgctggacgggttaagtgcccagatggaggccctgcaggcggagcgggcggagctcgacgtggcgtgggcacgcgtcgaggaggggcggcgctcggtggaggccatggtagaggcgggccgcaaggcgcacctccggcacacctcacagctcgaggcccatcatagggacctggcggagatcgccagggaggtggaggaggagcgggagactgccctcatcgccaccgccgtgctcgacgaggcgcgggacgacctccgcctccaatacgggagccgggcggcggagctagaggagaaactcgacgccgcccggggagtccttgacgccgccgctgcccgggaacggcgggcggcggagaacgaggcggcgtcccggcagtgcgaagaggcccttgaggctcgcgccacggcgctggaggagcgcgcccgcgccctggacacgaaggagagagacctggcggaccgcgaggccgccgtcgccacccgggaggcaacactggtggcgcacgaggccgcctgcgccgaagaagagtccgcactccgcctccgcgaggacgcgctcaccgaacgggagcgagctctcgaggaggccgaggccgcggcgcagcggctggcggacagcctgttcctccgcgaggcagcgcgggaggagcaggcgcgccgcaatctggaaggcgcccgcgccgagagggccgcactggatcagcgggccgctgagctcgaggcgcgggcgaaggagctggacgcgagggcgcacagcggcggggcggccgcgggccacggcgacctagccgcctgcctcgcagccgccgaacacaccatcgccgagctgcagggcgcgctggactcgtccgccggggaggtcgaggccctccgcttggcgagcgagaccgcgccgggcggcaggcgggtctctggggcgggcggcacgcgaagtacgccgccaaccagggggggcctcgcccagcgcctctcagagatggccggggccctccagcggctccccgaggagctcgaggagacgatcaagtcatcctcgagggacctcgcccggggggcggttgagctcgtactggcaagctaccaggctagggaccctgacttctccccgtgggcagcgctggaagagttccctcctggaaccgaggatggcgcgcgcgcgcgggtccgggacgccgccgactacatcgtccatagcttcgagggtacggcccctcggctcgcgttcgcgctcgactccgacgaggagggcggtgacgacggtgcggacgacagtggcgacgaggccgacggcccgggggcgccggagtga

SEQ ID NO: 82125 - DNA, 352 bp, Oryza sativa
  Clone ID: PAT_MRT4530_81586C.1
gggacacatgggcacgcccatcgccataggtttcatagccggcgccgacatactcgtcgtcggggccttctgcggcggctacatgaacccggagcgctccttcggtcccgtcgacgccagcggcgactacaccaacatctggatctactgggtcggccccctcgtcggaggcggacttgccggactggtctaccggtacgtgtacatgtgcggcgaccacacccacgctgccagcggcgagtgctaattacccatttcgacgatagctacacgcataagaatggtgggcactgcatggtcagaatcttgagaggatgggtggcgaatgactgatacggctcatatggggaag

SEQ ID NO: 82126 - DNA, 3960 bp, Oryza sativa
  Clone ID: PAT_MRT4530_81587C.1
atgggttccgtctccggcatcgacgacctcgtcttccctcccgggcaggcgtttcggttcggcagcctcgacttcatcaccaacaacttcggcaagatctctctcctcgactcggatccaaaccagtcgggaaagaaacaggtctcagccccgttcggtattccggactcggccaacatctactccaagcttatctcgattgagtcggcttcaaaccactcggacgagatcccatctactccgacaccaccagatcaagatgatggggcctacccgccaatcctgatgaaactccccgacgatttggctgccgtcttcactacaagggcgtcttctccccgtaggcctaggcggaagtcggcttcaacaccgatcctgcctagctccaaagaagtcggcgtcatactccagccactcggcacaatttcgacggatcaactggaaggctatttcagctcccccggcgtcgactcacgaccaacagagatcgtggagtacggcgaattcggctaccgctacgacaacagcaacctcgacgacttcgacgagagctttgaagacaattacacccctctctacttcggcatcttcatggccgacaacgagacgaaagaacaacgccaagcccgagaagcagaagcacgacacgtacagcaggaagcccagcgacgccgactggaagaggagcgccaagcacaagagcaagaacggctgcggcgagagcaacaaaaacgcaaacgggctgcaaaggaggccgaggaccgacgacaacgagccttggacgcagggcgacgagcacgagatctcatcaggcagcaagacatcgaggggacagcggtctttcgcacccctcaacagaacgctgtcgctgcgagcacccttctcgacaccctcctcgaagaagacgcactcaatcaagctgatcacgtcgtcaacatcttgaaccagaccaagaccatgatcgccgcttcggtcccgcaccgtgcagcacgaggtcaccgccattcaccagatcgctatgacaacgatgtggatggagtggctgcctttactaacgacctgcgtcgagtggattggccagccggcttcaagccgactggaatcgagaagtatgacggcaccactaatccggagtcttggcttaccgtctacggtctcgcaatccgtgcagcaggaggagacagcaaggccatggcaaactacttacctgtggccctagctgattctgcctggaattcgccacgaagatctagtcggcaagttcgggcgcaagcttccaagacagtcaaacagatgtttgaaaaagccaacgaatatgccaaagccgaagacgccattatcgcatccaagcagtcgggtcctacttggaagccaaagaaagatgcgccgactacgggagggggtggaagtaacaatcacaaggaccgcaagcgtaagcccgaggaactcgtcgcgactactacacactcctcccgacaacgttcgcgcgtcaacacttttgacaagatcatgaactcccaatgtccgcatcatcccaactccaaccacggagctaaaaattgcttcgtctacaagcagtttgcagagcaatatgccaagaatgcacggaagacccctgacggagaacaaagcacgtcgaaaaagaaggatgatgatgatgatgccccgacagggcggtaccccctggtactagacccagtggttcgcaacgtcaagcttcgcagatctctcatcgatggtggcagcgcactcaatatcatcttcgccaaaaccctggacgacatgcagatcccgcgcaccgtgttaaagccgagtaacgcacccttccacggagtcatcccagggctatcagcaacaccactcggccagattactcttccggtcacttttggtactcgggagaacttccgcacagagaacatctgcttcgaagtcgccgatttcgagacagcgtatcacgccatactcggacgcccggcgttagccaagttcatggtcgtcccgcactacacctacatgatgatgaagatgcctggtcctcgaggagtcatatccctacggagcgacatcaagcaagccgtcacatgtgacaaggaaagttgcaagatggctcaaacccgtgagatcgcgattgctcgagaagacatccgactggctgcaaccacggcaagcgaaggagaaatgcttacggccaagatctcaaagagtggagaaagcgaagccaagaccaagaaaattcccctaaatccttctaatcctactaaaactactgtaataggcgcggagttagatttcctagttcggaagaagactgggcaatggcgcatgtgtgtcgatcacaccgacctcaacaagtcttgccccaaagatcctttcgggctgcctcgcattgaccagatccgattgaaagaatccgactgcttgaagacttcgttcatcacgccctttggggcctactgctacatcaccatgcctttcagattgaagaacgcgggagcaacttatcaacgcatgatccagagatgtttctcgactcagattggtcgcaatgttgaagcctatgtggatgatgtagtcgtcaagaccaagaaattatcccactatttccaaggccactcggtcacggtggttacatcatttccactcggcgatatactccataatcgtgaagcaaacgggcgaatcgcaaagtgggccttagaattgatgtccttggatatatcgttcaagcggcgaacttcggtcaaatcccaagctttagccgactttgtcgccgagtggaccgagtgccaagaggacaagcccgaggaaaagatcaagtattggactatgcactttgacgggtcaaagagactttcaggcactggggtcggagttgttttaatttccccaactggagaaagactgagctatgtgctatggatacatttttctgcatctcacaacgtggcagaatacgaggcgctcctccacggactacgtatcgcaatctatttgggaatcaggcgtctgatagttcgcgaagattcacagttagttgttaaccaagttatgaaagagtggtcctgcctcgacgacaacatgatcgcttatcgacaagaggtacgaaagttggaagataagttcgatggactcgaactcactcacgttcttcggcataataatgaagcagctgacagactagcgaattttggatccaaacgcgaagcggctccttctgatgtgtttgtcgaacatcttcatgagccaaccgtacccaagagagaaacagctgaacccgcggacactcaagacatagctatggtcgaaaccgactggagagagcctcttatacgatttctgacctcccaagaactccatcaagataaagacgaagccgagcggatttccaggcgcagcaggctttatattattcatgagaccgagctgtacaggaaaagtccattaggaattctgcaacgctgtgtatccttagaagaagggagacaattgctgaaggacatgcattctggtatctgtggcaaccatgctgctgcacgcaccattgtcggcaaggttttttctggcccaccgctgtgtccgatgccgacaagatcgtgcggacatgtgaaggttgtcaatttttcgccagacaaactcatctgccagcctaagagttgcaaaccatcccgctgtcctggccgtttgcggtttgggggcttgacatggtcggcccgttcaaaaaggcagtcggcggttacacacatatcttcgtggctatcgacaaattctccaaatggattgaagctaaaccggtcatcacgatcacggcagacaaagctagagattttttcatcaacattgtgcatcggtttggggtacctaatcggattattactgataatggcactcaattcactggtggagtatttaaagatttttgtgaagacttcggcatcaaaatttgctatgcctccgtag

SEQ ID NO: 82127 - DNA, 1488 bp, Oryza sativa
  Clone ID: PAT_MRT4530_81588C.1
atggagggcatcatgcgcgtcgtcctcacctgcctccccaccccggcgcccttctccacatcccacggctccctctcttcctcggcgggcggtggcggcggcagcggcggcggcggcgatgaccgcatcagccgccttccgggcgcgctgctctctaacatcgtgtcccgcctcccggccagggacgcggcgcgcaccgccgtgctctccacgcgctggcgccgcgtctgggcgtccacgccgctggtcctcgacgacgtcgacctcctcgacatccccgacgaggacctccggcgcggccactcccaccgcgtcgacctggccgccgccgcctcccgcgtgacccgcgtcctcacctcccaccggggcccctacctctgcgtccacctcacctgctgcaacatggccacccactggccgatgctctcctactggctcagcctcctcgccgccaatggcgtccaggacctcgtcttcgccaaccgcccctacccgctcgacctgcccctccccgtcgatatcctccgcatcccttccctccgcagcctctacctcgcgttctggaccttcccgggcatccccggcggcgcgcgcggcccccacgtcttcccgcacctccgggagctcggcctctgcttcatcagcatcgacgcccaggacctcgacggcttgctccagtgcagccccgtcctggagacgctcgcgctcgtctccaactcctactcccccgctcacatccgcgtgcgcagccgcaccctccgctgcgtgctcttctggatgtcgctggcgcaggagatcgccttggtcgtcgccccgcgcctcgaccgcctcatcctgtggaagacgttcatgggtttccccggcgaaatcttttgccgcacaagggtcaagattggttacgccacagagctgcgagtcctgggctacttggaaccaagaatgcacgagctggagatcggcaataccaccatcgaggctggaacaaagatgagttcagataaaacggtaccaagtgtcaaaatcttggccttgaaggtgcgatttgggatccgcaatgaagccaagttgctgcccgtctttctcagatgctttcccaatgttgagacattacatgtcatgtcagatgatgctcatgatcctaccggcaagctcaatctcaagttctggcatgacgtcggcccaatcgagtgcctgcactcacacgtcaataaggtggtgtttcacatgttcagaggggagcggagcgagctcgcgttcctcaagttcatcctggagagggccgaggcattgcagaagattgtggttgtgttggccaacagagaccaggcctgggtggacgagatgcgcgccaagctgaggcccctggccatggcgaaaagggccagcaagaaccctacgctcttgatcgttgcgcttgaaggtggtagtgcttggtccttccacagagcatccgatctctctgtgaatgacccttttgactactgctga

SEQ ID NO: 82128 - DNA, 612 bp, Oryza sativa
  Clone ID: PAT_MRT4530_81589C.1
atgaacgatagggtggggagcgaggctgggaaggatgcgcttggcagttggcagacaggctttgggatgaacgacgatctcgcggcgtggggcagttgggctgatgcgaatgcgagggaggcgtcggcgtcgctcgcggctcgggtgcgacgtggtgctttgcgtgcggcagcggcgcacggcaggctccggcttggagggcgggcggtggtcaagagcgggaccggaggcgacgtgatgggacggagtcgtttgcccggcgtggtgtggcgacgagtgcgcaggagcagcacactggagtatagcaggcgcggcgctgcatcatgctcgcggtcgtgggcgtgcgtcggcgcgagactttggagggcgaccacggtcgacacggctcacggcactggcgctacagtccacacgattgagcgcgagactggcgtcctagccggcctggcttggctgtgggctgctagctgtgctgggctcggccagaaggtggcgacctggcctttttgtggttgccccgactgcgtaatcaacggcagcaacggcctgacgctgggcgaatctgagtcgtccgatttaatggacggctccaatcgtccccgcaccggatga

SEQ ID NO: 82129 - DNA, 1387 bp, Oryza sativa
  Clone ID: PAT_MRT4530_8158C.1
ccgggctgcaggattcggcaatttcttcctagctcagctttcccctcttctccttctcctcctactacccaatacgactactactagttttctttcttggccatcatcatttgttcctcatcttactctagcttctccattccaaaattcaccaccgccggcgccgccatctccattccaaaatttgctctgcgtcgagtcgtgtgatcgatcgatcgatcgatcgaggtgtacgtgtgcgctgctggggaaaagggaaatggatccgtcgggcgccttcttccacgcggctccccggagcggctcgaatgtgtcgctggcgtcgctggcgaggacggccggagggaggaggatgatgcacagggtcttccgcggcgtcatcaccttcatcttcgccatagctggactgtttcttggagcggtgactggcgggctgatcgggctggccaccgagagcggcctcttccgcggcaccggcatcggcgccatcaccggcgccctcgtctccatcgaggtcgtcgactcctccatccgcgtctggcgatcccgccgatccgggatctccagcatctgctatgtgcttaatgtgatctacagcctcctgaccggcaggcttgtccgcgagaaggtcgatccggcggtgcagcgggtggtccggagccagatgaatgcagtggattcatcgcccttcagggagtcccctgacctgttcgagatcgagggcaccaacggcatgccacgggcatccatcgacaagctcccggaggtcaggatcactgaggagtacaggaggaacgccattggtgacctctcgggatgttcagtttgcctccaggatttccagacaggtgagaaggtgaggagcttgccggattgctggcacgtgttccatgtgccgtgcatcgacggctggttgatcaagcatggatcctgcccgttgtgccggaggaagctgtgagatcgacgacgacgacggccatggtgatcactgctatagttgtagcagaaggaggaggaggctgctctgctttcttgctgtgtgctgcgatcgagttgtccatcagtgttgctgttcttagagaagaagactgacatctctctctctctatatatatatagaaaacccttaatctatagagcattttgtttctgcttatattgctacatgctctatctttttggttgaactatctacatatatatctatatttctatctactcactcctttctccttatgtaacatacctctcaaaactctgaactggcttgtgctgatcatctgatgtataatatataatatataaatatatatcgccccttggacaccatcgcactagtgcccaatccctcccgcctcggccgaattcctgcagcccggggatccac

SEQ ID NO: 82130 - DNA, 315 bp, Oryza sativa
  Clone ID: PAT_MRT4530_81590C.1
gggacattaaaaaccttattatatatagaaagccaaggcgttgccatgagaagaagaaaaacaagaacacacacgtttcaattccatcggaaagaaagaaaagaaaagaaaaaaaaaacaagaactcgctgacaccataagcatgacgtacgtgaatccgttttatccgtctgggtaccttggtaatgatcgaccaatcgatgaatcagccgggggatttatcttttgctatgcatggcctcttggtaacggcaacccccgggggaggcaaattcaccttgaggttgccgtagtccaggtagccggtgcccaatt

SEQ ID NO: 82131 - DNA, 1485 bp, Oryza sativa
  Clone ID: PAT_MRT4530_81591C.1
atggtggcctctgcgctctccgcgacggcggcggcgacggtggtggtggccgtcgtggcggtgctggttgcggtgtgcaggggggagttcacggtggtggtgccggactcgtcgtcgtcggcggcgctggtgaacgcgccgcagacggggctgtcggaccgggcgcgcaccgatccggcggagcagcgcgcggtgcaggaggtgatggcggcgacggggaacgggtgggcgtcgggcatcgccgacgtgtgccgcgggcggtggcacggcatcgagtgcgtgcccgaccgcggggaggtgtaccacgtcgtgtcgctctccttcggcgcgctctccgacgacaccgccttcccggcgtgcgacgcggcgcgggccacgctgtcgccggccgtgctcgcgctgccgcacctcaggtcgctcttcttctaccgatgcttcacggccaacccgcagcccgtcccggcgttcctcggccgcctcggcccggcgttccgttcgctggtgctccgggagaacggccacgtcggggcgatcccgccggagctcgggaacctgacggcgctgcgggtgctcgacctccatggcaacaacctcacatccgccatcccagccaccgtccagtccctcgcgcacctccagcttctcgacctgagctacaaccagctcgccggcgaggtgccacccttcaagttccagcacctaagcatcctggacctcagccacaacgcgctgcagggcggcgtcccggcgagcctagggcaatgccgttcgctgctcaagttcgacctcagccagaaccgcttcgccggcacgatccccgacgcgctcggcgacctgtccgacctcatcctgctcgacctcagccacaacgcgctgtccggcccgatcccggcggcgctcggcaggctgtcgtcgctgcggtcgctcatcctcggcgacaaccggatgcagttcacgacggtccccggcgacatcttcgccgggctcagggcgctgacgacgctggtcctctccggcatggggctggaagggtcgttgccggagtcgatcggggagctgggccacctccgggtgctgcggctggacaacaacgagttcaccggggtgatcccggcgagcttccggcggctggagcgggcgagcgagctccgcgtggacggcaaccggctggtggggccgatcccgttcgggaagcagatgatgtggcggctaggcaagaagctccgcgtcggcggcaacgaggggctctgctacgacgccaagcagcagggccttgagggcgtcgtcgcgctggccggcgtcgccgactgcgacagcgtcaggagccgcacgacgcagcacctgggaggccgcctgaggaacaccggcggcttgccggcggcggcggctgctgctcccagcgtcggcgtcggcgcgggcgtttgtgtcgggagttggcacgttttcgtcggcgttctcgtgtcgctgcaccttgcgaggttgtaa

SEQ ID NO: 82132 - DNA, 411 bp, Oryza sativa
  Clone ID: PAT_MRT4530_81592C.1
atggccgaggggaggaacaacaaggtcgccgacggtggcgggttcggcatggtgctgctggagatgctgacgggaatgcgggcgctagacacggggaggccggcgctgcagcacagcctcgtggagtgggccaagccgtacctggcggaccggcggaagctggcgtggctggtggacccgcggctggaggggcagtacccgtccagggcggcgcagcaggcggcccagctcacgctgcgctgcctctccggggaccccaggagccggccctccatggccgaggtcgtcgcccagcgccccccagtgctgccacgccgtcacccgctccagccgacctcctcgtcgctcagccgccgcccgctccagccggcctcctcgccgctccgccgcccaggagcgggagagagataa

SEQ ID NO: 82133 - DNA, 177 bp, Oryza sativa
  Clone ID: PAT_MRT4530_81593C.1
atggcgccaaggggtgtagcggcggcacacggtggggaggaggtgggaggcggcaggcgcgaaatcgagacgctgaaggaagcatgtggatacggtctcgccaagtgtggacaatattcttcctacggttggggttacccgatgcggcgcctcaaccttccacggatcgttttttga

SEQ ID NO: 82134 - DNA, 350 bp, Oryza sativa
  Clone ID: PAT_MRT4530_81594C.1
gtccacatcacatatattatgacttacatgtttagtggactaaccgcacaatatccacagattgacatacttaactggaacataatacgagtcctttacataacgcaggatatatacgtggacacacgcatagtacactaaacctccacatgatcaattgatcattcacacactggtttaattcaccattaatcatgacatacaccaaccacactcatatggttagctcctatagcagactaatgaacgacggtgactaccacacgcagaacgttcagttgatcgccgacttcaattgcaagacttacagctcctgcacgatcatctagaacaagactcgcatgaggctg

SEQ ID NO: 82135 - DNA, 720 bp, Oryza sativa
  Clone ID: PAT_MRT4530_81595C.1
atgtctggtgtgccaactgtggagcccttggttttggctcatgtcatacatgacgtgttagatccatttagaccaactatgccccttagaataacatacaacgataggttacttctggcaggtgctgagctgaaaccatctgcaactgtgcataaaccaagagtagatattggtggcaccgacctgagggtgttctacacattggtactggtggatccagatgctccaagcccaagcaacccatcactaggggagtatttgcactatctcagtgggatacatagacaccccgaggtcatggttgtggacatcttctgggtgggacagagttcctgtgatgcaacgtcccacctgacgtggtcactgacatgtggacccgtaggtggtggggatcacatgatggtgatagatatcccaggaacaactggagtcaactttatccccaaaaacaacataaaagatgcagccattaatgagcctaaacgtcaagacctcatgctttatgaaagaccggaactgagatatggtatccaccggatggtatttgtgttattccgacaacttggcaggggaaccgtttttgcaccagagatgcgacacaacttccattgtagaagctttgcgcaacaataccatctggacattgtggccgctacatatttcaactgccaaagggaagccggctctggtggaagaaggttcaggtccgagagttcttaa

SEQ ID NO: 82136 - DNA, 396 bp, Oryza sativa
  Clone ID: PAT_MRT4530_81596C.1
atggagagcaccaaggtccttcatggagaactcaaactacatagaggagatggtccactggaggagctatgcagaggaggcagtgagtgcgatgtcgtcgacgtagaccaggagccgagtggagtcgatgaagctgggaggctggatgcagtagactatctcctagagagtgcaatgaagggacatgttcttgacatcaagctagtcgatgggccaactgcaggagactgccaggctgaggacagtgcggatgtgttaacagtgaaatttgatttttacttatcacggcggaacatggctcctaatgcggggatgcatcagctttcaatatctggtgaagggggtttcatcggggtttcaaccgatgagttatctggatgttgcatcggcttataa

SEQ ID NO: 82137 - DNA, 601 bp, Oryza sativa
  Clone ID: PAT_MRT4530_81597C.1
aagcaccattcatggccggacgcgtggggcagtatattttgtcttatgacaacttgaaggtactgaagcttccataccagcaaggcggggacaagaggcagttctccatgtacatacttcttccggaagcacaggatggcctctggagcttggctgagaagctgaactctgaaccagagttcctggagaagcatatcccaacgcggcaagttactgtcgggcaattcaagctcccgaagttcaagatatcgtttggatttgaggcgtctgatttgctcaaaagtttggggctccacctgccatttagctctgaagctgatcttacagagatggtcgattcaccagagggaaaaaacctgtttgtttcatccgttttccacaagtcgttcgttgaggtgaatgaggaagggactgaggctgctgctgcaactgcagcagtgatcacacttaggtcagctccaatagctgaggactttgtcgcggatcatcctttccttttcctgatccaagaagacatgacaggcgtggtgctgttcgtcggccatgtggtcaatcccctacttgctgcatagagcgtttgcctgtaaaccgctgtagtggt

SEQ ID NO: 82138 - DNA, 261 bp, Oryza sativa
  Clone ID: PAT_MRT4530_81598C.1
atggcggctaaggggagcacgggggcggtggaggcaccggcggctaggggcagcgcatggcagcgaagaaggttgaggatgagcaaggcgtcgggtgcaagacggctaaccacggccgacactgagttgtctgaacaagtgcagtttgtgaggtcaaaatctctatttgagatgtcattgagcaatttgcaggtggtgagggctgaatttatgcagcgtagaacaggaaaggaagttttatgcttcctaatagttgtgtaa

SEQ ID NO: 82139 - DNA, 477 bp, Oryza sativa
  Clone ID: PAT_MRT4530_81599C.1
cctcctcctcccccttcgcctcctgtacaacaaacgtcaagtgaccgaactccatcggttgcaggaagccataatgttgaggaagaggaacaaccagccgctcctgccatcccagccctagccgatctgttttcttttgatatcaaagattactttgatgaaatagaaaaagacaccactaacaaagctttggcccctctttctgatgatgtgaagaaaaaacttcaagacatctctcatcggctagaggcatcatcactagacaatctagtggtcgattgtgggtcaatcaggactcggctacatgagatccaatctcaaattccggatgagctagccgacgttgttactctagctgtctatctcgagcaacaccaattcaagctggagaaagccaagcaaagattagccgatcatcaggagtgcaaggatattgaggctacaatccaaatcaatcggcagttagtgcatgaataa

SEQ ID NO: 82140 - DNA, 763 bp, Oryza sativa
  Clone ID: PAT_MRT4530_8159C.1
agtaatacttgatcaaacgcatattattaattattttattggattcaagcactcgctaaattcgcttagcgttcggcaaaccgcgcgctaatacataatcaaacgcatgctaaattcgctagatttggtcgaactgctcggccagagcgggtgtacattcgtcggctgcccgtggctgcgcgctcctcttcgactggcactcggcgtcctcccggttgtgcttcgccgccgcggcgagcgccgcgctcacaccgtagggcctggtcccctcgccggggtccttctccacctccgctcccgccgccgccgccgcgtcctccgccgtcaccgccttctccgtcggcagcatcgccgtcgcgttccacgcgaggacgtcgccgatggtgatcgccgtgtcctccgcgggcggcgcggcaccggcgttggcgtccgccgccgcctgcgcctgctcggcgacgccgccggggacgacgcccgcgcccgcgctcgcctccgcggagcttatcgccgccgcgtcggacccgcgcacgggctggtccccgaccgccctcgccgccgcctccagcgcctcgccgatcttgaccttgctgtcgtacgcgtcgtcgacctccacgacggggccgccgcagtgcgcggcctgccccgaggcgtccgccggggcgatgagccgccgctcggcgtcgccgtcgccgccatcaggctgtactacctgatgaccttggcattctcctcctcttggtcgtcgggcttgaacttgcgccat

SEQ ID NO: 82141 - DNA, 918 bp, Oryza sativa
  Clone ID: PAT_MRT4530_815C.1
tggtggctgagagtccaaggaaccatgccattgaagccaattaggaagatgaacccacatgtgttcattcatggggtggtgaatggatcttacaatgcaccattttttgtgacacgcttccgggaggccttgttccactattctgctatcttcgacatgttggagactaacattcccaaggataatgagcagaggttgctcattgagtctgctctatttagccgggaggcaatcaatgtgatctcttgtgagggactggagaggatggagaggccagagacatacaagcaatggcaggtacggaaccagagggttgggttcaagcagttgccattgaaccaggatatgatgaagcgtgcgcgggagaaggtcaggtgctaccacaaggacttcatcatcgatgaggacaacaggtggttactacaaggatggaaagggcgcattttgttcgcactgtcgacatggaagccagataatcgatcatcttcatagcttgttcagctctaattattgcatgatattgtaaatgtagacctgttcatatttttttggggggcatttggaccgattgttcctggtaggcaatatattgctaggtatgttatttgaacaaccaagtaatgggaaacttctgcttaggaattgtcttatatgatgatctggttaatctctgtccgtacataagatgaacccgcctgttcctagaatctctgcacatttgttgtgatcattattgttgcttccgacgggaacagttggttcaattttggtggagctgctagatatgttgaagttgtagaccttgggttgtcttatgtatggatgagccttgtacagtatttcttccaaacattcagtacttgtcactaagttctggttctggataatctatcatgcacgtgcattctctattcgtgc

SEQ ID NO: 82142 - DNA, 1983 bp, Oryza sativa
  Clone ID: PAT_MRT4530_81600C.1
atgaccccaaccctgatcgacatcaccatgattactggattagatgtgacttcatcagctaatcccatgagcctgaataccaagaaccaatttgactccaggaccaagagcataggtggctggtctggttatgtagcagcctatatgtgcaaaggacctgtcacctcccgagaacacgtagccttcttactaatgtggcttgagaaattcctcttttgtggatcaagttgtggccccacaaccaactggcaatttttaactgaagccctagaaacaaagaggcaatttcctttaggcaagatcctcctcggcgcaggtgggccatggtggttgctgcaaacttggctaaacctgatagccatgaaagctgtcaatcggccatctgtgacagaagttgaatttccaagattagagccgattacatatgatgatggagaagagcgcacccatcgcagatgtatgtcctatggagaatttgcctctacaccaacagatgctggagcaaagttatcggctgaatggctcaaggactggttctgtagcttttatgaaggctttcataaagatgctcggctaccaatcggcttgttctttgccgataaaatccaatgccgaggagagatttcatcaaccctgatgatggatcggctactcaacatcccaggacctcctttgggcagtatcgagaacatagagctagcaagatttaggagcagaaactttgacagatggtggggagaattgaagcaacatatattccatcagtcagcttctatgtatatgacagatctgtttcctgatgttgttcctcagacaacagaatcttctcctcctcacaagagtaatagcggtagggacatagaatatgctccaggccttctaccaaacggaggtggattagctcctcttgtcatcagctaccatgcccccaagacctcaagtctgcttcaagggcagatgagagatccagccgatgtcagcaggaagagtaagaccaaagcaccggcaatcgatccatcggctctggctcccaagaagaaggccaagaagcctaagcccaagccaaccgatgacttgcccaccttagatgcatccatcgagcaagctttggatgaagaagaaatcgaagaatatgtcgatcaagcagcagccgaactgagtgatacaggagaaaaaacaccatcggcttcgcccaagcaaactcctccaactcctgctgcaccggctcacttctcaaggaaaaagaagactgttgtgaggaacaaatcggcaacaacaacacttaaaccagctccctcggccttagccgatctgttttcttttgatatcaaggattactttgatgaaacagaagaagataccaccagcaaggctttggcccctctttctgatgatgtgaatagaacacttcaagacatctctcatcggctagaggcatcatcactagacaatctagtggttgactgcgggtcaatcaggacttggctacatgagatccaatctcaaattccggatgagctagccgatgtcgttactccatccgtttatctcgagcaacaccaattcaagctagagaaagccaagcaaagattagccgatcgtcgggagcgcaaggatattgaggctacaatccaaatcaatcagcagttagtgcatgaagaaaagtccaagcttgatctcctgtctgaaggtccgatcaagtccaacatcgatcgacttgaagctcgaaaaattgagctcatagcacaactcgaagaatgtaacgccgagctaaatttggagcaaaagaaactagccgatctcccgaaggttattgaagaacagaagtcaaggctaaaatcggctatcagaaatgttcccgatatgactaagtccttaaaaatcatccctggaaccgatgcacaagatgcccaggcaatcgaagaagtagaacaaatcagacaacgtgttgtattggctatccagcaatatttatctcagtga

SEQ ID NO: 82143 - DNA, 598 bp, Oryza sativa
  unsure (1)..(598): unsure at all n locations
  Clone ID: PAT_MRT4530_81601C.1
gaatagaactgtgntacaatctctccatgaatgcttccgaggaatcgcaaatacagtacgttggaaaattttaaccatggattaagccaacctacacaggtagttataggcacctcgtgtggattaatcgatcgagctgaccaatggctcagaaaggaaaaaatcccagatggcttaaagcattggcctaaaccactctctatttccatatttcgaaccaaagctatctcatgccactcttctgcttgcttttcctcgtgtctttcttggaactagtggaagcactagcctcttcctcagctttctgttcagcctcgagcacagccagctcgtcgagtatgggtttcagttccttatatcgagtttcggcaagatcaaaaccatctttgcggagctcctttccagtgtgttgagtgtgctcatatgcagccatctgccagtacatatccgttctcttgtagaaatcttttagtgactctcctggctttaaaagtgtgaatatgggaattagtgatatatggttttaattgttaactgtgtgtaacaaattatcagccaagagttcctctgagtaaacaaagtatatgtactttgtcgg

SEQ ID NO: 82144 - DNA, 424 bp, Oryza sativa
  unsure (1)..(424): unsure at all n locations
  Clone ID: PAT_MRT4530_81602C.1
gttataataaatatttttcnnccgggtgaaaatacttgtagttttgaatttgataatctgatcgaaaaaatagttaacaccaaaatcctttcccaaaaccatgagctagacgattactcttgctaactccaactatacaatacaccattttctggaactaaatattgacactaccatcctttcacaaattaataaaaactctacgtattgacactaccatcctttcacaaaataataaaaactatacataaaacatgaggttgattgcttttcataattccatctatactatacaccattttctggaactcaatgctcattcgtttacttcttccggatgcttctcactggtcaatatgaaatatgttatacttgcccacgcgtccgcccacgcgtccgcccacgcgtccgcccacgcgtccgt

SEQ ID NO: 82145 - DNA, 2421 bp, Oryza sativa
  Clone ID: PAT_MRT4530_81603C.1
aacctgaaacggatggagtgaatttacaccgcacccagatactgttagggtgtaccgtgttacatcgcaggctgtgaacactgaacagtagagaactcaaaacttgtacgtagtaacgaatttccgatgaatagaactgtgtacaatctctccatgaatgctttctaggaatcgcaaatacagtacgttggaaaattttaaccatggattaagccaacctacacaggtagttataggcacctcgtgtggattaatcgatcgagctgaccaatggctcagaaaggaaaaaatcccagatggcttaaagcattggcctaaaccactctctatttcgatatttcgaaccaaagctatctcatgccactcttctgcttgcttttcctcgtgtctttcttggaactagtggaagcactagcctcttcctcagctttctgttcagcctcgagcacagccagctcgtcgagtatgggtttcagttccttatatcgagtttcggcaagatcaaaaccatctttgcggagctcctggcattggatgagcacgaataaatacagcaaactcatactgccagcaacctttccagtgtgttgagtgtgctcatatgcagccatctgccagtacatatccgttctcttgtagaaatcttttagtgactctcctggcagtgcagtcattaaaaaatcacaaataccgagcatcactcgcatttgctctttccgatttcgcttctcttatcttcgcatgttcttaccctcactcctgattagtgttatagcagtgtacctttcgacaatcttctcggcttgttcatcacactcttcaccatcttcatcggtctaattcccgccattctagttatcgttctcattatcatcatcatcatcatcttcatcatcctcatcttcagaaatttctagccattcagattcagatgccggtatgatacacttccactcatctagtttgctaaggttaagtgaatacatatcatcaagagtaatttctctatctttcaattccatcattcctccatataaatagagtgtatctttccctacagccaagcatgcattgatccgaccaccgggtttcactgcctctgggagtacttcttgtgttgtcgaatcagagagaatatcagagctattgcctgagccagctttatttaaggttagactcttggtcaagtgattcgaaaccccatggacttcggattgccctccagtagtttctgagtcctccatgatctcatcctcctcattaccaagattatcttccacattgttcgatggttcttttcttttgatgtcctttgtcttatttttagcaggcttgtctttcctgagctctaaaggataccagcgatggttgtccagctggaaaccatagagctcattcataaacatgctcataatgacatccccttcaatttccatatctaccacaccaccgaaaagaacagcccttttcttgtgaacgcacatagaaaacccagctctggggccaggtggcatcccagttttcttaaccttattccactcccaagtacgaggatcaagagtccacatatctgcatgaactgttcctttttctgatgcagatttgtcagaagaaactacttctttaaaatatccgccatacagatatatctgatcttggtataccattagctgaaagccacttcttggacttggccacaagcacccagggcgaggcttgatctcctcccacttgaaattatctaaatcaaaaacatgtaagtcattgtagtatctcacttccctaagagtgtcataaaaaccaccaaatagcacgatcttgtgcttatagaggaccatcctgtgccctgaacgtgcacttggacaacccttcgcaagaatttgctcccattgatttgtttttagatccaatgaccaaaagtccttgtaatgatgaaaacgttcttggtttggcgaagtgaattccccaccaaacatgtatatattattcttccaggcaactgtttggtgagcacttcgtggaggaggactgttaggactagataccaacttccactcatttttctctacatcgtagcgataaagatcaccataaacaaaggtcttgctgccattgtagaactctcctccatacagaaccaattctgtatctttcaggggatttattgtaagcgagcaattggaccggggagatggtgcagggacattctcatctatatgtacctccttcttcttagcctcctccttttgtatgctcctgaggatggcgtcgatgtcgtcctcctcgccgaccttccgggcctcgcggcgggcgcgcttctcctcgcccttggccgtcttccgctccgtcttctccttccccttcctgggcttcttctgcttcttccccatctcgccccgccgccgccggcttaagtctctc

SEQ ID NO: 82146 - DNA, 2601 bp, Oryza sativa
  Clone ID: PAT_MRT4530_81604C.1
atggcacggggctctgttctgctcgacggcagtgtactaccgccttcccgcatcgtgaacgagaggcacgccggactgccgcgccgcttcatgcctgagtccgccaccggtcgggagatagtgatgctgggcgaggggcgcccggcaccagactacccggggcggtccatcttcttcctccccttcgcaatggctgggctggtcccgccattttctcatttcttcatggatgtcctggagttctacgatctccagatggcgcacctcacccccaatgcggtgatgacattggccatcttcgcgcacctgtgcgagatgttcattggggtgcgcccctctcttcagctgttccggtggttcttcaccgtgcagtcggtgtcaccaccgtcggtggttggcggctgctacttccagccgcgggggccggtgttgaaccgctacatcccctgcgtcctccgcaagaagtgggacgactggaagagcgactggttctacacccccctcgccgacgaagcgcgcctccgacttccaagccagcccccggcgcaggtctccagctggcgggcgccggtagatctgggggaggagtacgacgccgtcctcgaccgcctggcgggcctgcgatcccaagggctcaccggggccatggtgtacggcgattacctccgtcgccggattgcgccgctccaacggcgcgcccggagcgcctgggagtacactgggcctgaagactacatgcggacccaccagggagccagatgggattgggctcccgaggacttcaagatcgtggtccaaagggtgctgaatcttagctccgcggaggcgtctcgccttcctcaggagatcctccccctctgcagcgatcccgaccgcgtctccattctaaccattatgatgggggtcggggcctcagaggagagagcccctaagggccacgacggcgcgggcgagcgccgccggggggaacaacctgccccaggaggggggggcggggcggcgcgtgccagcagtcggcgcccggagggggccgcgccaacatcgcagcccgagggggtgcgcaagaagaagcggctccgcaagacgggggagacggaaccatgccggggaaacctgatttcccctccaaggtggtcattcacccgaccccctcgcagcaatgtcccgtcgcattcctcccgccaccccaagtccggccagtccgaggtcgaagatccggcggctgcagaggagcggaggcgagaatctgaccggcgtgaagccccaaatcgccttcgggaagcccaaaaggccgcccgggaggcccccccggccttggccgccgcaaacaccgcggtgctagatggatttagcgcccaggtggaggccttgcgagcggaacgagcggagctcgaggccgcatgggcgcgcgtcgaggaggggcggcgctcggtggacgccatggtggaggtgggccgtaaggcccaccgccgccatatctcggagcttgaagcccgcaaggcggcgctggcggagatcgcccgagaggtggaggaggagcgagaggccgccctcgtcgccaccaccgcgatgatcgaggcgcaggactccctccgccttcaacacgggagctgggaggcggagctaaagaaaaagctcgacgccgcccagggggtcctcgacgccgccgccgcccgagagcagcgagcaacagaggctgaagcggcgttgcggcggcgcgaagaggcccttgaggcccgtgccatggcgctggaagagcacgccggcgccgtggagaggggcttgacggaccgcgaggccgccgctggtctccgagaggcgacgctggcggcgcatgaggccgcctgcgccgaggaggagtccgcgctccgcctccgcgaggatacactcgctgagcgggagcgagctctcgaggaggccgaggccacgacgcaacggctggcggacagcctgtccctccgcgagggagcgcaggaggagcaggcgcgccgaaatctggaatgcgtccgcgccgagagagccgcactggagcagcgggctgctgacctcgaggcgcgggaaaaggagctggacgcgagggcgcctatcggcgggggcggccgcgggcgaaagcgacttagccgcccgcctcgcagccgccgaacacaccgtcgcagagatgcagcgagcgctggactcctccatcggggaggccgaggccctccgcttggcgggcgagatggggcccgacatgctttgggactcggtctcccgcatggatcgcgccggatggcctgggtcctcgaacgactccccgaggagctcgagaagaccatcaagtcatcctcgagggacctcgcgcggggagcggtcgaactcgtgctggcgagttaccaggcccgggaccccaacttctctccatggatggcgctggaggagttccctcccgggaccgaggacgacgcgcgcgcgcgggtcggggacgctgccgaccacatcgtcaacggcttcgaggggtcggcccctcggctcgcgttcgcccccagctccgacgaggagggcgatgccagcggtgaggacgacggtggcgacgaggccggcgacccgggcgcattggaatga

SEQ ID NO: 82147 - DNA, 381 bp, Oryza sativa
  Clone ID: PAT_MRT4530_81605C.1
atggcattgtttgtctttgtggacgagctgctcgccgtgcgtcgctattgccggcttgccgcaccatgctgctcgctgctcgcttgcccgtgcgttgtacaggagctgcctcgccgcagccttcgccgccgccttcccgtggcgctgcgccagattcgccgccttcccatacgctgcgccatcctgccgccaagcttccctgctcgctgcttgctggctcgctggctcactggccgacggagccgccgctcctctccgccgcgcgctggccgcggggccgccggccaccgcgcctccctacgcatgcacccgcggggccgccgcgcgctggcccgcaccgccgcttgtcgcgtgcgccgccgccgccgcttgcaacccagc

SEQ ID NO: 82148 - DNA, 3189 bp, Oryza sativa
  Clone ID: PAT_MRT4530_81606C.1
atggcacggggctccgctccgcttgacggtagcgtgctgccgccttcccgcatcgtgagcgagagacaggccgggctgccgcgccgcttcatgccggaatctgccaccggccgggagatagtctcgctgggcgagggatgcccggcgccacgctacccggggcggtccgtcttcttcctcccatttgctatggcagggctggttccgccattttcttctttcttcatggatgttctagagttttacgatctccagatggcgcacctcacccccaacgcggtaatgacattggccatcttcgcgcacctgtgcgagatgtttatcggggtgcgcccatcccttcggctgttccggtggttcttcaccgtacagccggtgtcgccgccgtcggtggttggtggttgctacttccagccgcgggggccggtgctgaaccgctacattccctgcgtcctccgcaagaagtgggatgactggaagagcgactggttctacacccccctcgccgacgaagcgcgcctccgacttccgagccagcctccagcgcaggcctccaactggcgggcgccggtagatctgggagatggttacgacgccgtcctcgaccgcctggcgggcctgcgatcccaagggctcacaggggccatggtgttcggcgactatcttcgtcgccggatcgcgccactccagcggcgcgcctgggagtacaccgggtccgaggactgtatgaggacccaccggggggtcaaatgggactgggtccccgaagacttcaaggtaatgatccaacgggtgctgaatctcagctccgcggaggcatccctcatcccccaaggagtcctccccctctgcagcgatccagatcgcgccaacatcctgaccatcatgcaggcggtcggggcgtcggaggagcgggctcctcgaggccacgatggcgcgggcgggagccgcaggggggaacaatctaccccgggagggggtcgtgcttctgggccccgcgacgggggcccggggagcggccgccctgccgacacccgagggaagaggaagcaagagggtatttcctccccatctcttccccgagggggcggggcggcgcgtgacagcagcaggcgcccggagggggccgcgccgacgccgcagcccgaggaggagcggaagaagaaacggctccgcaagatgggggggacagaaccatcccggggaaacctcatttcccctccaaggtggtcgtttaaccgacctcctcgcagcgagatcccgtcgcgtccctcccgccattccaagtccggccagtctgaggccgaggacccggcgaccacagaggctcggaggcgggaatctgaccggcgagaagccgcggatcgccttcgggaagccgaggaggccgctcgggaggccgcccgggctcgccagaccgaggaagccgctcgggaggaggccggactccgccaggccgaggcgacgacatcctccgaggcgacccgtgaaactgaccggcaagaggccgcggatcgccttcgagaagccgaggaagctgcccagggggccgtccgagctcgccaagctgaagaagccgctcgggaggaggccagacttcgccaggccgaggcgacgacgacttccgaggcaactcgcgacgaggccgcgggcgcatcgcttgggcccactccctcgtgcgacgctcaggacaaaccaggtccgggggacatccccgagtccggcacgtccatcggcgggccaagccgcgcggcatcctcttcgaggcggctcttccccacgccttccgttgctccactgagcgcagaaccccttctgcaggccttggccgtcgcaaacaccacggtgttggacgggttaagtgcccaggtggaggccctgcaagcagagcgggcggagctcgacgccgcatgggcgcgtgtcgaagaggggcgacgctcagtggaggccatggtggaggtgggccgcaaggcacaccgccggcacgtctcagagctcgaagcccgtcggaaggtgctgggggagatcgccaaggaggtggaggaggagcgggaggctgccctcatcgccaccaccgtgatgaacgaggcgcaggacaccctccgccttcaatacgggagctgggaggcggagctagggaagaagctcgacgccgcccggggggtccttgacgctgccgctgcccgagaacggcgggcggcggagaccgaggtggcatcccggcggcgcgaagaagcccttgaggcccgtgccatggcgctggaagagcgtgcctgcgccgtggagagggacctggcggatcgcgaggccgccgttgctatccgggaggtcaccctggcggtgcacgaagccgcctgtgccgaagaagagtccgcgctccacctccgcgaggacgcgctcaccgagcgggagcgagctctcgaggaggccgaggccgcggcgcaacgggtggcggacagcctgtccctccgcgaggctgcgcaaggggaacaagcgcgtcgcaatctggaaagtgcccgcgccgagagggccgcactgaaccagcgggccgctgaactcgaggcgcaggcaagggagctggatgcaagggcgcgtagcggcggggcggccacgggcgacagcgacttagccgcccgcctcgcagctgccgaacacaccatcgcggatctgcagggcgcgctggattcgtccaccggggaggtcgaggcccttcgcctggcaggcgagatagggcccagcatgcttcgcgacgccgtgtcccgtttagaccgcgccgggcggcaggcgggtctctggggcgggcggactgtgaagtacgccgccaaccaggggggcctcgcccagcgcctctcggagatggccgggactctccagcggctccccgaggagctcgaggggacgattaagtcatcctcgagggacctcgcccgaggagcggtggagctcgtactggcgagttaccaggccagggaccccaacttctccccatggacggcgctggacgagttccctcccgggaccgaggacggcgcgcgcgcgcaggtccgggatgccgccaaccatatcgtccacagcttcgagggttcggcccctcggctcgcgttcgccctcaactccgacgaggagggcgatgacggcggtgtgggcgacagtggcgacgaggctggcgacccgggtgcatcggagtga

SEQ ID NO: 82149 - DNA, 237 bp, Oryza sativa
  Clone ID: PAT_MRT4530_81607C.1
atggatagaagggacaggcggcaatgcacccacaccctgacttgtgtcaggcggcgtgggggcagggctgcatcggcttcaatatccggtgaagggcatgtcgtgcaacttggccatgttctggcgcacaacacccatgtcggcttcggcttgtgcctcgaggtcagcgttcgcttgaacggatgtgagcatggtggaagccgtagcttgttgggtcgtggcagcggcttgggttga

SEQ ID NO: 82150 - DNA, 2703 bp, Oryza sativa
  Clone ID: PAT_MRT4530_81608C.1
atggcacggggctccgcaccgctcgagggtagcgtgctgccgccttcccgcatcgtgagcgagaggcaggccgggctgccgcgccgattcatgccggaatctgccaccggccgggaggtggtcgcgctgggcgagggacgcccggcgccgcattacctggggcggtccgtcttcttcctctctttcgcaatggcagggctggtcccgccattctcttctttcttcatggatgttctggagctttatgatctccagatggcgcacctcacccccaacgcggtaatgacgttggccatcttcgcgcacctatgcgagatgttcatcggggtgcgcccatctctccggctgttccggtggttcttcaccgtacagccggtgtcgccaccgtcggtagtcggtggctgctacttccagccgcgggggccggacgactggaagagcgactggttctacacccctctcgccgacgaagcgcgcctccgacttccgagccagcccccggcgcaggcctccagctggcgggcgccggtagatctgggagatggctacgacgccgttcttgaccgcctggcgggtctgcgatcccaggggctcacgggggccatggtgttcggcgactaccttcgtcgccggatcgcgccactccagcggcgcgcccggggcgcctgggagtacaccgggtccgaggactacatgaggacccaccaggggggcagatgggactgggcccctgaggatttcaagatggtggtccaacgggtgctgaatctcagctccgtggaggcatccctcatcccccaaggtgtcctctccctctgcagcgatccagagcgcgccaacatcctgaccatcatgcaagcggtcggggcgtcaggggagcgggctcctcgaggccacgatggcgcgggcgggagccgcaggggggaacaatctaccccgggagggggtcgtgcttctgggccccgtgatgggggcccggggggcagccgccctgccgacgcccgggggaagaggaaacaggaggataccccctccccatctcctccccgagggggcggggcgattccgtcgcgtccccctcgccattccatgtccggccggtctgaggccgaggagacagcgaccgcggaggcccggaggcgggaagctgtccggcgagaagccgcggaccgcctccgagaagctgaggaggctgcccaggaagccgtccgggttcgccaggctgaggaggccactcgggaggaggccagactccaccgggccgggaagtcagcccgggaggcagaggcgacgcgcgcacgccaggcggcctgccaagcccccgacccgactccgcccgaggcgacgacgacttccgaggccacccacgacgaggccgcgggcgcaccgctcggacccgacccttcgggcgacgttcgggacgagccagcctcgggggacgcccctgagtccggcacgtcaattggcgggccgagccgcacagcgcccacaccgaggcggctctcccctctgccttccgccgctccactgaacacagagcccctcctgcaggccctggctgccgcgaacacgacggtcctgcaagcagagcgggcggagctcgacgcggcgtgggcgcgcgtcgaagaggggcagcgctcggtggaggccatggtggaggcgggccgcaaggcataccgccggcacgcctcagagctcgaggcccgtcggagggagctggcggagatcgccagggaggtggaggaggagcgggagactgccctcatcgccaccgccgtgctcaacgaggcgcgggacgatctccgccttcaacacgggagccgggtggcggagctagagaagaaactcgacgccgcccggggagtccttgacgccgccactgctcgggaacggcgggcgacggagaacgaggcggcgtcccggcggcgcgaagtggcccttgaggctcgcgccacggcgctggaagagcacgcccgcgcgaggaagagggacctggcggaccgcgagaccgccgtcgctatccgggaggcaacgctggcggcgcacgaggccgcctgcgccgaagaggagtccgcactccgcctccgcgaggatgcgctcaccgagcgggagcgatctctcgaggaggcagaggccgcggcgcagcggctggcggacagcctgtccctccgcgaggcagcgcgggaggagcaggcgcgccgtaatctggaaggcgcccgcgccgagagggccgcactggatcagcgggccgctgagctcgaggcgcgggcgaaggagctggacgcgagggcgcgcagcggcggggcggccgcgggcgacggcgatctagccgcccgcctcacagctgccgaacacaccatcgccgatctgcagggcgcgctggactcgtccgccggggaggtcgaggccctccgcttggcgggcgagaccgcgccgggcggcaagcgggcctctggggcgagcggaccgcgaagtacgccgccaaccagggggggcctcgcccagcgcctctcagagatggccgggactctccagcggctccccgaggagctcgaggagacgatcaagtcatcctcgagagacctcgcccggggggtagtggagcttgtactggcaagctaccaggccagggacccggacttctccccgtgggcagcgctggacgagttccctcccggaaccgaggacgacgcgcgcgcgtag

SEQ ID NO: 82151 - DNA, 1128 bp, Oryza sativa
  Clone ID: PAT_MRT4530_81609C.1
atgccggcctccgaccccgcccccgccgccgccgctgccgcctacgaccgcaccgccgagctccgcgcgctcgacgccaccctctccggcgtccgcggcctcgtcgcgtcgggcgccacccacctcccccgcatcttccacaacgtcgtccatggtgatcaagaaccaccggaggcgacggcgccatcgtccgcggccacgaccacgacgaccgtcccggtgatcgacatcagcgggagccgcgcggccgtggtcgacgccgtccggcgggcggcggcggagtgggggttcttccaggtgacggggcacggggttcccctcgccgcgatggacgccgcggcgggcgcggcgcgcgcgttccacgagtccggaggcggcgagggcagcgacaaggcgcggctctactcgcgcgagcccgggagagccgtcaagtaccactgcaacttcgacctgtaccagtcgccggtggccaactggcgcgacacgctctacctccgcatggcgcccgacccgccgcccgccgccgacttgccggagatctgccgggatgcactgtttgaatatgccaaacaagtaaagaatttggggaacacactgttcgagctgctctcggagggccttgggctcaaaccgagctacctgacagacatagaatgcaaccaggggcaaatcatactatgccactactaccctccctgcccccagcctgagctcgccatcgggacaagccggcattcggactccggcttcctcaccatacttctccaggatgacattgggggcctccagatcctccatgaggaccgatgggtcgatgtcacgccaactcctggagcgttcatcgtcaatgttgccgatctcctgcagttgatctccaatgacaattacaagagtgtggagcatagagtggtggcgaagaacactgaaccgagagtctcgattgcctgtttcttcagcacccattttcatccgatttccacgaggatgtatggcccgatcaaggagctgttgtctgatgagaacccgcctttgtacagggaggcactcgtcagagattacaccgcgcgttactactccgttgggctagatggcaagttcaagactactctttctgaattccggttatag

SEQ ID NO: 82152 - DNA, 199 bp, Oryza sativa
  Clone ID: PAT_MRT4530_8160C.1
gttgacaagttgggaggcaattctggaaaaaatgtcaccgcgccgcgtctcccgccggcgcgcggagcccccgctctctccgtctccgacgaccaagccccacgacctcgtctcgccgaacccacgcgcggtcaacctcccaaacccctcaagtctccactctccacctcctcctccccctcaccaagtcaatctccac

SEQ ID NO: 82153 - DNA, 2916 bp, Oryza sativa
  Clone ID: PAT_MRT4530_81610C.1
atggcacggggctccgcaccgctcgagggtagcgtgctgccgccttcccgcatcttgagcgagaggcaggccgggctgccgcgccgattcatgccggaatctgccaccggccaggaggtggtcgcgctgggcgagggacgcctggcgccacactacccggggcggtccgtcttcttcctctctttcgcaatggcggggctggtcccgccattctctatttttttcatggatattctggagttttatgatctccagatggcgcacctcacccccaacgcgataataacgttggccatctttgcgcacttgtgcgagatgtttatcggggtgcgcccatctctccggctgttccggtggttcttcaccgtacagccggtgtcgccgccgacggaagtcggtggctgctacttccagccgcgggggcaggtgctgaaccgctacattccctgcgtccttcgcaaaaagtgggacgactggaagagcgattggttctacacccccctcgccgacgaagcgcgcctccgacttccgagccagcctccggcgcaggcctccagctggcgggcggcggtagatctgggagacggctacgacgccgttcttgaccgcctggcgggtctgcgatcccaggggctcacgggggccatggtgttcggcgactaccttcgtcgccggatcgcgccgcttcagcggcgcgcccggggcgcctgggagtacaccgggcccgaggacatcatgaggacccaccaggggcgcaaatgggaccctgaggacttcaggatggtggtccaacgggtgctgaatctcagctccgtggaggcatccctcatcccccaaggggtcctccccctctgctgcgatccagagcgcgccaacatcctgaccatcatgcaggaggtcggggcatcgagggagcgggccccccgaggccacgacggcgagggcgggagccgcaggggggaacaatctaccccgggagggggtcgtgcttctgggccccgcgacgggggcccggggggcagccgccctgccgacgcccgggggaagaggaagcaggagggcacccctcccccatctcctccccgagggggcggggcgcgagatcccgtcgcgccccccccccgccattccaagtccggccggtctgaggccgaggagacggcgacagcggaggcccggaggcgggaagctgaccggcgagaagccgcggaccgcctccgggaagccgaggaggctgcccaggaggccgtccgggttcgccaggctgagaaggccgctcgggaggaggccagactccgccgggccggggagtccgtccgggaggcagaggcggcgcgcgcacgccaggcggcctgccaaacccccgacccgactccgcccgaggggacgacaacttccgaggccacccacgacgaggccgcgggcgtgccgctcgggcccgacccctcgggcgacacttgggacgagccagcttcgagggacgcccccgagtccggcacgtcttccgctgccccactgagcgtggagcccttcctacaggccttggccgccgcgaacagcacggtgctggacgggttaagtgcccagatggaggccctgcaggcggagcgggcggagctcgacacggcgtgggcgcgcgtcgaggaggggcggcgctcggtggaggccatggtggaggctggccgcaaggcgcaccaccggcacacctcacagctcgaggcccgtcgtagggagctggtggagatcgctagggaggtggaggaggagcgggagactgccctcatcgccaccgccgtgctcgacgaggcgcgggacgacctccgcctccaatacgggagccgggcggcggagctagaggagaagctcgacgccgcccggggagtccttgatgccgccgctgcacgggaacggcgggcggcggagaaagaggcggcgtcccgccagcgcgaagaggcccttgaggttcgcgccacggcgctggaggagcgtgcccgcgccctggacgtgaaggagagagacctggcggaccgcgaggccgccgtcgccacccgggaggcaacactggcgtcgcacgaggccgcctgcgccgaagaggagtccgcactccgcctccacgaggacgcgctcaccgaacgggagcgagctctcgaggaggccgaggccgcggcgcagcggctggcggacagcctgttcctccgcgaggcagcgcgggaggagcaggcacgccgcaaactggaaggcgcccgcgccgagagggccgcactggatcagcgggccgctgagctcgaggcgcgggcgaaggagctggacgcgagagcgcacagcggcggggcggccgcgggccacggcgacctagccgcccgcctcgcagccgccgaacacaccatcgccaagctgcagggcgcgctggactcgtccgccggggaggtcgaggccctccgcttggcgagtgaggtagggcccggcatgcttcgggacgccgtctcccgtctagaccgcgccgggcggcaggcgggtctctggggcgggcggcacgcgaagtacgccgccaaccaggggggcctcgcccagtgcctctcagagatggccggggccctccagcggctccccgaggagctcgaggagacgatcaagtcatcctcgagggacctcgcccggggggcggtggagctcgtactggcaagctaccaggccagggaccctgacttctccccgtgggcagcgctggaagagttccctcccggaaccgaggatggcgcgcgcgcgcgggtccgggacgccgccgactacatcgtccacagcttcgagggtacggcccctcggctcgcgttcgcgctcgactccgacgaggagggcggtgacgacggtgcggacgacagcggcgacgaggccgacggcccgggggcgccggagtga

SEQ ID NO: 82154 - DNA, 1536 bp, Oryza sativa
  Clone ID: PAT_MRT4530_81611C.1
atggacgcgaccgatccgccgccgccgccgccgccgctcaccaggaagaggggaagggaggcgaggaagagcaaggaagcagcgccaccacgcgagccgagaagggctcgcagtcgcagccatgttccaccgccgcctggagccggagacggacggggaggagacggcgaggaggacgtcggcttcgatctcatcagccgcctccccgacgccgtcctcggcgacatcatctcgcgccttcccaccaaggacggcgggaagaccagagccctgtccaaacggtggcgccccgtctggcgcaccgcgccgctcaacctcgacgccggtgatctcgcccccgacgccaacggggcggcgctggccgtcctcgtcacccagatactcctcgttcacgcggggcccgtacgccgcttatgcatccccgcgcagcagatccacgagcgccccgccatggtcgaaggctggctcggatcgcggagattcaaaaacctggaggagctcgagttcaccgtcccggaagaccccttctacgggagatcattcttgctgctcccgcccccgccgtccaccttccgcttctcggccaccctccgtgtcgccgccattagccaatgcagcctcccagactgcacagccaccctcgcgcttcggttcccgcagctcaggctgctctccctccaggaagtcatcgtctccgagcattctctccatagcatcatcgccggctgccctgcactggaggggttgctgctcaaacgttccttcggattccgatgcctccgcatcaattcccctaccattagaagcgtcgccttccattccccatgctgtggagatcactgtgtatggaaggtgggtttccacttggaagaggtggtcatcgaggatgctccatgtcttgaaaggttgatccatattgaacgtgcaatgggattgggcgttaatgtaaccgtgatcgcggcgcccaaactggaggcctgcgtcctagacgaccttgatgacggctattaccgactcgatttcggcaaggtggtttttaagggatttgcggttattaactacacaacaccagtgtcgagcatcaagattttagccctcatcagggataatctcaggttggacagggttatcgagttaatgagatgctttcagtgcttggagaaattgtacatcacggcatcccattatggggcaacttattgctggcgccgcaaacattggagaaaactcaaaagccttgacatatgtctgaagacattagtgctggataattatcgtggcttgaaatcacaaattaactttgccacattcttcataaggaatgcgactaagcttgagaatatgatatttacaggtggtcgtagcaatggtaacgcatattttattgcacgacagcaaaagctgctggagtttgagaaaagggcttcaaaaactgctcactttcattttacaaccaagaaatgctattatgattgggtgcatatcaaggatgtccatgatttgtctattgctgatccttttgaatgtacctgttga

SEQ ID NO: 82155 - DNA, 2904 bp, Oryza sativa
  Clone ID: PAT_MRT4530_81612C.1
atggcacggggctccgctccgcttgacggtagcgtgctgccgccttcccgcatcgtgagcgagaggcaggccgggctgccgcgccgcttcatgccggaatctgccaccggccgggagatagttacgctgggcgagggacgcccggcgccatgctacccggggcggtccgtcttcttcctcccttttgcaatggcaaggctggttccgccattttcttctttctttatggatgttctggagttttacgatctccagatggcgcacctcacccccaacgcggtaatgacattggccatcttcgcgcacctgtgcgagatgttcatcggggtgcgcccatcccttcggctgttccggtggttcttcaccgtacagccggtgtcgccgccgtcggtggttggtggttgctacttccagccgcgggggccggtgctgaaccgctacattccctgcgtcctccgcaagaagtgggatgactggaagagcgactggttctacaccccccttgccgacgaagcgcgcctccgacttccgagccagcctccaacgcaggcctccaactggcgggcgccggtagatctgggagatggctatgacgccgtcctcgaccgcctggcgggcctgcgatccctggggctcacaggggccatggtgtacggcgactaccttcgtcgccggattgcgccgctccagcggcgcgcccggggcgcctgggagtacaccggatccgaagactacatgaggacccaccagggagtcagatgggactgggctcctgaggactttaagatagtggtccaacgggtgctgaatctcagctccgtggaggcatccctcattcctcaaggagtcctccccctctgcagcgatccagaccgcgcctccatcctgaccatcatgcaggcggtcggggcgtcggaggagcgggctcctcgagggcacgatggcgcgggcgggagccgcaggggggaacaatctaccccgggagggggtcgtgcttctgggccccgcgacgggggcccggggagcggccgccctgccgacgcccgggggaagaggaagcaggaaggaacccctcccccatctcctccccgagggggcggggcggcgcgtgccagcagcaggcgcccggagggggccacgccgacgtcgcagcccgagggggagcggaagaagaaacggctccgcaagacgggggggacagaaccatcccggggaaaccttatttcccctccaaggtggtcgtttaaccgaccccctcgtagcgagatcccgtcgcgtccctcccgccattccaagtccggccagtctgaggccgaggacccggcgaccacagaggctcggaggcgggaatctgaccggcgagaagccgcggatcgcctacgggaagccgaggaggccgcccaggacaagccaggtccgggggacatccctgagtccggcacgtccatcggcgggccgagccgcgcggcatcctcaccgaggcggctcttccccacgccttccgttgctccactgagcgcagaaccccttctgcaggccttggccgtcgcaaacaccacggtgttggacgggttaagtgcccaggtggaggccctgcaagcagagcgggcggagcttgacgccgcatgggcgcgtgtcgaagaggggcgacgctcggtggaggccatggtggaggtgggccgcaaggcacaccgccggcacgtctcagagctcgaagcccgtcggaaggtgctgggggagatcgccaaggaggtggaggaggagcggggggctgcactcatcgccaccaccgtgatgaacgaggcgcaggacaccctccgccttcattacgggagctgggaggcggagctagcgaaaaagctcgacgccgcccggggggtccttgacgctgctgctgcccgagaacggcgggcggcggagaccgaggcggcgtctcggcggcgcgaagaggccctcgaggctcgtgccatggcgctggaagagcgcgccggcgtcgtggagagggacctggcggaccgcgaggccgccgttgtcatccgggaggtaacgctggcggcgcacgaggccgcctgcgccgaggaggagtgcacactccgcctccgcgaggacgcgctcaccgagcgggagcgagctcttgaggaggccgaggccgcggcgcaacggctggcggagagcgcgtccctccgtgaggctgtgctagaggaacaagcgcgccgcaatttggaaggtgcccgcgccgagaaggccgcactgaaccagcgggccactgaactcgaggcgcaggcaaaggagctggacgcgagggcgcgcagcggcggggcggccacgggcgaaagcgacttagccgcccgcctcgcagctgccgaacacaccatcgccgatctgcagggcgcgctagactcgtccgccggggaggtcgaggccctccgcttggcaggcgaggtagggcccggcatgcttcgggacgccgtctcccgtctagatcacgccggccggcaggcaggcctctggggcgggcggactgtgaagtacgccgccaaccaggggggcctcgcccagcgcctctcggagatagccgggactctccaacggctccccgaggagctcgagaggacgattaagtcatcctcgagggacctcgcccgaggagcggtggagctcgtactggcgagttaccaagccagggatcccgacttctccccatggacggcgctagacgagttccctccagggaccgaggatggcgcgcgcgcgcaggtccgggacgccgctgaccatatcgtccacagtttcgagggttcggcccctcggctcgcgttcgccctcaactccgacgaggagggcgatgacggcggtgtgggcgacagtggcgacgaggctggcgacccgggtgcattggagtga

SEQ ID NO: 82156 - DNA, 5670 bp, Oryza sativa
  Clone ID: PAT_MRT4530_81613C.1
atgatgaagcggctgtgcaagtcgctgctgaagaagcggctcggggatctgatcctgggggacctcgacctcgaccagttcgacctgcagctcacccgcggcacgctccacctctccgacatcgccctcaacgccgacttcgtcaaccgcaagttgtcaggatctgctatcatgatgaaggaaggatcgataaaatccctgctagttagaattcctctactattaaacatgcgcgactgttgcgagattgtcgtggaggatttggaacttgtgcttgctgcatctgtttctagcgaagatccttctggtgatactgaatgctctgtttctggtagtaatactgacgacacacagaaatcagtccaggccaaaagaaatgaatctgatggcaatcagtgttctacctctgcatctcgagatgtcgacaaaggtgtccagaggatagctaatgctgtcacatgttttcttaccaactttaacatcaagttaaaaaactcttatgttgtatttgatcctcaaaacattttggataacaaggtcccagaatttaatcgatcactggttttccgaatcaaagagaccgaatttggaaccaatctttcaacagatggtataatcaaacttcacaattttgtgacattccatgaggcggtcattgagtttttgaagatggatgatgttgatgcgcatgcacttcttcaggatgatttggatagaggaccagcagacatttcatcaggtcatagcactaccgcggtcttgacaggtcctatcggtggattctcagggaaattgaacttaagcatcccatggaatggcttgaactttaagaaacttgatgcagatatatctcttaattcattagaattgcggttacaactgagcagtatccaatggctcatggatgtgtgggattctctccaaagaagaaatctagtacatgaacagagttatgcccataataccgcagacatatctagatctgccagttcatatgtatcaagctcttcaaaatcaggttcaggttctgtgatagctagcagggaacatttgacagaggacacattttctcaactcaggcaagaaaaaacacaagagccttccctgactatgccatacttgattccggactggattccagtgcttatccatgaggatcacggtgaccctgattcagtttgtgatgaaagcatcgaccagttctttgaatgttttgaggaactgatgaactcccagactaatctgggaaacagtggcatatgggattggacatgttcagtgttcaatgcaattacctttgtatccactttagcttctggatcagatcaaattcctaaagaaccgccgatagagaaaaccttgcgggcttccattgctgagatatctgttgttcttttgttcagtgatgaaatggatgctggcaattccagtgttcctatcagtcaattcaatgacatgagaaattctgaaatgttttcaagctgcctttcctttgcacattttgagcaatcaatgatatctcctgctcctgctgccagcttgaatatgcatcacgttgaagccaagtgtcagaacattcatctttccctggagacatatcctgaaaacctaagtctcaagggatcaattgctgctataaagcttgatgaatactatggcagtaagaacaatgattcagatcatccaaatcttggtgctgctttcttgaacaataatttttgcagagaagttcaagcttctctccctcaatctgtatttgcttatcaagattaccatgaggaaacatcacgccgtcataccaacaattcaaatgacctcactaaggtcgaattgctaaacacgtttggtgagtgcgtattccactatgatgtcagttcctcaggtcaagatggcaacccagtaagctcaacttcactatcagtctgtttggctcctttggtttgctgggtgcactttcacacaatatatatgctactgaattttatcagtaaaatcgagtctgatgttttgcatggggaggataaaattcataggaagaatgacgaaaaaaatgtcaatttgtctatgaagtcaaatgtttctttgggaggaagccaaaaggttcagatagccctgtcgcctgcaagagtcatcttttgctttccttctgaatcatgggatttgagctgcccatccatgctggataagttccttgtcattgaccacacaccatctctgaaatcaggagcagattcatctccacatcaaaatgaaatgcctaatgatgtcaatgcaatcacaccatctactttggtccatttggctacagggaactttgacatctatttggttagaccagttaatgatgaactgaatgctagaacctgttctctgagtaggcaaactttctcttctctgaagattttctctgttaccggatccaattgtcatgaaactggcattacgatgctctggaagaagtatcctttaaaagaccctgagatggtgagcaaaacttggagtttgccaaacctgcatgagcaaaagattgctcagaacaaaaatggtaaatgggttggtgtttcctcttctacaacctcagaagatcttgaggaatcaagttccagtatacgcagggagctcctccggagcacagagtttttgttgcacattaaactttcttgtgtctcagttcatctcagtaagaaggactgtgggatactaaaccatttgctaaaaaacatccttgatggtctttcagatggagcaactggaaattttgaaaatgacagtgacaattgtatgccaatccatgatactgctagccaaacatctgtcatttttgaatgcagcatcttggatatctgcactgaattggatgaaactgttgaagttggtcctttattgcagactgaactagaaggttcctggaactgtctcaaattgtcaatttcaaaattttctctgctatcctcttctaatgttggcggggttaacaatgccaattttctttgggtcaatcatggtgaaggtgagctctggggctctattactggtacggatgactatgaagaaagcaaagatgttcttctagttgtttgcaaggattcggcaagtagacgaggtgatggtgaaggtagcaatatcttgtcttttggaactgcgggctgttctgtgactcatatcatgaacccaaagtttcagaagaattatacttctatcaatgttcgttctgcaacagccgttgcacctggtggccgcatggattggataagcgcgatttgcctattgtttagttcagcttcagatggaactgaacaaccagctaatagtagcacaatgaacgattcccagggtggtgaacctttttcatcactgttctttcttgagctggttgatgttgctgtgagctatgaacctcatttcagaagttctgcactcagcgctgaaactccagactgcaaatacttttcatgccttttagctgcatcattgtttaaacttcacagcaaatctgcatcaaactctacagctactgattttgatatcgagctgcgagatctcggggttctcatttgtggatcctctagttttaaaaatgtcagttgtggctatggtgcagattacctccgtcggatgggctatgctaagattgtgcagaatacattcattgaagctgttctaagaattgatacttccttttggaaactcgaattatcagactcgcaattcgatattggtacttgtcacgatacgacacatggtgttattcaattgtgctcccagcttcagcagctatatgctccagatatgcgggatgctttagatcatctacaatccagatggaatagtgtccaacaggcaaacaagcaaaatatgggcactgatgtgtcagaaaagtcagagagtagcattgataatctgacagattcagaggagtgcaagtcagatggtttgcttgatgatataattgagaatgccttttgcactgaccaggacttcgcaagctactcattgagtggtagcgaaatggatgaagagtttggcctgagtaaggccatcccagaggcaaatgatgcctgtatttcacttgaatcattactagttacccctgaagccagtactagtgatgatctaataattgaatcttattatatgccaccttcgtcatcatcaactctatacaatgaagaccagggcaattgtgctcctagaaccgtagagtgtgacgaaggtgaatggtataataattttcccacaatagatgaaaaccatgttcaaaggaacaaaccacgagaagagcaaatatttcaacaaaaactgaagcctgctattttcatcttgaattctgatgaatcgtgcagtctgaaaggaaaggttcttattcatgatatagatgtcaagtggcggatgtacgagggaaatgactggaaattagctcagaaagatacgattagccggccgtgctcaaatggcagagacaagaggtcttatttagagtttattatgtctgcgctcaatatccagttcaatatgtatccagatggggatatttttgtttctaagctatccatctctgccaaagacatcaatatttgcgaccaaagtacacatgctccatggaaaatggttcttggttgctacaactcaaaggattacccgagagaatcttgttctagtgcattcatgttagaactggagtctgtaagacctgaaccacaggctcctttggaagattacaggttacatcttgagattttgcctctacagttgcatcttgatcaagggcaacttaacttccttatcagtttcttccagaatgacttgtgcaacaaccctaatttggcttgcgaaaatgagaatattgacgcgcagagtacaatgtatcgaagcgatacaattgctgatgaggcattacttcctttctttcagaaatttgatgtgaagcctcttgttctgcacattaattatattcctcggcattttgatcctgttgcacttagcaaaggaaattatgcagaacttctcaacatttttccatggaagggaattgatttaaagctgaagcaggtttctgccatgggtgtttatggtttcaataatatatgtgaaatagtagctgcagaatggttagaggacatctcaaaaaatcaggtccataaattgttaaaagggcttccacctataaaatcattagttgctgtgagttcaggcactaagaaattggtctctttacccataaagagctataagaaggatcggaagttgctcaagggaatgcaaagaggtgcggttgctttcattagaagtgtttccattgaagctgtggggcttggtgtacatttggcggcaggagctcatgatatgcttctaaagacagaaagtgcccttacagcaattccaccacctttagcctcacgtgaagcaaaaagaaccaaagacaatgtaagagctaaccagcctgaaagtgcgcaagaagggctgaagaaggcatatgaaagcttgaccgatgggtttggaaggactgcctctgctttgattggaaatcctattaaagtttataatcgtggggctggtgccggatcagctttggctactgcaatctgtggagctccaggtgctgcagtggctccattatcagcgtcttttcgtgctgcacattatacacttcttggtataaggaataggtga

SEQ ID NO: 82157 - DNA, 2856 bp, Oryza sativa
  Clone ID: PAT_MRT4530_81614C.1
atggcacggggctccgcaccgctcgacggtagcgtgctgccgccttcccgcatcgtgagcgagaagcaggccgggctgccgcgccgattcatgccggcatctgccgccggccgggaggtggtcgagctgggcgagggacgctcggtaccacactacccggggcggtccgtcttcttcctccctttcgcaatggcggggctggtcccgccattctcttctttcttcatggatgttctggagttttatgacctccagatggcgcaccttacccccaacgcgataatgacgttggccatcttcgcgcacctgtgcgagatgtttatcggggtgcgcccatctcttcggctgtttcggtggttcttcaccgtacagccagtgtcgccgccgtcggtagttggtggctgctacttccagccgcgggggccggcgctgagccgctacattccctgcgtcctccgcaagaagtgggacgactggaagagtgactggttctacaccccctcgccgacgaagcgcgcctccaacttccgagccagcccccagcgcagctccgtggaggcgtccctcatcccccaaggagtcctccccctctgcagcgatccagatcgtgccaacatcctgaccatcatgatggcggtcggggcgtcagaggagcgggctcctcgaggccacgatggcgcgggcgggagccgcaggggagaacaatctaccccaggagggggtcgtgcttctgggccccgtgacaggggcccggggggcagccgccctgccgacgcccgagggaagaggaagcaagagggtaccccctccccatctcctccccgagggggcggggcggcgcgtgtcagcagcaggcgcccggagggggccgcgccgacgccgcagcccgagggggagcggaagaagaaacggctccgcaagatgggggggaccgaatcataccggggaaaccttatctcccccccaaggtggtcgttcaaccgacctcctcgtagcgagatcccgtcgcgcccctcccgccattccaagtccggccagtctgaggccgaggatacggcgaccgcggaggcccggaggcgggaaactgaccggcgagaagccgcggatcgccttcgggaagccgaggaggctgcccaagaggccgtccgggctcgccgggctgaggaagccgctcgggaggaggccagactccgccgggccgaggagtccgcccgggaggcggaggcggcgcgcgcacgccaggcggcctgccaagcccccgacccgactccgcccgaggcgacgacgacttccgaggccacccacgacgaggccgcgggcgcaccgctcgggcccgacccctcgggcgacgctcaggacaagccaggtccgggggacgtccctgagtccggtacatcgatcggcgggccgagccgtgcggcatcctcaccgaggcggctctcccccatgccttccgctgccccactgagcgcagagccccttctgcaggccttggccgccgcgaacaccacggtgttggacgggttaagtgcccagatggaggtcctgcaggcagagcaggcggagctcgacgctgcatgggcgcgtgtcgaagaggggcaacgctcggtggaggccatggtggaggctggccgcaaggcacaccgccggcacacctcggagctcgaggcccgtcggaaggagctggcggagatcgctagggaggtggaggaggagcgggaggctgccctcatcgccaccgcagtgatgaacgaggcgcaggacgaccttcgccttcaatacgggagctgggcggcggagctaggaaagaagctcgacgccgcccggggggtccttgacgccgctgctgcccgggaacggcgggcggcggagaccgaggcggcgtcccggcggcgcgaagaagcccttgaggcccgtgtcacggcgctggaagagcgcgcctgcgtgaaggagagggacctggcggaccgcgaggccgccgttgccatccgggaggctacactggcggcgcacgaagccgcctgtgctgaagaggagtgcgcactccgcctccgcgaggatgcgctcaccgagcgggagcgagctctcgaggaggccgaggccgcggcgcaaaggctggcggacagcctgtcccttcgtgaggcagcgcaggagaaacaaacgcgtcgcaatctggaaggtgcccgcgccgagagggccgcactggatcagcgggctgctgagctcgaggcacgggcaagggagctggatgcgagggcgcgttgcggcggggcggccacgggcgacggcgatctagccgcccgcctcgcagctgccgaacacaccatcgccgagctgcagggcgcgctggactcgtccgccggggaggtcgaggccctccgcttggcaggcgaggtagggcccggcatgcttcgggacgccgtctcccgtctagaccgcgccgggcggcaggtgggcctctggggcgggcggatcgcaaaatatgccgccaaccaggggggcctcgcccagcgcctctcagagatggccgggactctccagcggctccccgaggagctcgaggagacgatcaagtcatcctcgagagacctcgcccggggggcagtggagcttgtactggcaagctaccaggccagggacccggacttctccccgtgggcggcgctggacgagctccctcccggaaccgaggacgacgcgcgcgcgcaggtccgggacgccgccgaccacatcgtccacagcttcgagggtacggcccctcggctcgcgttcgccctcgactccgacgtggagggcggcgacggtggtgtggatgacagcgacgacgaggccggcgacccgggagcctcgaagtga

SEQ ID NO: 82158 - DNA, 591 bp, Oryza sativa
  unsure (1)..(591): unsure at all n locations
  Clone ID: PAT_MRT4530_81615C.1
acntacctcggncacccgancctgatccacgctcagagcatcctcccatctggcggtcagtgntgctcatggcgccgtcgaggggtaccgcatcgccggcgggccgctcggcgaggtcgtcgacccgctctaccccgcggcgccttcgacccgctcaggcctcagccgatgaccccgaggcgttcgcggagctcaaggtgaaggagatcaagaacggccagccatcgccatgttcatccatgttcaggcttcttcagtccaggccatcgtcaccaggcaagggccccctcgagaacctcagccgaccacactcagccgaccccagtcaaacaaacaacgcctgggcagtacgccaccaacttcagtccccggcaagtgaagtgggggaccagtagcttagcagtggttaattgtggttggatggatttgtggccagcgagttcgttgtctttggttggggaagatgggtttagtgcgacgagatgatgatcgagttggtttgtgtacactaagaagatgaagaagaagatgatgtttttgcaataatgattttattcgtttcccaactaaaaaaaaaaaaaaaaaaaaaaa

SEQ ID NO: 82159 - DNA, 653 bp, Oryza sativa
  unsure (1)..(653): unsure at all n locations
  Clone ID: PAT_MRT4530_81616C.1
aattgtaatacgactcactatagggcgaattgggtaccgggccccccctcgagtttttttttttttttttttaagaagnaagtatccantanttattancgagntcaaatataatcaccaccaantgtccnncttgtggtgtttgtttgtacccnnnncccatactaattctcattnacatnantctgaggtcactcttccngagncntnctatacncccgngtagnantgtagtggatntctcggantnaacganccgggctctcctcnnctntggtccncgacgcntcgggctnnntcncnatcagatgccatncgcattaccgaccagtcagatggccangcacagantntggactatgaccggggttggtggcgggaanaacgcattntcgatctgtcntgataanccatatatggggcncggtcagctcgtgggccaattccngcttaccgtgggatccactactactanaacntccccaccggcgtctagcacgggggntgtcccnnaaanaanggtcncacaactttgctnttcanggnangantttcctgtataaatgttggccccccngcaaataccgaacnggancaatgtgtnacatggtcaaatgatganacccttctgctttccaatnccctncngggnt

SEQ ID NO: 82160 - DNA, 5665 bp, Oryza sativa
  Clone ID: PAT_MRT4530_81617C.1
atgggttctgtctccggcatcgacgacttcgcctttcctcccgggcaggcgttccggttcggcagcctcaacttcatcaccaatgacttcggcaagatctctctccttgactcggattcgaaccagtcggggagagaccaggtccccgcgccgttcggtattccgaactcggccgaggcctactccaagaccatctctcccgagttggtttcaaaccactcggacgagatccaatctactcctcagcgaccagatcaagatgacgggtcctatccctcaatcctgatgagacttcctgatgatttggccgctgtcttcacagccaaagcatctcccactcgaagatctagacaagccccggcttcggccccgatccaatctagatccagggaggttggcgttatactccaacctcttgggacagtctcgacagaagagttggatggctacctcagctcccctggtgtcagttctcgactaatcgaggtcctcgactatgacgacttcggctaccactatgactacggcgacttcgacaactttgacgacagctatgaggataattacacgcctatctttttcggcgtattcatggctgacaacgaaatggaggaacaacgccgagcccgagaagcggaggaagagcgcacacgacaagaaactgaacgtcgccgattggaggaagaacgacagcgacaagagcgagaacgactacagcgtgagcaacaagatcgcgagcgagttgcaaaggaggctgaagatcgacggcagcgcgccttggaatctgggcgacgagcgagagagctcatcgggcaacaagacgtcaatggaacagcggtttttcgcaccccccagcagaactcggttgcagcaatcactctcctcgacaccctcctcaaggaagacgcactcaatcaagctgatcatgttgtcaacatcttgaaccagacgaagaccatgattgctgcctcggttccagccaactccgcaagcacccgcaccctgactggtagccgagtccctcaccttcgatctcaggactatcaccagccaagcctcagcatagccggcgccggatctagtcgcaggagcaggggacatgatgaacgatctgagtcctggctcacagtctatggtctcgtagtccgcgcagcaggaggagacagcaaagccatggcgaattatctacctgtggccctagcagattctgcccggtcatggcttcacgggctaccccgcggcacgatcggatcataggcagagctacgcgaccacttcatcgccaacttccaaggcacttttgaacggcctggtacacagttcgatctctacaacatcgtttagaagtctggagaatcccttcgagattacatccgacgcttcttcgagcaacgcaacaagatctccgacatcaccgacgacgttatcattgccgcctttattaaaggcattcgccacgaggacctagtcggcaagttcggacgcaaacctcccaagacggtcaaacagatgtttgaaaaagccaatgagtatgccaaagccgaagatgctattacggcatccaagcagtcgggcaccacttggaagccaaagaaggatacaccgaccgtaggagggagtggaagtaacaaccacaaggatcgcaagcgtaagcccgaagaacttgtggcaacaacctctccattttccctacaacgttcccgcgtcaacaccttcgacaagataatgaactcccaatgtccgcatcatcccaactccaaccacgtggccaaagattgcttcgtctacaaacagtttgcggagcaatacgtcaagaatgcacgtaagccctcagacggagatcaagtcacatcaaagaagaaagatgatgaaaacgatgccccgactggttttcaagatcatcgcaaagaactcaatcacatcttcggcggacccctggcttatgaatctaagagaaagcagaagctaacagaacgggagatcaatgcggttcagcctaacacgccccaataccttcggtggtcagagatagcaattaagttcgaccgctcggatcatcccgaccgagtggtccacccggggcggttccccctggtactagacccaatggttcgcaatgtcaagctccgaagaactctcatcgatggtggcagtgcactcaacatccttttcgctaagaccctggacgatatgcagattccttgcacggaattaaagccgagtaatgcacccttccacggtgttatcccaggattatcagctacaccactcagccagatcactcttccggttactttcggcactcgggagaattttcgcacaaaaaacgtttgtttcgaagttgctgatttcgagacagcgtaccatgctatactcggatgaccggctctaaccaaattcatggccgtcccacactacacctatatgatgatgaagatgcttggtcctcgaggagtcatatcactatggagcgacatcaagcaagccgtcacatgtaacaaagaaagttgcgagatggcccaaacccgcgagatcactctcgctcgcgaagagatccgactggctgcgaccacggaaagcgcgctcatcacctttcttcagaataataaagatatttttgcgtggaaaccatccgatatgcctggtattcccagagaggtgattgagcactctttacatgtcaaggaagacgccaaacccatcaaacaacgactccgccgttttgcacaagataggaaggatgcgatcaaagaggaattaaccaagctgttagtagcaggcttcatcaaagaagtcctccatcccgactggctggctaacctagtactagttcggaagaagaccgggcaatggcgcatgtgtgtcgattacaccgacctcaacaagtcttgccctaaagatcatttcgggttacctcgcattgaccagatccgactaaaaaaatccgactgcttgaagacctcgtttattacaccctttggggcctactgctacatcaccatgccctttggattgaagaacgcaggagcaacctatcaacgcatgattcaaagatgtttttcaactcagatcggccgcaatgttgaagcttatgttgatgatgtagtcgtcaagaccaagcagaaggatgacctgattgcggatttagaagaaacttttgaaagcattcgtgctttcaggatgaaactaaaccctgaaaagtgcatcttcggagtaccgtcagggaagctgctcggatttatggtatctcaaagaggcatacaggccaacccggagaaaatcaacgccatcctcaacatgaaaccgccgagttcccagaaagatgtccaaaagctgactggttgcatggcggcgctcagccggttcgtttcgcgactcggcgaacgggggatgccctttttcaagttgctgaagaaaactgacaatttccagtggggacccgaagcacaaaaagcctttcaagacttcaagaaacttctcactaccccaccagttttggcctcgccacgtccgcaagagccgctattattatatgtgtcggggacctctcaggttgtgagcacggtcctggttgtcgagcgtgaagaggaaggccatattcaaaaagttcaacgaccaatttatttcgttagcgaggttttggccgactccaagacaagatatcctcaggttcaaaagttattatatggtgtcttaattaccgtcaggaaattatctcactattttcaaagtcactcggtcacggtggtcacgtcgtttccactcggggatatacttcataaccgcgaagcaaacggacggattgcgaagtgggccttagaattgatgcctttggacatatctttcaagccacgaacttcgatcaagtcacaagctttagctgatttcctcgccgagtggaccgagtgccaagaagatatgccagaggagaagatggaatattggactatgcattttgatgggtcaaagaggcttacgggtgctggagctggggttgtcctaatttccccgactggagaaagattgagctacgtattgtggatacatttttctacgtcccataacgtggcggaatacgaggcgctgctccatggattaaggattgccatctctttaggcattcgccgactaatcgtccgaggagactcttagttggttgttaatcaagtcatgaaagaatggtcctgtcaagatgataatatgaccgcttatcgacaagaggtacgcaagttggaagataaattcgatggacttgagctcacccatgtccttcgacacaataatgaggcagcagacagattggccaattttggttcaaaacgggaagcagtcccttctgatgtgttcgttgagcatctttatgaaccaaccgtgcccagaaaagaaaaaattgaagccatgaatactcaaggtgtaagcatgattgaagcagactggagagaacctctcataagatttttaaccaaacaagaactccctcaagacaaaaatgaagccgagcatatttccaggcgcagcagactctgtcattcacgagaccgagttgtacaagaaaagtccatcaggaatcctgcaacgctgcgtatctttggaagagggaagacaattgctaaaagacatccattcaggcatctgtggtaaccacactgctgcacgaaccattgttggcaaggcttatcggcagggttttttctggcccacagctgtttccgacgccgacaaaattgtgcgaacatgtgagggttgtcaattctttgcccgacaaactcacttgccagctcaggagttgcaaaccatcccgttgtcttggccattcgcggttttggggcttgatatggtcggtccattcaaaaaggcagtcaggggttatactcatctctttgtagctgtggaaaagttttccaagtggattgaagccaaaccggtcgtcacaatcaccgcagacaaagctagagatttcttccccaatattgtacatctgtttagagtaccgaatcgtatcattactgataatggcactcaatttacgggcggaatatttaaagatttttgtgaagactttggcattaaaatttgttacgcctctgtggcacatcccatgagtaacggacaagtcgagcgcgccaatggcatggtacttcaagggatcaaagcacgagttttcgaccgactgcgtccctatgctggcaagtgggtagaacagctgccgtctgtactttggtctttacgcaccacccctagtcgggctactggccagtcgctgttcttcttggtttatggcggagaagctatgctaccaagtgaggcagagtttgaatccctccgatttcgtaacttccgggaggagcgatatgaagaagatcgagtggatgatatcaaccgactggaagaagcccgtgaagtagccctaatccagtcggctcggtatttacaagggttacgccgttatcataatcggaatgttcgatcgcgagcctttttagtcggcgacctggttctgaggagaattcaaactacacaggatcggtataagttatctcccttgtgggaaggaccgttcataatcgctgaagttactcggccaggttcttaccgactcaagcgtgaagatggtactcttgtcaacaattcttggaatattgaacaccttcgtcgattttatgct

SEQ ID NO: 82161 - DNA, 446 bp, Oryza sativa
  Clone ID: PAT_MRT4530_81618C.1
gcgagtcgtcgacccagctctaccccgcggcgccttcgacccgctcggcctcaccgaggaccccgaggcgttcgcggagctcaaggtggaaggagatcaagaacgccgcctcagccatgttctccatgttcaggcttctttcgtccagcccatcggtcaccaggccaaggccccctcgagaacctctgccgaccacctcgccgaccccgtcaaacaacaaacagcctgggcagtacccaccaacttcgtcccacggcaagtgaagtgggggacacgtagcttacagtggttaattgtggttggatggatttgtggccagcgagttcgttgtctttgggttggggaagatgggtttagtgcgacgagatgatgatcgagttggtgttgtgtacactaagaagatgaagaagaagatgatgtttttgcaataaaaaaaaaaaaaaaaa

SEQ ID NO: 82162 - DNA, 387 bp, Oryza sativa
  Clone ID: PAT_MRT4530_81619C.1
accagtccactctccacctacaccagtaaaacctcctccacccccagcaccagtccactcttctcctccaccattaaaatccccaccaccgcccgcaccggtgagctctccacccccactgataaaattcccaccaccacccgcgccggtgatctctccaccggcaccagtaaaatttccaccgcccccggcaccagtgagctctccaccaccaccagtaaaatctcctccaccttctgcgccggtcaagttcttccacctccacctatggaatccccaccaccacctgcaccagtaaagcttaccgccttcttctgtaaggcttcttcccaaccgcgcctggaagttcttcacttcaccagtacatttacccccaacttctttttc

SEQ ID NO: 82163 - DNA, 368 bp, Oryza sativa
  Clone ID: PAT_MRT4530_8161C.1
catgccttcaattgttgattgtatatccattgtgaaacagaaaggtaccacaccacacactgacggtagaagttcaacggaaagaaaggcagggcacaggtagctacccccccagggcatttggaacagcaacctcaaaagcaaaagtaagaagcggcagggagtggaaccaaagacaggtacaacgagaaccgtagtataaagagtcttctggacaaactttgctataacaaacctggaggggaacaaacaatgctaaataataaactatggaggccggcgaaggcgaaccaccaccaaagaagccgcagcatgcacttccagaagcagctgaattgtaaaaaccctgaatccgcaagatggcaaaa

SEQ ID NO: 82164 - DNA, 3345 bp, Oryza sativa
  Clone ID: PAT_MRT4530_81620C.1
atgaaggcacctgcagggcagacttctaagtctgctaatgtgaccattggcaacactggagatggaagcgggtatgatctgaagtttacttcgggaaagatcgtgcagctgaagaacgtgcagcatgtcccttctatcgacaggaatcttgttagtggctcccgtctgactagagacgaatttaagatgtcccattatgtggagaagatcttgaatcgctttggctacattgatagtaagccttctccaacaccttatgatcctagcttgttgcttcgcaagaacaagagaattgctaggaatcaactggaatactcccaaatcattggctcgttgatgtacctggctagtgcaactaggcctgatatctcctttgctgtgagcaagttgagccgatttacctctaatccgggagatgatcactggcgtgcgcttgagcgagtaatgcgctatctgaaaggtactgtggaattggggcttcactatactgggtatcctgcggtactggagggttatagtgattctaactggatctctgatgtggatgagatcaaagccactagtggatatgttttcacactgggtggtggtgctgtttcatggaggatgaagcctggtatatatctgaccgggaccaacgtgccatctccaggagctaacacgccggctccggctagggacgacgtgctgccgccttcccgcatcgtgagcgagagacaggccgggctgccgcgccgcttcatgccggaatctgccaccggccgggagatagtctcgctgggcgagggatgcccggcgccacgctacccggggcggtccgtcttcttccttcctttcgctatggcagggctggttccgccattttcttctttcttcatggatgttctggagttttacgatctccagatggcgcacctcacccccaacgcggtaatgacattggccatcttcgcgcacctgtgcgagatgttcatcggggtgcgcccatcccttcggctgttccggtggttcttcaccgtacagccggtgtcgccgccgtcggtggttggtggttgctacttccagccacgggggccggcctccaactggcgggcgccggtagatctgggagatggctacgacgccgtcctcgaccgcctggcgggcctgcgatcccaggggctcacaggggccatggtgttcggcgactatcttcgtcgccggatcgcgccactccagcggcgcgcccggggcgcctgggagtacaccggctccgtggaggcatccctcattcctcaaggagtcctccccctctgcagcgatccagaccgcgcctccatcctgaccatcatgcaggcggtcggggtgtcggaggagcgggctcctcgaggccacgatggcgtgggcgggagccgcagggggaacaatctaccccgggagggggtcgtgcttctgggccccgcgacgggggcccggggagcggccgccctgccgacgcccgggggaagaggaagcaggaaggaacccctcccccatctcctccccgagggggcggggcggcgcgtgccagcagcaggcgcccggagggggccacgccgacgtcgcagcccgagggggagcggaagaagaaacggctccgcaagcgagatcccgtcgcgtccctcccgccattccaagtccggccagcctgaggccgaggacccggcgaccatagaggcccggaggcgggaatctgaccggcgagaagccgcggatcgccttcgagaaaccgaggaggccgctcgggaggccgcccgggctcgccagaccgaggaagccgctcgggaggaggccggactccgccaggccgaggcgacgacatcctccgaggcgacccgtccgggggacatccctgagtccggcacgtccatcggcgggccaagccgcgcggcatcctcttcgaggcggctcttccccacgccttccgttgctccactgagcgcagaaccccttctgcaggccttagccgtcgcaaacaccacagtgttggacgggttaagtgcccaggtggaggccctgcaagcagagcgggcggagctcgacgccgcatgggtgcgtgtcgatgaggggcgacgctcggtggaggccatggtggaggtgggccgcaaggcacaccgccagcacgtctcagagctcgaagtccgtcggaaggtgctgggggagatcgccaaggaggtggaggaggagcggggggctgccctcatcgccaccaccgtgatgaacgaggcgcaggacaccctccgccttcaatacgggagctgggaggcggagctagggaaaaaactcgacgcagcccggggggtccttgacgctgccgctgcccgagaacggcgggcggcggagaccgaggtggcatcccggcggcgcgaagaagcccttgaggcccgtgccatggcgctggaagagcgtgcctgcgccgtggagagggacctggcggatcgcgaggccgccgttgctattcgggaggtcacactggcggtgcacgaagccgcctgtgccgaagaagagtccgcgctccgcctccgcgaggacgcgctcaccgagcgggagcgagctctcgaggaggccgaggccgcggcgcaacggctggcggacagcctgtccctccgcgaggctgcgcaagaggaacaagcgcgtcgcaatctggaaagtgcccgcgccgagagggccgcactgaaccagcgggccgctgaactcgaggcgcaggcaagggagctggatgcaagggcgcgtagcggcggggcggccacgggcgacagcgacttagccgcccgcctcgcagctgccgaacacaccatcgcggatctgcagggcgcgctggattcgtccaccggggaggtcgaggcccttcgcctggcaggcgagatagggcccagcatgcttcgcgacgccgtgtcccgtttagaccgcgccgggcggcaggcgggtctctggggcgggcggactgtgaagtacgccgccaaccaggggggcctcgcccagcgcctctcggagatggccgggactctccagcggctccccgaggaactcgaggggacgattaagtcatcctcgagggacctcgcccgaggagcggtggagctcgtactggcgagttaccaggccagggaccccgacttctccccatggacggcgctggacgagttccctcccgggaccgaggacggcgcgcgcgcgcaggtccgggatgccgccgaccatatcgtccacagcttcgagggttcggcccctcggctcgcgttcgccctcaactccgacgaggagggcgatgacggcggtgtgggcgacagtggcgacgaggctggtgacccgggtgcatcggagtga

SEQ ID NO: 82165 - DNA, 628 bp, Oryza sativa
  unsure (1)..(628): unsure at all n locations
  Clone ID: PAT_MRT4530_81621C.1
nnnnnnnnnnngaattgtaatacgactcactatagggcgaattgggtaccgggccccccctcgagtttttttttttttttttttttacagaaatacacactaccggtacagatctcaccctctctccaatactcgtacatccatccacgcggtccacacgaatacgtacatctatacggtacacgtacgtacatctactgcaccgcgtacacacacgcacactctcctgcanagacgcgcatcgtcgtcaacctagctagcttagctgaaggcgatgcgtcgccatggcagcacggcggcggcggcgctcacttgccggggacaaagttggtggcgtangcccaggcgttgttgttgacggggtcggcgaagtggtcggcgaagttctcgaaggggcccttgccggtgacgatggnctggacgaaaaaaccgaacatggagaacatggcgaagcggncgttcttgatctccttcacttgactccgcaaaggctcccggtctccgcaagccaacggtcaaactgccccgggtaaacggtcaaaactcccaacgccnccgnanacgtacccncacgnccataacccctgaccccaatgaagacctccttgttagncgttcagtncaaccc

SEQ ID NO: 82166 - DNA, 2406 bp, Oryza sativa
  Clone ID: PAT_MRT4530_81622C.1
atggcacggggctccgctccgctcgatggtagcgtgctgccaccttcccgcatcgtgagcgagaggcaggccgggctgccgcgccgcttcatgccggaatctgccaccggccgggagatagtcacgctgggcgagggatgcccggcgccacgctacccggggcggtccgtcttcttcctcccttttgcaatggcagggctggttccgccattttcttctttcttcatggatgttctggagttttacgatctccagatggcgcacctcacccccaacgcggtaatgacattggccatcttcgcacacctgtgcgagatgttcatcggggtgcgcccatctcttcggctgttccggtggttcttcaccgtacagccggtgtcaccgccgtcggtggttggtggctgctacttccagccgcgggggccggtgctaaaccgctacattccctgcgtcctccgcaagaagtgggatgactggaagagcgactggttctacacccccctcgccgacgaagcgcgcctccgacttccgagccagcccccagcgcaggcctccaactggcaggcgccggtagatctgggagatggctacgacgccgtcctcgaccgcctggcgggcctgcgatcccaggggctcacaggggccatggtcgagatcccatcgcgtccttcttgccaatccaagtccgcccaatctgaggccgagaatgcggcgaccacggaggctcggaggcgggaatctgaccggcgagaagccgcggatcgcctacgggaagccgaggaggccgcccggcctcgccaggctgaggaagccgctcgggaggaggccagactccgccaggccgaggtgacaacatcctcccaggcaacccgcgaaactgaccggcaagaagccgcggatcgccttcgggaagccgaggaagctgcccaggtggccgtccgagctcgccaagctgaagaagccgctcgggaggaggccagacttcgccaggccgaggcgacgacgacttccgaggcagctcgcgacgaggccgcgggcgcatcgcttgggcccactccctcgggcgacgctcaggacaagccaggtccgggggacatccccgagtccggcacgtccatcggcgggcagagccgcgcagcatcctcaccgaggcgactcttccccacgccttccgctgccccactgagcgcagagccccttctgcaggccttggccgtcgcaaacaccacggtgttggacgggttaagtgcccagatggaggccctgcaagcagaacgggcggagctcgacgccgcatgggcgcgtgtcgaggaggggcgacgctcagtggaggccatggtggaggtgtgccgcaaggcacaccgccggcacgcctcagagctcgaagcccgtcggaaggtgctgggggagatcgccagggagaccgaggtggcatcccggcggcgcgaagaagcccttgaggcccgtgccatggcgctggaagagcgtgcctgcgtcgtggagagggacctggcggaccgcgaggccgccgttgccattcgggaggtcacactggcggcgcacgaagccgcctgtgccgaagaagagtccgcactccgccttcgcgaggatgcgctcaccgagcgggagcgagccctcgaggaggccgaggccgcagcgcaaaggctggtggagagcgcgtccctccgcgaggctgcgcaagaggaacaagcgcgtcgtaatctggaaagtgcccgcgccgagagggccgcactgaaccagcgggccgctgaactcgaggcgcaggcaagggagctggatgcaagggcgcgtagcggcggggcggccacgggcgacagcgacttagccgcccgcctcgcagctgccgaacacaccatcgcggatctgcagggcgcactggattcgtccaccggggaggtcgaggcccttcgtctggcaggcgagatagggcccagcatgcttcgcgacgccgtgtcccgtttagaccgcgccgggcggcaggcgggtctctggggcgggcggactgtgaagtacgccgccaaccaggggggcctcgcccagcgcctctcggagatggccgggactctccagcggctccccgaggagctcgaggggacgattaagtcatcctcgagggacctcgcccgaggagcggtggagctcgtactggcgagttaccaggccagggaccccgtcttctccccctggacagcgctggacgagttccctcccgggaccgaggacggcgcgcgcgcgcaggtccgggatgccgccgaccatatcgtccacagcttcgagggttcggcccctcggctcgcgttcgccctcaactccgacgaagagggcgatgacggcggtgtgggcgacagtggcgacgaggctggcgacccgggtgcatcggagtga

SEQ ID NO: 82167 - DNA, 615 bp, Oryza sativa
  unsure (1)..(615): unsure at all n locations
  Clone ID: PAT_MRT4530_81623C.1
ctcggactacctctggccacccgagcctgatccacgcgccagagcatcctcgccatnctgggtcggtgtcaggtggtgctcatgtggcccgttcgaggggtaccgcatcaccggcgggccagactcggcgagttcgtcgacccgctctaccccggtcggcgccttcgaccctgctcgcgcctcagccgatgatccccgatggcgttntgcggagctcaaggatgcaaggagcatcatagaacggccgcctcgtccatgttctccatgttcggcttcttccgtccaggccatcgtcaccggcatagggccccctcgagatacctctgccgaccacctcagccgaccccgtctaacaacaacgcctcgggcgtacgccaccaacttcagtcccccggcaagtgaagatgggggaccgtatgcttacgcagtggttaattcgatggtntggatggatcttgtggccacgcgagttcgattgtctttgggttcggggaagatgggtttagtgcgacgagatgatgatcgagttggtgttgtgtacactaagaagatgaagaagaagatgatgtttttgcaataatgattttattcgtttcccacaaaaaaaaaaaaaaa

SEQ ID NO: 82168 - DNA, 1588 bp, Oryza sativa
  Clone ID: PAT_MRT4530_81624C.1
cggcgacggcgctgctgcacgagatgctgctccgggctcgccgggatggggaggagccggagctgtcggacgagcagctgcgctccaacgaccagctccaggaagacgagatgctggcactagaggcaatttatggagacaatataagcattttaagtgcaaaggatggactacgttgtttccaggtccatgtgcactgggaaattcctgatggtaccagcatatccacagagctatcccagggtgataaccatgaccaaaatagttgattctttgacacattcagtgtccagcacttggctccaatttcattgacatgccttatgcctccatcatacccaagccatcgcgctccatactttactctcagttcacagtggttggatgccgtgaaagtttcctccctttgtctcatgctggacacaatctggacacagcaacttggacaggaagttgtttatgcgtgggtgcaatggctgcagagctctgcgctttctcatcttggttttgatgatgggatactcatacaacagcctggtagtatgatgggtcctgtggatgttcgtgctgttgcagagattgcgtctgtagagtctgttgcacaatggttaatcagctacaatgaggagcaatgccatgaatcttttctaagtggccttcatgactgcatgatttgtttcaccgagtacgggggtattgattttattacacttccatgccagcattacttttgtcggaggtgtatggaaacgtactcaaggatgcatgtcacagaaggaacagtgctgaaattgttgtgtcctaacgacaagtgcgggggcatcattcctccaagtctattaaaaaggttgctaggagatacagattttgaacgctgggaaagattgatacttcagaagactctagactcaatgtcagacttggcttactgtccaagatgtggagcagcttgcctggaagacgaggagaacaatgcccagtgccccaagtgcttcttcagcttctgcgcccgctgcagagatcgccgtcacataggggagaagtgcatgactatagaagaaaagctaaattccttacaggatcgcaccgtggtgccttttttaagcaaagacagctttgccagtaaaatgaacttgtcaaatgaaatatccagcatcaaggaagtgctccgttcttctgttcgatgtccacattgtggtactgccatctcccgagtatcaggctgcaaccatatgttatgcagtaactgtaggcaatcgttctgctatggctgtggcaaggcagagaatcatggccattcaaggtacattcttcttagatctcaaatgagccctgcagataccaggagaatctggcaacgaagaagaatccaaccgtcctcattgaggaggtgaagaaagaactggagggggaactgtcaagacagcatccgtgcccaaattgtcgccaaccaaatcctaagatgggaaacaacagccatatgttctgctgggcatgccaggttcattactgtgcgcagtgccacaggatggttcggaagagctccgagcattatggtccccgtggatgcaagcagcacagtgtcgac

SEQ ID NO: 82169 - DNA, 342 bp, Oryza sativa
  Clone ID: PAT_MRT4530_81625C.1
ctccaaccatacaatgtagtattgagaatgcgctaacacgcatcacaaagctggatcgcaaggagctctgcttggttggagctggcagaacagatacaggtgttcatgcatgggggtgctatcttacagcttgagattgaaggcactggctttctgtacagacaagttaggaacatggtagctttgttgctacaagttggaagggaggcactaccacctgacatcgtcgcaaaaatcatcgcagcaagagaccgcaaggaactagcaaaggtggcattatcagcaccacctcatggattgtacctcatgtcagtcaactatgacaaggaaatgctacagcct

SEQ ID NO: 82170 - DNA, 371 bp, Oryza sativa
  Clone ID: PAT_MRT4530_81626C.1
caaaaaaggattgagttatttcgagaaatatattaaaccaactccaatccttttaccaattaacatattagaagatttcacaaaaccattatcgcttagttttcgacttttcgggaatatattggcggatgaattagtcgttgttgttcttgtttctttagtccccttagtagttcctataccggtcatgtttcttggattatttacaagcggtattcaagctcttatttttgcaacgttagccgcagcctatataggtgaatccatggagggtcatcattgaattgactaggtttcaaaatagtcttttttttagcttaactcaattcatgcatgggtgcggaaaattcgcttggttggaaaacaaaata

SEQ ID NO: 82171 - DNA, 2787 bp, Oryza sativa
  Clone ID: PAT_MRT4530_81627C.1
atggcacggggctccgctccgcttgacggtagcgtgctgccgccttcccgcatcgtgagcgagagacaggccgggctgccgcgccgcttcatgccggaatctgccaccggccgggagatagtctcgctgggcgagggatgcccggcgccacgctacccggggcggtccgtcttcttcctcccttttgctatggcagggctggtttcgccattttcttctttcttcatggatgttctggagttttacgatctccagatggcgcacctcacccccaacgcggtaatgacattggccatcttcgcgcacctgtgcgagatgttcatcggggtgcgcccatcccttcggctgttccggtggttcttcaccgtacagccggtgtcgccgccgtcggtggttggtggttgctacttccagccgcgggggccggtgctgaaccgctacattccctgcgtcctccgcaagaagtgggatgactggaagagcgactggttctacacccccctcgccgacgaagcgcgcctccgacttccgagccagcctccagcgcaggcctccaactggcgggcgccggtagatctgggagatggctacgacgccgtcctcgaccgcctggcgggcctgcgatcccaggggctcacaggggccatggtgttcggcgactatcttcgtcgccggatcgcgccactccagcggcgcgcccggggcgcctgggagtacaccgggtccgaggactgtatgaggacccaccggggggtcaaatgggactgggtccccgaagacttcaaggtaatgatccaacgggtgctgaatctcagctccgcggaggcatccctcatcccccatggagtcctccccctctgcagcgatccagatcgcgccaacatcctgtccatcatgatggcggtcggggcctcagaggaacgagctcctaagggccatgatggtgcgagcaggagccgcaagggagatcaatctaccccaggagggggttgtgcttccgggccccgtgatgggggctcggggggcagccgccctgccgacgcccgagggaagaggaagcaagagggttcgtcccacgcccattgtggctgtattcattcttccaacacaagttttcattcacccatcttgtttgtcttctggcttttcttctgcttcagcgagatcccgtcgcgtccttcttgccaattcaagtccggccaatctgaggccgagaatgcggcgaccatggaggctcggaggcgggaatctgaccggcgagaagccgcggatcgcctacgggaagccgaggaggccgcccaggtggccgtccgagctcgccaagctgaagaagccgctcgggaggaggccagacttcgccaggccgaggcggcgacgacttccgaggcagctcgcgacgaggccgcgggcgcatcgcttgggcccactccctcgggcgacgctcaggacaagccaggtccgggggacatccctgagtccggcacgtccatcggcgggccgagccgcgcagcatcctcaccgaggcggctctcccccacgccttccgctgccccactgagcgcagagcctcttctgcaggccctggccgtcgctaacaccacggtgttggacgggttaagtgcccagatggaggccttgcaagcagagcgggtggagctcgacgccgcatgggcacgtgtcgaagaggggcgtcgctcggtggaggccatggtggaggtgggccgcaaggcacaccgccggcacgtctcagagctcgaagcccgtcggaagatgctgggggagatcgccaggaaggtggaggaggagaggggggctgccctcatcgccactaccgtgatgaacgaggcgcaggacgacctccgccttcaatacgggagctgggaggcggagctagggaagaagctcgacgccgcccggggggtccttgacgctgccgctgcccgagaacggcgggcggcggagaccgaggtggcatcccggcggcgcgaagaaacccttgaggcccgtgccatggcgctggaagagcgtgcctgcgtcgtggagagggacttggcggaccgcgaggccgccattgctattcgggaggtcacactggcggtgcacgaagccgcctgtgccgaagaagagtccgcactccgcctccgcgaggatacgctcaccgagcgggatgcccgcgccgagagggccgcactgaaccagcgggccgctgaactcgaggcgcaggcaagggagctggatgcaagggcgcgtagcggcggggcggccacgggcgacagcgacttagccgcccgcctcgcagctgccgaacacaccatcgcggatctgcagggcgcgctggattcatccaccggggaggtcgaggcccttcgcctggcaggcgagatagggcccagcatgctttgcgacgccgtgtcccgtttagaccgcgccgggcggcaggcgggtctctggggcgggcggactgtgaagtacgccgccaaccaggggggcctcgcccagcgcctctcggagatggccgggactctccagcggctccccgaggagctcgaggggacgattaagtcatcctcgagggacctcgcccgaggagcggtggagctcgtactggcgagttaccaggccagggaccccgacttctccccatggacggcgctggacgagttccctcccgggaccgaggacggcgcgcgcgcaggtccgggatgccgccgaccatatcgtccacagcttcgagggttcggcccctcggctcgcgttcgccctcaactccgacgaggagggcgatga

SEQ ID NO: 82172 - DNA, 537 bp, Oryza sativa
  unsure (1)..(537): unsure at all n locations
  Clone ID: PAT_MRT4530_81628C.1
gggcggtccaggtggtgctcatggccccgtcgaggggtccgcatcgccggcggccgctcggcgaggtcttcgacccnctttaccccggtcggcgccttcgacccgctcggcctcgccgatgaccccgtaggcgttcgcggagctcaaggtggaaggagtatctagtacggtcctgcctcgccatgttctccatgttcggcttcttcgtcgcaggcacatcgtcaccggcaagggccccctcgagatacctcgccgaccccctcgccgaccccgtctactaccacgcctgggcgtacgccccccacttcgtccccggccatgtgatatgtgggggtnccgtagcttacccgtggttaattgtggttggatggatttgtggcccgcgagttcgttgtctttgggttggggaagatgggtttagtgcgacgagatgatgatcgagttggtgttgtgtaccactaagaagatgaagaagaagatgatgtttttcccaataatgattgttattcgtttccccaaaaaaaaaaaaaaaaaaaa

SEQ ID NO: 82173 - DNA, 566 bp, Oryza sativa
  unsure (1)..(566): unsure at all n locations
  Clone ID: PAT_MRT4530_81629C.1
aaccggcctaatcaagggaaggtntntcctnttggggggcaggggggttatgggccntgcggggttcgtggcccgggggcacgtggccggtggccgtccggttttcccaccggccccccggccccttggcccgtgcgctgccccggacccggggtgcgggtctcggggtgggggatccaggacgcccccttcgccatgttntccatgttcgggttttttggtccagcccattgtcaccggcaagggccccttcgagaacttcgccgaccacttcgccgaccccgtcaacaacaacgcctgggcgnacgccaccaantttgtccccggcaagtgaagtgggggaccgtagcttagcagtggttaattgtggttggatggatttgtggccagcgagttcgttgtntttgggttggggaagatgggtttagtgcgacgagatgatgatcgagttggtgttgtgtacactaagaagatgaagaagaagatgatgtttttgcaataatgattttattcgtttcccaaaaaaaaaaaaaaaaaaaaaaaaaaaaaaaaaaaaaaaaaaaaaa

SEQ ID NO: 82174 - DNA, 765 bp, Oryza sativa
  Clone ID: PAT_MRT4530_8162C.1
atgggtttgcgtttgctgctgctgctgctgctgcttctttttcaccttccaaccgccacattccagagcagcaaagaccgtattaccactatgctgtccctcatcagcccatcgtatagaggaaagggagatgtattcaagaaaattcatgttgttgttgaagatgaggagcggcagatccaagggacgcaactagagggcgtgggcaccggcagatcaatggagcgaacgagcgaagaaagaagaaagaagaggaccaccaacgcaacgcaacgagcgagtctcgaaaacgcatcgcatcgcgtctcacaccaactccaatgcacgccacgccacgccacaattacaattatactccacactccgatacggcgttcttcctaccacgacgtggttcgggtgacggaggtggaggacctcctcgacatctccggcgtccagacctacgtcatcaacagcgccaaggtcctcttcctcaacgagcgcccccagccacgcggcgccggagccgccgccggcaaggccgccgcctccccctacaactgccagatctgcgcacgcgccctcctcgaccccttccgcttctgctccctcggttgcaagctggtggacaccaagacgggtggtcgcggggccaccgtgcagcccggcgatgcgaccaatgacgatgccgccgccgccggcggcagcagcaagaacggcggcgcacggccgcaggggaggcggcgcaaggggattccccagcgcgccccgttcggttcgtga

SEQ ID NO: 82175 - DNA, 405 bp, Oryza sativa
  Clone ID: PAT_MRT4530_81630C.1
aggtgggaaacgaataaaatcattattgcaaaaacatcatcttcttcttcatcttcttaggggacacaacaccaactcgatcatgatttcgtcgcactaaacccattttccccaacccaaagacaacgaactcgctggccacaaatccatccaaccacaattaaccactgctaagctacgggcccccacttcacttgccggggaccaagttggtggcgtacccccaggcgttgttgttgacggggtcggcgagggggcccgcgaggctctcgagggggcccttgccggtgaccatggcctggacgaagaagccgaacatggagaacatggcgaggcggccgcctttgagccccttcaccttgagctccgggaacgccccggggtcattggccaggccgagcgggt

SEQ ID NO: 82176 - DNA, 562 bp, Oryza sativa
  Clone ID: PAT_MRT4530_81631C.1
cttttctttttttttttttttttttttttttttttttttttttttttttaaaaaacacatttccccccaaatatgctaaaatggatttgtttccctttccttgcgaggccttaaaaaatttttaaaagggttaaaagggggaggcttgtaacccgggaacccggatggggaatcctttctttcaggacttacaaaatcgcagggaaattttaaaaggataaacatcatacttatccttttccctgttttaaaatccgggcaatccaaaaaaaacaccgggaagcacggtaggactatgattttatagttgccaaatttgtttcgttaaaaggggcttaaggagtcccaccggacgggttttgtttcttttttgcctgaaaggaccgacataaaaattccagtttttttttttgattttggaacttataaacttgttttttatttaactcacgctcctaaataaatttaattaaagcaacatcggaattctaacattaactcttaaggaattcattatccttttttaaaccctttataagcttaaccattttttccatctcct

SEQ ID NO: 82177 - DNA, 3726 bp, Oryza sativa
  Clone ID: PAT_MRT4530_81632C.1
ttcgcctccccccttcccccctcagcgccacccagccctcgcttctgcgacccacaccgccccatcgacgcttggtggtccacatcattcttgcagccactgtggtgcttttttttggtatgaggagcgaacacgtagagagagacatacttcaaatccatcatataatttgtgttgcaaagcatattcggcaatacaatagcatgtttgcaattacttcaatgggagctaaaattaatgagtccataaatgatggaagagcaccatatgttttcaaaattagtggtcaagtctgtcatcgaattggttctctgctcccaccacaaggtcatcgtccagaatatgcgcaattatatatttttgatacagaacatgagatctcaaaccggatcaatgttgcttcatctccccgtgtcactttccatgctaatgaacaaattgttgcatccttgatagaaatgttgaatacaaataatcccattgttcaactattcagaacagcacatgaaagaatatccgatgttggatcagctgatgtagggcgagatattataatccaagatcgtgcatcacgtttgcagcgaatcaatgaaaatcaccgcaagtttatggccatgcaatatccactgttgttcccatatggagaggatggttatcatgaaaacctcacatatcgtacaacagcacgcactcaatccatgcaacggaataaagttacaatgctagagtgctatgcatataggttgcatgataggccaggagacttcaatacaccgttacggtgtaaaaggctaacacaatcttatgaagtagattcttattgttgtgtcgaggggagccggatagcacattatcgcacaccagccttccaaagtaaatatagatcatcaccattcaactcattgattaattctgtctcaagaggtattacatctggatcttctgttgggcaaaggataatattgccagcttcatttaccggaggacctcggtatttgtatcaaaattatcaagattctattgctatttgtagaaaatatggttgccctgatctttttttgacattcacatcgaattctgcttggcctgaaattagagaagctttagcatcaattcctggccaacaaccttccgatcgtccagatattgtcaatagggttttcaaaatgaagctcaatattttaatggatgatataaagaagcacaaattttttggccctataaatgcagttatctatacaatcgaatttcagaaacgtggtttacctcatgttcacatcatcatatggttggccaaaacagaacccttagattcccagaagattgatcattatatttcagctcaattaccagatcctgcaattgaccaaataggatttgaggctgtatcttcttttatggtgcatggaccttgcggtcctcacaacacttcttcaatctgcatgtctgaaggaaaatgcacaaaattctaccctaaggaattctgtgaagaaacaactatattagaaaatggttttgtcattgaagatccaaacagctctacgaccaaactaactgcatggttagaagctaatagggagaacccttctgctaggcaacttacatatatagaattccctgaacattggacatggcacaatcaaggcaaatattgggatggtcgtcgtggttctcaatgtagaattggccgcattgcttatgtaaacccttcacaaggagaagcttactatctgcgaatgctactgcacatcgttaagggccctagatcctttgctgaaatcagaactatatcaggtcatgaatatcctacatttcgggcagcatgtgaagcattaggtctccttggtgatgaccaagagtggtcaaatgctttgaaagatgcagctcaatgggccttaccatcccaactgcgacaactttttgttacaatgttactcttttgtgaggtaacaaatcctacaagacttttcagtgaacatgaatcatatatgagcgaagatatatcatatcgaatgccccgcaacacttctcaggccagcagctccaccaatccttatgttagatctgttcttctcattgagttagataaactgctaagagatgctggctatgacttatcccattttagtttgccactaccagatgatattggaagtgtttcagcacagaatagacttgtactagatgagctcagctacgatgtttataacatgccatccactatagatgaagctatttcaggtttgaataacagccagaaggaagtttttaatgctatttataattctgccatcaataatgaaggacggactttctttgtttatggatatggaggaaccggaaaaacattcttatggacaactttgcttaattctataagaagccagggaaagatagcattagctgttgcatcatcgggtattgcatccttgctgcttcctggtgggagaacacctcattcccgtttcaaaatcccattggaaatctctcaaaattcaatgtgcagtataaagaaaaatacaaatttagctgaactgatccaaaaaaacatctctcattgtgtgggatgaagctcctgttaatcataaatattgctttgagtcattggatcgaactctacgagatatattgtctgaaacaaacccaaattcattagacaaacaatttggtggtataacagtagttcttggtggagatttcaggcagacactgccagtcatccaaaatgctacaaagcaacagattttgagatcatgcattgttaactcttatttgtggaatcagtgcatacttattgagttaactgaaaatatgaggcttacctctgcatctatttccgcacaagatagagaagagttaagaaatttttctaattggcttttgaaaataggaaatggcacagaaccttttgttgatgtcccagagcaactaacgaacatgttcatagagatgcctcagtcccttcttctatcaccagactgtaggaatctagatggattgatttcttttgtctacaacttaggatgtcaaccatcaaatcttatatcatatctgtgtgagcgtgcaattttagcacctacaaatgaggtggtttcagaaataaacaatagaatgattgctcagttagaagcgagtgagatgtcatattatagctcagatacaattgatgacagttctactaactgtactgctatagaggcactatatccaacagagtttctaaacacaatttctataaatggacttccagaacatgtgctgcacttgaaaattggtgttcctataatgcttttgcgtaatctagatccatcaagaggactctgcaatgggactaggctcattgtcacacaactaacaagccgtgtgatagagggagaaataatcacaggaaaagcgaaaggtacaaaagcatatattcctcgcattgttacaacatcaactcaatccaagtggcccttcaaattgcggcgtcgacaatttccaatacgtctttcatatgctatgacaataaataagagccaaggacagaccttgagcagagttggagtctatctaccttcacctgtgttctcccatggtcaattatatgttgcattctcgagagtgacttcacctaatggtttgaaagttctaatagagaacagccctgcttcttatgaaaattgcacacacaatgtagtatattccgaggtattcaacctaataaatagaaacaggaactgataa

SEQ ID NO: 82178 - DNA, 384 bp, Oryza sativa
  unsure (1)..(384): unsure at all n locations
  Clone ID: PAT_MRT4530_81633C.1
gggaaacgaataaaatcattatggcgnggaacatcatcttcttcttcatcttcttagtgtacacaacaccaactcgatcatcatctcgtcgcactaaacccatcttccccaacccaaagacaacgaactctctggccacaaatccatccaaccacaattaaccactgctaagctacgggcccccacttcacttgcccgggactaaattggtggcgtactcccacgcgttgttgttgaccgggtctgcgaggtggtccgcgaggttctctagggggcccttccctgtgaccatggcctggactaagaaacctaacatggagaacatggccaggcggccgttcttgatctccttcaccttgagctcctccaactcctcggggtcat

SEQ ID NO: 82179 - DNA, 1707 bp, Oryza sativa
  Clone ID: PAT_MRT4530_81634C.1
atgcagctcaatgggccttaccatcccaactgtgacaactttttgttacaatgttactcttttgtgagtttgccactaccagatgatattggaagtgtttcagcacagaatagacttatactagatgagctcagctacgatgtttataacatgccatccactatagatgaagctatttcaggaaatggcacagaaccttttgttgatgtcccagagcaactaacgaacatgttcatagagatgcctcagtcccttcttctatcaccagactgtaggaatctagatggattgatttcttttgtctacaacttacgatgtcaaccatcaaatcttacatcatatatgtgtgagcgtgcaattttagcacctacaaatgaggtggtttcagaaataaacaatagaatgattgctcagttagaagcgagtgagatgtcatattatagctcagattcaattgatgacagttctactaactgtactgctatagaggcactatatccaacagagtttctaaacacaatttctataaatggaattccagaacatgtgctgcacttgaaaattggtgttcctataatgcttttgtgtaatctagatccatcaagaggactctgcaatgggactaggctcattgtcacacaactaacaagccgtgtgatagagggagaaataatcacaggaaaagcgaaaggtacaaaagcatatattcctcgcattgttacaacatcaactcaatccaagtggcccttcaaattgcggcgtcgacaatttccaatacgtctttcatatgctatgacaataaataagagccaaggacagaccttgagcagagttggagtctatctaccttcacctgtgttctcccatggtcaattatatgatgcattctcgagagtgacttcacctaatggtttgaaagttctaatagagaacagccctacttcttataaaaattgcacacacaatgtagtatattccaagcaaaactgcaaggtttttggacgtctaataagattatgggatgctataaacatgagatcaaaatctgcagatcccctcatcagcattgacggcatcctattggatgaacataggttgatgctagggaaaaatgatgaaattgataattgggcggcggtcgtttcgcttctctcggatatggaatcggaacggcgcgggagaaggagaggcaactgtcgttggggcggtgtgggtcgcagaagcgagggctgggtggcgctgaggggggaaggggggaagcggacctcgcgtgcgacgtggcaaggcatagaaggggaggtgaagcggaaccgtggtgtagagtggcgcaagaggaggaggcgaagcgggatgtggcgtggatgcggtgcggcggggatgcgggggggggtgcggcggcgtgagatgcgagagaggggaggagcgatgcaagagaggggagtcgatgcgtgtgggccggcggagcagcgcgatgcgggagaggagaggaggggagcgatgcgggagaggaggtggggccggcgagtagcgatgcgggagaggggaggagaggagcgatgcggatggaaggaagcgctcgatgcttatccaacggtggggataaaaagggtgacatggaagcaccaggaagcagagaattgtagtagtggggatgatttgtacagaccttgttcttttggggagcatttgaatttagtgagcatgtag

SEQ ID NO: 82180 - DNA, 475 bp, Oryza sativa
  Clone ID: PAT_MRT4530_81635C.1
ggggggtaccgtttcccggggggccgtttggggagttttttgaaccgttaaacccgggggggcctttttgaaccgttggcttcgcggatgaccccgaggcgttcgcggagctcaaggtgaaggagatcaagaacggccgcttcgccatgttctccatgttcggcttcttcgtccaggccatcgtcaccggcaagggcccacctcgagaacctcgccgaccacctcgccgaccccgtcaacaacaacgcctgggcgtacgccaccaacttcgtccccggcaagtgaagtgggggaccgtagcttagcagtggttaattgtggttggatggatttgtggccagcgagttcgttgtctttgggttggggaagatgggtttagtgcgacgagatgatgatcgagttggtgttgtgtacactaagaagatgaagaagaagatgatgtttttgcaataaaaaaaaaaaaaaaaaaaaaaaa

SEQ ID NO: 82181 - DNA, 1718 bp, Oryza sativa
  Clone ID: PAT_MRT4530_81636C.1
tccttcacatataccatgacacacctttcaggcactatatttgaaccattgaatcttggtggtccacatcattcttgcagccactgtggtgcttttttttggtatgaggagtgaacacgtagagagagacatacttcaaatccatcaaataatttgtgttgcaaaggtgggagaatatggctgccaccctatcaacctcctccacagccattgttggatttattgacctcacaaaacagcactctttctaaccacttctttgatcatattcggcaatacaatagcatgtttgtaattacttcaatgggagctaaaattaatgagtccataaatgatggaagagcaccatatgttttcaaaattagtggtcaagtctgtcatcgaattggttctctgctcccaccacaaggtcatcgtccagaatatgcgcaattatatatttttgatacagaacatgagatctcaaaccggatcaatgttgcttcatcttcccgtgtcactttccatgctaatgaacaaattgttgcatccttgatagaaatgttgaatacaaataatcccattgttcaactattcagaacagcacatgaaagaatatccctagacgcatctgatcagttttgcataaggttatttggtaagctggatgcaaatggagatatttatagtgctccagtcgcttctgaagttgttggcctgattgttggtgatgttggatcagctgatgtagggcgagatattataatccaagatcgtgcatcacgtttgcagcgaatcaatgaaaatcactgcaagtttatggccatgcaatatccacttttgttcccatatggagaggatggttatcatgaaaacctcacatatcgtacaacagcatgcactcaatccatgcaacagaataaagttacaatgctagagtgctatgcatataggttgcatgataggccaggagacttcaatacaccgttacggtgtaaaagggtaacacaatcttatgaagtagattcttattgttgtgtcgaggggagccggatagcacattattgcacaccagccttccaaagtaaatatagatcatcaccattcaactcattgattaattctgtctcaagaggtattacatctggatcttctgttgggcaaaggataatattgccagcttcatttaccggaggacctcggtatttgtatcaaaattatcaagattctattgctatttgtagaaaatatggttgtcctgatctttttttgacattcacatcgaattctgcttagcctgaaattagagaagctttagcatcaattcctggccaacaaccttccgatcgtcctgatattgtcaatagggttttcaaaatgaagctcaatattttaatggatgatataaagaagcacaatttttttggccctataaatgcagttatctatacaatcgaatttcagaaacgtggtttacctcatgttcacatcatcatatggttggccaaaacagaacccttagattccaagaagattgatcattatatttcagctcaattaccagatcctgcaattgaccaaataggatttgaggctgtatcttcttttatagtgcatggaccttgcggtcctcacaacacttcttcaatctgcatgtctgattcttgatgcagcccaagcttcccaaaacatgaagatagacccggccgatcatccaacagcactcaataatgccattg

SEQ ID NO: 82182 - DNA, 314 bp, Oryza sativa
  Clone ID: PAT_MRT4530_81637C.1
tttttgtttttttattttttggggttgctttttttttttttttttttttttagaaaaagcagggtgcttatcctggtacaactgcatccttctcaaacaccgggtggttagcgacaacaaaaaaacaagggcccacaccccgcagctggctttgtttcccccaaaacacacaccagttttacaggacaagcccattttagaaaatttacaaggaccctcttttattgaaccaaaggggtcgggaatctatctccttcttggaccctaccctaagctgctggcagattttaatatcttcttcttcttcttcaaaa

SEQ ID NO: 82183 - DNA, 169 bp, Oryza sativa
  Clone ID: PAT_MRT4530_81638C.1
ggcggcacgcgtaccgtccacgcgtgcggccacgcgtgcgagagtgcaagtgcatgggcaaccagatctacataagaggagaggacgcatgcatagccaacagcaagtgaaggtttggctggttcatcactatattggaggcggccagcgtaaacgacgtggggattga

SEQ ID NO: 82184 - DNA, 235 bp, Oryza sativa
  unsure (1)..(235): unsure at all n locations
  Clone ID: PAT_MRT4530_81639C.1
aggtgccaaaggggtggtgaagtnggatgatggtgtgctgtgtgtgtgctgtgggtgtggtgtgtgggtgtgtgtggtgctgtgtgtgaccagaaaatgatgaatgtgcaatgaaggctgactgcttgtggtggaaatggagtgaccaatgtgttatgtattctcagacgcttctgacatgcattatgttagggcnaacagaacaacgttgtatagcctgaaaaaaaaaaaaaaa

SEQ ID NO: 82185 - DNA, 2365 bp, Oryza sativa
  Clone ID: PAT_MRT4530_8163C.1
actcactatagggctcgagcggccgcccgggcaggtgtcgctcgtcgacccctctccgccgccgaggctcgctgtcccaagctaatccgtccgcttcgttgaggattccattgaatgcttggctgtggtggagtgctacactgctagtagcagcttgcatctcagcaatttgggtgaaccccccacattcttgaggcagtaacaattggatctacatcttgccactacaaaaggatcaacgatctgtactagccttcatttgtgggttcctcattgggaattgggattctttacaatggcagatatgagccctaggacagatacatcaacagatgataccgatgataaccacaagcttgaaccaggtcagcttgctcttgctgctgcttctgactctgacagatccaaggacaaacatgaagatcaaaagacattgcgtcggctcgcccaaaatcgcgaggctgcaaggaagagtcgtttgaggaaaaaggcatatgttcaacaattggagaatagcaggctaaagcttacacaactagaacaagaattgcaacgagctcgtcagcagggcatttttatatccagctcagtggaccagactcattccatgagtggaaatggggcattggcttttgatatggagtatgcacgttggttggaagaacacaataggcaaattaatgagctaaggtctgcagtcaatgctcatgcaggtgataatgagctccgtggtgttgttgacaagatcatgtcacactatgaggagattttcaagcagaaaggaaatgcggccaaagcagatgtctttcatgtgttatcaggcatgtggaagacaccagctgagaggtgtttcttgtggctaggaggattccgaccatccgagcttttaaagcttctttcgacacagcttgaacctctcactgagcagcagctgtcagggatagccaaccttcagcagtcttcacaacaagctgaagatgctctttcacaaggaatggaggcccttcagcagtccttggcagaaacattggctgggtctcttggttcttctggatcaacgggaaacgtggcaaactacatgggccaaatggcaatggccatggggaagcttgggacccttgagaatttccttcgccaggtaactttgatctggctcagcacgccgcagtggcagtacatcggcttcttcactgtgatgccggcgtatgggttaacctgcacaggagatcccatcacttccattggcttatggtgtgattggttgggatacggagagtgcgcaggggacgactggcacgttattgactgcggggcagattgccacacaagcgagttggtgatcgaaaacttgaagccccggtgcatcagcaatgcaaggaggcgagcggtgttgcgagcatcatcgagcccacagtgggcacggccctcccatgagaaggagcagcagaggacggactgcattgaatcccaaaaatcgcacgaatatagtaccaagctagcagacttcaatgagatcgggaggtagatgtcgcaacgctacgggagtctcttaaatctgcattcaagttccaacattacgcggccatgccatcttgcccatgtcacaacagcgaagttcttgtgctaaatgcctatttcctccaaccacttggcatccatgggccatgcctcacttccttccccacctcgatctaccgcagtttgtggattgccagtaaatgccttggacatgtatgactactgttgctggctgaacgtacagtgggagcaacgttctagtagcaccccttcagcggctacacttcttgtcgggatcactgaggaattaatagcaactgtggtagattgaatggccacgttgtagcaggttaatgcatcgaaagtgatcgaacctgggcgaattaagcagacggtggcagccgtagacctagcagtcatggcgccagttgctatgccattaactcagatgtccccgccggcggactccttggtggagcaagagatggcaacacagcagaagaccgtggagggcacgacgaggacctggccagcagtggcgccatcatctcagttatctccatcagaggctggtttctcgaactcaaaggagcaagaggcagcgccagcgtggtcctcggaggcgggcggaatggcatggcacgaaggtgggtcggcgttttgcgtgaaggtggagcacagtgatggcgcgtgttgcgcgcagccaggctttgcttcctcccatgtgttggctgttgggctggccgggtcgactattgctgaagacaacggggacctccaaatggtcctggtttaaatggagatcgccgcccaggccctcacctgttcagccgcgacgcgactcgtc

SEQ ID NO: 82186 - DNA, 557 bp, Oryza sativa
  Clone ID: PAT_MRT4530_81640C.1
gacatcaaacgaacagaagaattcactttctgaataaacgaataaacggcatcttctcttgcaaagggtcagatattcagataggaatcgcgacgcaggcaatggcggcgatcagagagccggcgaggccgctcgccgggaccgagagcccagcgccactcttcgcgccgccgccggccgccccgccgttagccggcgagctgttcgtccccgccggcgtggccggagcacccgggggcgcctgcccggctggagcgccaccgccaccaccaccaccgggagggagacgacggcgacgacgaggaggacggcggagaaacgctgctcccggtggcgttggcgaccatgacgatgagcttttcgccggcgcggcagttggcgtcgacgccgatgttgaagaagaaggcgccggcgcggtcgagcgtgaccggcgtgttgccgccggagaacttgctgtcgtacgacgccgtgttgcacgcgttggactccgtcggttccaccaccaacaccggggacttgtcgcttcggggacgccaacaaaagctggagcggcgacc

SEQ ID NO: 82187 - DNA, 1143 bp, Oryza sativa
  Clone ID: PAT_MRT4530_81641C.1
cacgaggaaaagcttcactgagcttgatcaattactactagttaattacctatagctaagtagtagaaaaaaaactagctggttttggtttttgttgcagtgatcaatggtgaaaggtactagtggttacagctatggccttgggcttgcctgctttgctcttgtggttgccatggctggagctactcagctcaaggtcggcggcggcaatggctggagcgtcccggccgccaatgcggagtcgtacaacgattgggccgagaagatgaggttccagatcggagacaccctagtgttcgtgtacccgaaggacaaggactcggtgttggtggtggagccggccgactacaacgcgtgcaacacgtcgtcgttcgaccagaagttcgccgacggcaacacggtcttcacgctcgaccgcgccggcgccttcttcttcatcagcggcgtcgacgccaactgccgcgccggcgagaagctcatcgtcatggtcctcgccagccgcaacggcaccgccaccgccaccgcgccgtctccgcccccggcttcgtcgaccgcgccgccgccgacgtcgcctgcacccgccagcccgccgccgtcgtccccgtcacctccgcccgcttcaccgccgtctcccagctcgtcgggcgccgctgctccgacgacgccgccgcccgcgtcgtcgcctccctccactccgacgccagcgtcgcctgcgccatccgcgtcgtccccgccggcgccgccatcggcgaacgcgccgagcgcgcagggggcgaggaacccgagcgccacgtcgtcgccgcggtcacgctcgaccgcgccggcgccttcttcttcatcagcggcgtcgacgccaactgccgcgccggcgagaagctcatcgtcatggtcgccaacgccaccgggagcagcgcttcgccgccgtcctcctcgtcgtcgccgtcgtctccctccggtggtggtggtggcggtggcgctccagccgggcaggcgccgccgggtgctccggccacgccggcggggacgaacagctcgccggctaacggcggggcggccggcggcggcgcgaagagtggcgctgggctcacggtggcggcgagcggcctcgccggctctctgatcgccgccattgcctgcgtcgcg

SEQ ID NO: 82188 - DNA, 1467 bp, Oryza sativa
  unsure (1)..(1467): unsure at all n locations
  Clone ID: PAT_MRT4530_81642C.1
atggcggcggcggcggcggcggcggcgatatgtggggaggatgagacggcggcgcgggtggggtgcacgggggaatgggcgggcgggatcgagagggtggatcttggggagaggaaggaggcggtggcggcggcgggggcggggaagaggagcgtctacctgatggactgcgcgccggtgtggggctgcgcgtcgacgcgcggccgcagcgcggagatggaggacgcgagcgccgccgtgccgcggttcgcggacgtgccggtgcggctgctcgccagccggcgcgacctcgacgcgctgggcctcgacgccgacgcgctccgcctgccggcgcacctcttcggcgtgttcgacggccacggcggcgccgaggtggcgaactactgccgtgaaaggatccacgtcgtcttgagcgaggagctgaagcgacttggcaagaatttgggggagatgggcgaggtggacatgaaagagcactgggatgatgtgttcacgaaatgtttccagagagtggacgatgaggtttcagggagagtgaccagggttgtcaatggtggcggtgaggtccggtcagaaccggtgaccgcagagaacgtcggctcgacggcggtcgttgcgcttgtctgctcatctcatgtggtggttgccaactgtggagattcgcgcatcgtgctctgccgcgggaaggagcccgtagccttgtcaattgatcacaagcctgacaggaaggatgagcgggcaaggattgaagcccagggaggcaaggtcatccaatggaatggttaccgggtgtccggtatacttgctatgtcccgatcaatcggtgatcgctatctgaaaccatttgtcattccaaaaccggaagttatggtcgttccacgggcgaaggatgatgactgtcttattctagcaagcgatgggctgtgggatgttgtgtcaaatgaagaggcatgcaaagtcgcacgccgacagatccttctgtggcacaagaacaatggcgctgcatcaccattgtctgatgagggtgaaggatccaccgaccctgctgcccaagcagctgccgattatctgatgagactcgctctgaagaaaggcagcgaggataacatcactgtcattgttgtcgacttgaaaccgcgaaagaaactcaagaacatttcataacagggcctgggttcatcttgagtagctgaccatgatgtgtgtcaaagagtttcatacaactagtcggtcttcctcacgggacttgacccactgttttttttgctgggcttcaagaaattgtacatgtatatgctagatgtatcttccatctagggantaaatatctacctacctccattctatcccgtcagcttcagttttcagccctggcaagaagtatcccttgtacaataattgaacttggaaaaagctaagtggctgagatgaccagtaaaattaacataattgtgatcacctttcctg

SEQ ID NO: 82189 - DNA, 385 bp, Oryza sativa
  Clone ID: PAT_MRT4530_81643C.1
gcgcccacgcgttctttccttctttcgaaagccatacctactccttcccgtggatccgtcacctgcctccagtacagtgaatcctcagcacctgggctcgaaggaatggtcacgcgagtatgaagctgagaacaacctgaggttgtgctggagtggcctaccaaggagaagaacaggctgatagatgatgattaccgcgttgtagattacgaagcgcaccattaaatgccacacacgaatgctttgcaatgaaaagactgaggaaaagagatgagcctgacaagaggtatccgaatgcattgagggagttttatacctgaggagacccactacccactagaagtgacatacaaacataacggagagaagcacgacattgaagcat

SEQ ID NO: 82190 - DNA, 321 bp, Oryza sativa
  unsure (1)..(321): unsure at all n locations
  Clone ID: PAT_MRT4530_81644C.1
gcgatctagaaccacaggcaaaatacctgataattttggcagcatgagtagtttggaagatatgtaagatcagctatattaagttgttaataatacattattcagtgtatattatgcagtaacagatggaaactgtgcaatataaattttttgtatatgtttctcttctctgtcctgactaaacagacgtgcacacatgcatgccaataagctggccctatggcatgttaatgcgtagagtttttatctagaatagttgacatggagagcttctttttttattatattaaaatagacaggcatatctccacattntatctt

SEQ ID NO: 82191 - DNA, 141 bp, Oryza sativa
  Clone ID: PAT_MRT4530_81645C.1
ccggccgagaccattgcctacactacttacttcttgtgctggcgacgcctctgcattcgtgtcctccttctccgcctcgctaggggatagcacgcggaggaaaagaagcgtgggaacccaggacaaactggctcgctcggc

SEQ ID NO: 82192 - DNA, 409 bp, Oryza sativa
  Clone ID: PAT_MRT4530_81646C.1
catacaatgacgtcctatcatacggccacgcttccgccacgatgatgccacatggggggaggaccaaggcaacccgtcacatacccaccacgtaggacaaaaccgcctctaaaactagattcgcaacggattacagagccggggatgaaatatacccggctacacggttgaggaatgctattcatacacagccatgagtacgagggagagatagtggacttacaccactccatgtccgtcgagacacccgtgttcggatggacccgatgtaactcggcatctgcgaaatgggcctgacctgatgcgaaccatatgtcccttaataagccgtcaacagagtgggccaaactcggaggaaaaaagaaaaaacaaaaaacgagccccgtttctaccgaggacagtggccaac

SEQ ID NO: 82193 - DNA, 1492 bp, Oryza sativa
  Clone ID: PAT_MRT4530_81647C.1
atggcacggggctccgcaccgctcgatggttgcgtgctgccgccttcccgcatcgtgagcgagaggcaggccgggctgccgcgccgattcatgccggaatctgccactggccgggaggtggtcacgctgggtgagggacgcccggcgccacactacccggggcggtccgtcttcttcctctctttcgcaatggcagggctagtcccgccattttcttccgtcttcatggatgttctggagctttacgatctccagatggcgcacctcacccccaacgcggtaatgacgttggccatcttcgtgcacctgtgcgagatgttcatcggggtgcgcccatctctccggctgttccggtgtcggtggctgctacttccagccggggggccggcgctgaaccgctacatcccttgcgtcctccgcaaaaagtgggacgactggaagagcgactggttctacacccccctcgccgacgaagcgcgcctccgacttccgagccagcccccggtgcaggcctccagctggcgggcgccggtagatctgggagacggctacgacgccgttctttaccgcctggcgagtctgcggtcccaggggctgacgggggccatggtgtacggcgactaccttcgtcgccggatcgcgccgctccagcggcgcgcccggggcgcctgggagtactccgggtccgaggactacatgaggacccaccaggggcacaaatgggattgggtccctgaggacctgaggatggtggtccaacgggtgctgaatctcagctccgtggaggcatcccttatcccccaaggcggtcggggcgtcgaaggagcgggctcctcgaggccacgatggcgcgggcgggagccgcaggggggaacaatctaccccgggagggggtcgtgcttctgggccccgcgacgggggtccggggggcaactgccctgccgacgcccgggggaagaggaagcaagagggtaccccttccccatctcctccccgagggggcggggcggtgcgtgccagcagcaggcgcccggagggtaccgcgccgacgtcgcagcccgaggggggcgaaagaagaagcggctccgcaagatgggggagacggaaccatgccggggaaacctcatctctcccccaaggtggtcgtttagccgacctccccgcagcgagatcccgtcgcgcccccctcgccattccaagtccggccggtctgaggtcgaggagacggcgaccgcggagactcggaggcgagaagctgaccggcgagaagccgcggtccgcctccgggaatccgaggaggctgtccaggaggccgtccgggctcgccaggctgaggaggccgctcgggaggaggctagactccgccgggccgaggagtccgtccgggaggcggagacggcacacgcacgccaggcggcccgccaagcccccgacccgactccgcctgaggcgacgacgacttcggaggccacccacgacaatgccgcggggg

SEQ ID NO: 82194 - DNA, 3266 bp, Oryza sativa
  Clone ID: PAT_MRT4530_81648C.1
atggcacggggctccgcaccgctcgacggtagcgtgctgccgccttcccgcatcgtgagcgagaggcaggccgggctgccgcgccgattcatgccggaatctgccaccggccgggaagtggtcgcgctgggcgagggacgcccggcgccacactacccggggcggtccgtcttcttcctctctttcgcaatggcggggctggtcccgccattctctacttttttcatggatattctggagttttatgatctccagatggcgcacctcacccccaacgcgataatgacgttggccatcttcgcgcacctgtgcgagatgtttatcggggtgcgcccatttcttcggctgttctggtggttcttcaccgtacagccggtgtcgccgccaacggtagtcggtggctgctacttccagccgcgggggcaggtgctgaaccgctacattccctgcgtccttcgcaaaaagtgggacgactggaagagcgattggttctacacccccctcgccgacgaagcgcgcctccgacttccgagccagcccccggcgcaggcctccagctggcgggcggcggggctcacgggggccatggtgtttggcgacttccttcgtcgccggatcgcgccgctccagcggcgcgcccggggcgcctgggagtacaccgggcccgaggactacatgaggacccaccaggggcgcaaatgggactgggaccctgaggacttcaggatggtggtccaacgggtgctgaatctcagctccgtggaggcatccctcatcccccaaggggtcctccccctttgttgcgatccagagcgcgccaacatcctgaccatcatgcaggtggtcggggcgtcgggggagcgggccccccgaggccacgatggcgcgggcgggagccgcaggggggaacaatctaccccgggagggggtcgtgcttctgggccccgtgacgggggcccggggggcagccgccctgccgacgcccgggggaagaggaagcaggagggtacccctcccccatctcctccccaagggggcgtggcggtgcgtgccagcagcaggcgcccggaaggtgccgtgccgacgccgcagcccgagggggagcgaaagaagaaacggctccgcaagatgagggggaccgagccatgccgggggaacctcatctcgcccccgaggtggtcgtttagccgacctccccgcagatcccgtcgcgccctcccccgccattccaaatccggccggtctgaggccgaggagacggcgaccgcggaggcccggaggcgggaagccgaccggcgagaagccgcggaccgcctccgggaagccgaggaggcagcccaggaggccgtccgggtccgccaggctgaggaggccgctcgggaggaggccagactccgccgggccggggagtccgtccgggaggcagaggcggcgcgcgcacgccaggcggcctgccaagcccccgacccgactccgcccgaggcgacgacgacttccgaggccacccacgacgaggccgcgggcgcgccgctcgggcccgacccctcgggcgacgcttgggacgagccagcttcgggggacgcccccgagtccggcacgtcgatcggtgggccgagccgcgcggcacccacaccgaggcggctctcctctctgccttccgctgccccactgagcgtggagcccctcctgcaggccttggccgccgcgaacagcacggtactggacgggttaagtgcccagatggaggtcctgcaggcggagcgggcggagctcgacgcggcgtgggcgcgcgtcgaggaggggcggcgctcagtggaggccatggtggaggcgggccgcaaggcacaccgccggcacgcctcacagctcgaggcccgtcgtagagacctggcggagatcgccagggaggtggaggaggagcgggagactgccctcatcgccaccgccgtgctcgacgaggcgcgggacgacctccgcctccaatacgggaggcgggcggcggagctagaggagaagctcgacgccgcccggggagtccttgacgccgccgctgcccgggaatggcgggcggcggagaacgaggcggcgtcccggcagcgcgaagaggcccttgaggctcgcgccacggcgctggaggagcgcgcccgcgccctcgatgcgaaggagagagacctggcggaccgcgaggccgccgtcgccacccgggaggcaacactggcggcgcacgaggccgcctgcgccgtagaggagtccgcactccgcctccgcgaggacgcgctcactgagtgggagcgagctctcgaggaggccaaggccgcggcgcagcggctggtggacagcctgttcctccgcgaggcagcgcgggaggagcaggcgcgccgcaatctggaaggcgcccgcgccgagagggccgcactggatcagcgggccgctgagctcgaggcgcgggcgaaggagctggacgagagcgcacagcggcggggcggctgcgggccacggcgacctagccgcccgcctcgcagccaccggacacaccatcgccgagctgcagggcgcgctggactcgtccgccggggaggtcgaggcccttcgcttggcgaacgagaccgcgccgggcggcaggcaggcctctggggcgggcggtacacgaagtacgccgccaaccaggggggcctcgcccagcgcctctcagagatggccggggccctcgagcggctccccgaggagctcgaggagacgatcaagtcatcctcgagggacctcgcccggggggcggtggagctcgtactggcaagctaccaggccagggaccctgacttctccccgtgggcagcgctggaagagttccctcccggaaccgaggacggcgcgcgcgcgcaggtccgggatgccgccgaccacatcgtccacagcttcgagggtacggcccctcggctcgcgttcgccctcgactccgacgaggagggcggtgacgacggtgcggacgacagcgacgacgaggccggcgacccgggcgcatcggagtcccagcctcaagcggcgcgggtcggggctagtgcctggggagatcctcgtgtcgagactggccaggccgagagcgcggtgaccgagggttatgatgacccgattccggcccgggccaccgagggcagggtcgagcacgagcgtgctaattcaagccaagattcttcaaaaggaaacgatggcacagacacagtcctcaggaaatcgaaaatgcttttattgaaatacggaagagaaaaaag

SEQ ID NO: 82195 - DNA, 294 bp, Oryza sativa
  Clone ID: PAT_MRT4530_81649C.1
atggtgcctagctcgtcgggaggtcgaggcaagccaccatcgccagactccccaagctcccgcgagctcaccggcgacaatgaccgcccctcttgcgtgttccttgccggccgccgcccgtgcccgccgcaccggtcttccacgcccagctcctctctgtcgtgcgaccggttgagctcggtgacaacgtcgcccacagccgcgcaccagcctgccggcccttctctccatgcgtcgccgtcgagaagatggggacggccggtcgagctcagtgacgccaccgccctcgcctga

SEQ ID NO: 82196 - DNA, 2576 bp, Oryza sativa
  Clone ID: PAT_MRT4530_8164C.1
tgtttttgcaaaaaactacttcctgaaacttttattaggtcaaacagctcgaaactgagcaacagaaatgcaacgtccacttcctacaatctgtaacatatcactggaatttaagattgctactgttttgcatttacacatgaatatccacattgcacattgggaggtgacaattctacgcaacgggaaaaggcgctacattaaatcaatgatggatctatcagttaataatggaacacatctctacaaggtaaggggaggagggggctgtacaaatggggaaggtgagagagactgttgttaccctgccatctaaaagctaaatccccatgattaggtaggaaaggtgtgagtaggaagaaaaaagaatggtgtctgactaaaatctccaaaggaaaaaaaccaataccctctgcctacaattccttggctagcctaggaagacgttggatcttgtcttgagccaatgcaccatctccttgtcaaggggggaattattcaatacggcatccatcattggagtaccaaagaatcttgggtcactcttgaaaacccatatccggtccttgggccatggcctttgtgcctggttctccatgcgcgctaacatgaatctcacagttctgctgccatagactcgctcttgtgttggttttactgacttcacatagaaggaggatacatctggcaatgacatacaaccctttctagctcttgtcaatctagattcaggctccgcattctggctataccaataaatgagttgacctaagcaataattttctgggtatgtcttacagtactcctggaagcctggtcccagtttatctgcatatttgggacctaaatcaagaggactgataagaaccggtggagattttaccgtcttgtaatctcggactctgaaaaaacactttgtgtaagcatacatgtgaatcaaatcagcagcagcatcatgccgacacttgtatgtgcatgaaagagttctcagctcatcacgcaaccataaaagagaacttcggatttctccctcaatgtcctcggaaccagatggatcatgagcacgaattttggctttgaggtcagtaagtacatcttcctcaacatgaggttccattgactcaagaagttcatcaactaacgagccttcccctttccagatggcagaaactagacttctcccagttagcctcaccagtggaggaggagcattcttgggatccccaaatatgcatctcatgacatatcttaccttgtcaagtgtatgagtcaaattctgtaatcttgaattcagaactccctcggcctgaacctcggcatcattcttctcggaatccatgtttatatctgtgaaaaactggcgcttctcgtccacattgtgtttaaagatctcatgaggaagtttctgtctctcaaagaatataaaccgcaccaggtgagcagtgtaagcaacaagccatccaggcaaaccagcaagcaaacaggtaccaagaccagctctccccaagtcaattaagtcttgttgagaaacagagtttgcttcacaagcctgtaacagaagactatgtcgatcgagcacaccatggaattccatcaagaccttttcaaaagctccttccccagaaaaatttaaatagctgcccctgcatatttgacttccacagagacaaactgacgcttcgtgctcttctttactctcagtaacagagttgtaatcaaaagtgatttcctcgccttctgcaattggtcgaacagtgtaaattccaatctgataatgaccatccacagccgttacttttgcttcacagttagggttgcaggagtgacaaattctgctcgcatagttagccttatgcattgcatcaacgaaaaccaagtcatacccatcacggtctccctttggccgttctagcataatgttgtaaaactcaggagcttgatcgtcgctattgttttgtatatgcttaatgccatcttgtttttcataccatctccaagaagggtatacctccccaaagaactcgatgacaaagtcgtctacaccaaatccacccgttttgttacaaacaactccaagacccttcctataggcgacatagttatattctgggtggttcctcatggcctttagcattccaaggcacatctttgaagtccgtctgtcaccactctcctctgcagacttttggatttcttcaattacaggtttaagggggtaaaccatgggagtatttccagaaccagtgaactgcctcacttgcttattcaaggtgttcagaagcaactcttcaacaaaggtatgtttgtcagaggatggccaatcaagttcagtaggcatcatttcaagtaggagattatgtgtatatggatctattccatacacttcttgctcaagaacttcatccccaggtacttttctaggttgataatccttaacctctggtagttccaaattttcagtgccgttcttctgcgagagcagtttctctgaatagtcatcaggtaaagcgacccgcatctttctcagtacttcctcctcacccacgcgtccgcggacgcgtgggcggacgcaaggg

SEQ ID NO: 82197 - DNA, 3025 bp, Oryza sativa
  Clone ID: PAT_MRT4530_81650C.1
atggcacggggctccgcaccgctcgagggtagcgtgctgccgccttcccgcatcgtgagcgagaggcaggccgggctgccgcgccgattcatgccggaatctgccactggccgggaggtggtcgcgctgggcgagggacgcccggcgccgcattacccggggtggtccgtcttcttcctctcttttgcaatggcagggctggtcccgccattctcttgtttcttcatggatgttctggagctttatgatctccagatggcgcacctcacccccaacgcggtaatgacgttggccatcttatcgcacctatgcgagatgttcatcggggtgcgcccatctctccggctgttccggtggttcttcaccgtacagccggtgtcgccaccgtcggtagtcggtggctgctacttccagccgcgagggccggtgttgaaccgctacattccctgcgtccttcgcaagaagtgggacgactggaagagcgactggttctacacccctctcgccgacgaagcgcgcctccgacttccgagccagcccccggcgcaggtctccagctggcgggcgccggtagatctaggagatggctacgacgccattcttgaccgcctggcgggtctgcgatcccaggggctcacgggggccatggtgttcggcgactaccttcgtcgccggatcgcgccactccagcggcgcgccaggggcgcctgggagtacaccgggtccgaggactacatgaggacccaccaggggggcagatgggactgggcccctgaggatttcaagatggtggtccaacgggcggtcggggcgtcaggggagcgggctcctcgaggccacgatggcgcgggcgggagccgcaggggggaacaatctaccccgggagggggtcgtgcttctgggccccgtgacgggggaccggggggcagccgccctgccgacgcccgggggaagaggaaacaggaggataccccctccccatctcctccccgagggggcggggcggtgcgtgccagcagcaggcgcccggagggtgctgtgccgacgtcgcagcccgagggggagcgaaaaaagaagcggctccccaagataggggggaccgaaccatgccggggaaacctcatctcccccccaaggtggtcgtttagccgacctcctcgcagcaagattccgtcgcgcccccctcgccattccaagtccggccggtctgaggccgaggagacagcgaccgtggaggcccggaggcgggaagctgtccggcgagaagccgcggaccgcctccgggaagctgaggaggctgcccaggaagccgtccgggttcgccaggctgaggaggctgctcgggaggaggctagactccgccgggctgggaagtcagcccgggaggcagaggcgacgcgcgcacgccaggcggcctgccaagcccccgacccgactccgcccggggcgacgacgacttccgaggccacccacgacgaggccgcgggcgcgctgctcggacccaacccttcgggcgacgttcgggacgagccagcctcgggggacgcccctgagtccggcacgtcgattggcgggccgagccgcacagcgcccacaccgaggcggctctcccctctgccttccgccgccccactgaacacagagcccctcctgcaggccctggccgccgtgaacacgacggtgctggacgggttaggtgcccagatggaggtcctgcaagcagagcgggcggagctcgacgcggcgtgggcgcgcgtcgaagaggggcggcgctcggtggaggccatggtggaggcgggccgcaaggcataccgccggcacgcctcagagctcgaggcccgtcggagggagctggcggagatcgccagggaggtggaggaggagcgggagactgccctcatcgccaccgccgtgctcaacaaggcgcgggacgatcttcgccttcaatacggaagccgggtggcggagctagagaagaaactcgacgccgcccggggagtccttgacgccgccactgcacgggaatggcgggcgacggagaacgaggcggcgtcccggcggcgcgaagaggcccttaaggctcgcgccacggcgctggaagagcgcgcccgtgcgagggagagggacctggcggttcgcgagaccgccgtcgctatacgggaggcaacgctggcggcacacgaggccgcctgcgccgaagaggagtccgcactccgcctccgcgaggacgcgctcaccaagcgggagcgagctctcgaggaggccgaggccgcggcgcagcggctggcggacagcctgtccctaccgcgaggcagcgcgggaggagcaggcgcgccgtaatctggaaggcgcacgcgccgagagggccgcactggatcagcgagccgctgagctcgaggcgcgggcgaaggagctggacgcgaggacgcgcagcggcggggcggccgcgggcgacggcgatctagccgcccgcctcgcagctgcggaacacaccatcgccgatctgcagggcgcgctagactcgtccgccggggaggtcgaggccctccgcttggcgggcgaggtagggcccggcatgcttcgggacgccgtctcccgtctagaccgcgccgggcggcaagcgggcctctggggcgagcggaccgcgaagtacgccgccaaccaggggggcctcgcccagcgcctctcagagatggccgagactctccagcggctccccgaggagctcgaggagacgatcaagtcatcctcgagagacctcgcccggggggcagtggagcttgtactggcaagctaccaggccagggacccggacttctccccgtgggcagcgctggacgagttccctcccggaaccgaggacgacgcgcgcgcgcaggtccgggacgccgtcgaccacatcgtccacagcttcgagggtacggcccctcggctcgcgttcgccctcgactccgacgaggagggcggcgacggtggtgtggacgacagcgaccacgaggccggcgacccgggagcctcgaagtga

SEQ ID NO: 82198 - DNA, 369 bp, Oryza sativa
  Clone ID: PAT_MRT4530_81651C.1
ggccgacgccagccgcatccgaggccctgctgttcgacaccgcccagccacctcccccactgcctaccccctcccccgccgcctacccctctccccgccgccacctagggcgccacttggccgacgccctctccccgaccgctctccttgacgtgccgggaggagcggcccctggccgacgccgcgaccgcccgctcgccgccgccttgggcgccgctgggccgccgctagggcccctggatgacgccgcgccaccctctacccggccgctcttctgcacgcgccgggagaagcggagcctgggcgacgcccgctctcatacgccgccggcgcccgccgcttgtttctcgcggtcacagcgtgctcgcg

SEQ ID NO: 82199 - DNA, 3144 bp, Oryza sativa
  Clone ID: PAT_MRT4530_81652C.1
atggcacggggctctgctctgctcgacggcagtgtactaccgccttcccgcatcgtgaatgagaggcacgccggactgccgcgccgcttcatgccggagtccgccaccggtcgggagatagtgatgctgggcgaggggcgcccggcaccagactacccggggcggtccatcttcttcctccccttcgcgatggctgggctggtcccgccattttctcatttcttcatggatgtcctggagttctatgacctccagatggcgcacctcacccccaatgcggtgatgacattggccatcttcgcgcatctgtgcgagatgttcatcggggtgcgcccctctcttcagctgttccggtggttcttcaccgtgcagtcggtgtcaccgccgtcggtggttggcggctgctacttccagccgcgggggccggtgttgaaccgctacatcccctgcgtccttcgcaagaagtgggacgactggaagagcgactggttctacacccccctcgccaacgaagcgcgcctccgacttccaagccagcccccggcgcaggtctccagctggcgggcaccggtagatctgggggaggactacgacgccgtcctcgaccgcctggcgggcctgcgatcccaggggctcaccggggccatggtgtacggcgattacctccgtcgccggattgcgccgctccaacggcgcgcccggaacgcctgggagtacactgggcctgaagactacatgcggacccaccagggagccagatgggattgggctcccgaggacttcaagatcgtggtccaaagggtgctgaatcttagctccgcggaggcgtctcgcattcctcaggagatcctccccctctgcagcgatcccgaccgcgcctccattctaaccattatgatgggggtcggggcctcagaggagagagcccctaagggccacgacggcgcgggcgagcgccgccgaggggaacaatctgccccaggagggggtcgtgcttctgggccccgcgccgggggctcggggagcagccgccctgccgacgcccaggggaagaggaagctgggaggaacacctcccccatctcctccccgagggggcggggcggcgcgtgccagcagtcggcgcccggagggggccgcgccgacgtcgcagcccgagggggagcgcaagaagaaacggctccgcaagacgggggagacggaaccatgccgggggaacctgatttctcctccaaggtggtcattcaaccgaccccctcgcagcgatgtcccgtcgcattcctcccgccaccccaaatccggccagtccgaggccgaagatccagcggccgcagaggagcggaggcgagagtctgaccggcgtgaagccgcagcccgccttcgggaagctgaagaggccgcccgggaggccgcccgggttcgccaagcggaggaagctgctcgggaggaggccgcccgggctcgccaagccgaagaagctgcccgggaggaggccgcccgggctcgccaggctgaggcgacagctgctgctggcgcgtcacttgggcctactccctcgggcggccctcaggcgacatcctccgaggcggctcgcgacgaggccgcgggcgcatcgcctgggcctacctcaccgggcgacgcccaggaccaaacgggcccgggggacatccccgagcccagcgcatcctccggggggccaagccgcgtcgccttttctccaaggcggctcttctcctcatcttctgtcgccccgctgagcgccgagccccttctgcaggccctggccgccgcaaacaccgcagtgctggatgggttcaacacccaagtggaggccctgcgtgcagaacgagcggagctcgaggccgcatgggcgcgtgttgaggaggggcggcgctcggtggacgccatggtggaggtgggccgtaaggctcaccgccgtcatgtctcggagcttgaagcccggaaagcggcgctggcggagatcgcccgtgaggtggaggaggagcgggcggccgccctcatctctaccaccgcgatgatcgaggcgcaagacactctccgccttcagcacgcaagctgggaggcggagctgaagaaaaagctcgacgccgcccaaggggtccttgactccgccgctgcccgagagcggcgggtaacggagactgaagcggcgtttcggcggcgcgaggaggcccttgaggcccgtgccatggcgctggaagaacacgccggcgccgtggagaggggcttgacggaccgcaaggccgccgctggtctccgagaggcgacgctggcggcgcatgaggccgcctgcgccgaggaggagtgcgcgctccgcctccgcgaggacgcactcgctgagcgggagcgagctctcgaggaggctgaggccacgaccaaacggctggcggacagcctgtcccttcgcgaggcggcgcaggaggagcaggcgcgccgcaatctcgaatgcgtccgcgccgagagagccgcactggagcagcgggctgctgacctcgaggcgcgggaaaaggagctggacgcaagggcgcctatcggcggggcggccgcgggcgaaagcgacttagccgcccgcctcgcagctgccgaacacaccgtcgcggaaatgcagcgagcgctggactcctccaccggggaggccgaggcccttcgcttggcgggcgagattgggcccgacatgctttgggatgcggtctcccgcatgaagcgcgccggtcggcaagcaggcctctggagaggccagacgacggtgccccccaccaatctggaaggcctcgctccgcacctcaacaggatggcctgggtcctcgaacgactccccgaggagctcgagaagaccatcaagtcatcctcgagggacctcgcccggggggcggttgaactcgtgctagcgagttaccaggcccgggaccccaatttctctccctggatggcgctggaggagttccctcccgggaccgaggacgacgcgcgcgcgcgcgtcggggatgctgctgaccacatcgtcaacggcttcgagggctcggcccctcggctcgcgttcgcccccagctccgacgaggagggcgacgccagcggcgaggacgacggtggcgacgaggccggcgacccgggcgcatttgaatga

SEQ ID NO: 82200 - DNA, 1097 bp, Oryza sativa
  Clone ID: PAT_MRT4530_81653C.1
atgcccactccagtggttgccgcaaagccgtgcctctcgccgaccgctgtccccgccctcgacgtcgccgtcgtctccagccgccattgtcgcctccagccgccgtcgtcgcctccgcccgccgccgcgcccatgcctagaccacctcatctcctccctcctcgccccgcccgcaccttccctcctctagacgccctcgcccgcacccgcgctcaccccgtcggattccgcaacaggggcatcatgctcaccatcatccacccagctccgcccatgccgctcctcggccgcctccccacgtgcacccgcccgccgcctctcttcctctagtgcttgctcgtcatccagagcatgagccgctccaggcgcggcgcatccaccacgtcgatttagttgacgatggtcaggcaaacctgaaatatgcgaaggatgcagctggcgaggcggacgcaaactagttctgccatatttgtttggcacgtgatgatggcgagcacctccagggcattgctcctgtcgagcaggaaggcgaggtccctgtactccatgacaatgcaggagagcaccatctcatggaggtgggggaaggcggcgccgtgcagaatgtcgcgggtgtccgggagacgccagacgccgatgtggaggcgggtgagcgaggagcagccaaagagcgcggcggggaggcagaggtcgagccaaagactagctcctggacacccttggcggtgaggacctcgagccagcgcgcgatctcgccccggtgcgcctccatggaggtggtggagaggtgcgtgcaagcagaaggggcccaggtgcacggtgaggacgcaggacacgatggcaacgacaccgctgccaccaccgcgtccctccggtgaaaggtgggcgtcgacgagcgccaggggagccgagtgccagacgtggggccagcacaaggatagcatggcgatgcacacactttcaagacaacgacgaaaaggaagatgggcaggcaaacaaacggcgaagccatcgacactcgaggggcaatccgggcatttcgaaaaaaatctcaccactttcatccaaagaatgataaaataatgcgttcggtgttc

SEQ ID NO: 82201 - DNA, 3048 bp, Oryza sativa
  Clone ID: PAT_MRT4530_81654C.1
atggcacggggctccgctccgcttgacggtagcgtgctgccgccttcccgcatcgtgagcgagagacaggcagggctgccgcgccgcttcatgccggaatctgccaccggctgggagatagtctcgctgggcaagggatgcccggcgccacgctacccggggcggtccgtcttcttcctcccttttgctatggcagggctggttccgccattttcttctttcttcatggatgttctggagttttacgatctccagatggcgcacctcaccctcaacgcggtaatgacattggccatcttcgcgcacctgtgcgagatgttcatcggggtgcgcccaccccttcggctgttccggtggttcttcactgtacagccggtgtcgccgccgtcggtggttggtggttgctacttccagccgcgggggccggtgttgaaccgctacattccctgcgtcctccgcaagaagtgggatgactggaagagcgactggttctacacccccctcgccgacgaagcgcgcctccgacttccgagccagcccccggcgcaggcctccagctggcgggcgccggtagatctgggagatggctatgacgccgtcctcgaccgtctggcgggcctgcgatccctggggctcataggggccatggtgtacggcgactaccttcgtcgccggattgcgccgctccagcggcgcgtccggggcgcctgggagtacaccggatccgaagactacatgaggacccaccagggagtcagatgggactgggctcctgaggacttcaagatagtggtccaacgggtgctgaatctcagctccgtggaggcatccctcattcctcaaggagtcctccccctctgcagcgatccagaccgcgcctccatcctgaccatcatgcaggcggtcggggcatcggaggagcgggctcctcgaggccacgatggcgcgggcgggagccgcaggggggaacgatctaccccgggagggggtcgtgcttctgggccccgcgacgggggcccggggagcggccgccctgccgacgcccgggggaagaggaagcaggaaggaacccctcccccatctcctccccgagggggcggggcggcgcgtaccagcagcaggcgcccggagggggccacgccgacgtcgcagcccgagggggagcggaagaagaaacggctccgcaagatgggggggacagaaccatcccggggaaaccttatttcccctccaaggtggtcgtttaaccgtccccctcgcagcgagatctcgtcgcgtccctcctgccattccaagtccggccagtctgaggccgaggacccggcgaccacagaggctcggaggcgggaatctgaccggcgagaagccgcggatcgcctacgggaagccgaggaggccgcccaggtggccgtccgagctcgccaagctgaagaagccgctcgggaggaggccagacttcgccaggccgaggcggcgacgacttccgaggcagctcgcgacgaggccgcgggcgcatcgcttgggcccattccctcgggcgacgctcaggacaagccaggtctgggggacatccctgagtccggcacgttcatcggcgggccgagccgcgcggcatcctcaccgaggcggctcttccccacgccttccgttgctccactgagcgcagaaccccttctgcaggccttggccgtcgcaaacaccacggtgttggacgggttaagtgcccaggtggagaccctgcaagcagagcgggcggagcttgacgccgcatgggcgcgtgtcgaagaggggcgacgctcggtggaggccatggtggaggtgggccgcaaggcacaccgccggcacgtctcaaagctcgaagcccgtcggaaggtgctgggggagatcgccaaggaggtggaggaggagcggggggctgccctcatcgccaccaccgtgatgaacgaggcgcaggacaccctccgccttcaatacgggagctgggaggcggagctagggaaaaagctcgacaccgcccggggggtccttgacgctgccgctgcccaagaacggcgggcggcggagaccgaggcggcgtctcggcggcgcgaagaggccctcgaggctcgtgccatggcgctggaagagcgcgccggcgtcgtggagagggacctggcggaccgcgaggccgccgttgccatccgggaggtaacgctggcggcgcacgaggccgcctgcgccgaggaggagtgcgcactccgcctccgcgaggacgcgctcaccgatcgggagcgagctcttgaggaggccgaggccacggcgcaacggctggcggagagcgcgtccctccgtgaggctgtgctagaggaacaagcgcgccgcaatttggaaggtgcccgcgccgagaaggccgcactgaaccagcgggccgctgaactcgaggcgcaggcaaaggagctggacgcgagggcgcgcagcggcggggcggccacgggcgaaagcgacttagccgcccgcctcgcagctgccgaacacaccattgccgatctgcagggcgcgctagactcgtccgccggggaggtcgaggccctccgtttggcaggcgaggtagggcccggcatgcttcgggacgccgtctcccgtctagatcacgccggccggcaggcaggcctctggggcgggcggactgtgaagtacgccgccaaccaggggggcctcgctcagcgcctctcggagatggtcgggactctccaacggctccccgaggagctcgagaggacgattaagtcatcctcgagggacctcgcccgaggagcggtggagctcgtactggcgagttaccaagccagggatcccgacttctccccatggacggcgctggacgagttccctcccgggaccgaggatggcgcgcgcgcgcaggtccgggacgccgccgaccatatcgtccacagcttcgagggttcggcccctcggctcgcgttcgccctcaactccgacgaggagggcgatgacggcggtgtgggcgacagtggcgacgaggctggcgacccgggtggatcggagtga

SEQ ID NO: 82202 - DNA, 323 bp, Oryza sativa
  Clone ID: PAT_MRT4530_81655C.1
tttgggtttttttttttttttttttgtaaacactattttttttttttaaggacaatccaacatggggattctggccccttatatatcctaaaatatgagccgtaataaaaaagggtatgtttactttacaacaaatgcaaatttttaaaaaacacctcatattaaattggattttggaattttaaaagttgtatgccctaagtttcactttccccctccaatggggtttgggaaaagattttttgggggcttctccaaaggggttgtttttaaaagggaaagcctgggaacccccttttgtaaggggcccccccattttcgtc

SEQ ID NO: 82203 - DNA, 2945 bp, Oryza sativa
  Clone ID: PAT_MRT4530_81656C.1
atggcatggggctccgctccgcttgacggtagcgtgctgccgccttcccgcatcgtgagcgagagacaggccgggctgccgcgccgcttcatgccggaatctgccaccggccgggagatagtctcgctgggcgagggatgcccggcgccacgctacccggggcggtctgtcttcttcctcccttttgctatggcagggctggttccgccattttcttctttcttcatggatgttctggagttttacgatctccagatggcgcacctcacccccaacgcggtaatgacattggccatcttcgcgcacctgtgcgagatgttcatcggggtgcgcccatcccttcggctgttccggtggttcttcaccgtacagccggtgtcgccgccgtcggtggttggtggttgctacttccagccgcgggggccggtgctgaaccgctacattccctgcgtcctccgcaagaagtgggatgactggaagagcgactggttctacacccccctcgccgacgaagcgcgcctccgacttccgagccagcctccagcgcaggcctccaactggcgggcgccggtagatctgggagatggctacgacgccgtcctcgaccgcctagcgggcctgcgatcccaggggctcacaggggccatggtgttcggcgactatcttcgtcgccggatcgcgccactccagcggcgcgcctggggcgcctgggagtacaccgggtccgaggactgtatgaggacccaccagggggtcagatgggactgggctcctgaggacttcaagatagtggtccaacgggtgctgaatctcagttccgtggaggcatccctcattcctcaaggagtcctccccctctgcagcgatctagaccgcgcctccatcctgaccatcatgcaggcggtcggggcgtcggaggagcgggctcctcgaggccacgatgacgcgggcgggagccgcaggggggaacaatctaccccgggagggggtcgtgcttctgggccccgcgacgggggcccggggagcggccgccctgccgacgcccgggggaagaggaagcaggaaggagcccctcccccatctcctccccgagggggcggggtggcgcgtgccagcagcaggcgcccggagggggctacgccgacgtcgcagcccgagggggagcggaagaaaaaacggctccgcaagatgggggggacagaaccatcccggggaaacctcatttcccctccaaggtggtcgtttaaccgaccccctcgcagcgagatcccgtcgcgtccctcccgccattccaagtccggccagtctgaggccgaggacccggcgaccacagaggctcggaggcgggaatctgaccggcgagaagccgcggatcgcctacgggaagccgaggaggccgcccaggtggccgtccgagctcgccaagctgaagaagccgctcgggaggaggccagacttcgccaggccgaggcggcgacgacttccaaggcagctcgcgacgaggccgcgggcgcatcgcttgggcccactccctcgggcgacgctcaggacaagccaggtccgggggacatccctgagtccggcacgtccatcggcgggccgagccacgcggcatcctcaccgaggcggctcttccccacgccttccgttgcttcactgagcgcagaaccccttctgcaggccttggccgtcgcaaacaccacggtgttggacgggttaagtgcccaagtggaggccctgcaagcagagcgggcggagcttgacgccgcatgggcgcgtgtcgaagaggggcaacgctcggtggaggccatggtggaggtgggccgcaaggcacaccgccggcacgtctcagagctcgaagcccgtcggaaggtgctgggggagatcgccaaggaggtggaggaggagcggggggctgccctcatcgccaccaccgtgatgaacgaggcgcaggacaccctccgccttcaatacgggagctgggaggcggagctagggaaaaagctcgacgccgcccggggggtccttgacgctgccgctgcccgagaacggcgggcggcggagaccgaggtggcatcccggcggcgcgaagaagcccttgaggcccgtgccatggcgctggaagagcgtgcctgcgccgtggagagggacctggcggatcgcgaggccgctgttgctattcgggagtcacactggcggtgcacgaagccgcctatgccgaagaagagtccgcgctccgcctccgcgaggacgcgctcaccgagcgggagcgagctctcgaggaggccgaggccgcggctcaacggctggcggacagcctgtccctccgcaaggctgcgcaagaggaacaagcgcgtcgcaatctggaaagtgcctgcgccgagagggccgcactgaaccagcgggccgctgaactcgaggcgcaggcaagggagctggatgcaagggcgcacagcggcggggcggccgcgggcgaaagtgacttaaccgcccgcctcgcagctgctgaacacaccatcgccgatctgcagggcgcgctagactcgtccgccggggaggtcgaggccctccgcttggcaggcgaggggggcctcgcccagcgcctctcggagatggccgggactctccagcggctccccgaggagctcgaggggacgattaagtcatcctcgagggacctcgcccgaggagcggtggagctcgtactggcgagttaccaggtcagggaccccgacttctccccatggacggcgctggacgagttccctcccgggaccgaggacggcgcgcgcgagcaggtccgggatgccgccgaccatatcatccacagcttcgagggttcggcccctcggctcgcgttcgccctcaactccgacgaggagggcgatgacggtggtgtgggcgacagtggcgacgaggctggcgacccgggtgcatcggagtga

SEQ ID NO: 82204 - DNA, 564 bp, Oryza sativa
  Clone ID: PAT_MRT4530_81657C.1
agaatccttgcggcggcggcggcggaggagggcgtgggcgtggtcctggtcggcagcggcgatcccggccggattccggcggcggtgttcgagcgggacacgtcggagtcgaacaaggactggagcatgatgtccacggagtcggtgttcgcgctccaggtggcgccgtccagcgacttcaccggcttcttcctcgcgcacccggagctcatggacatcgccacgccgccgcgctccagctccagctccgccgccgccgccgccggcgaggccgtcggccacgcgcactccgcgcagttcgagagcatcccggagctcggcgaggccaccatgcggatccaaggccaatactccttcgccttccccaatttggtagaggtcaagaggcacagtgccaagaaccctcaggaggatcaaccgatgtcggcgacgatggcgacagcggcggcggcagagacgacggcgccggcgccggtgagggcagagacgagcagcaagccggaggaagctccagcgaaagcagcaacaaagggaggctggctcccgtgctttccttgctgctaa

SEQ ID NO: 82205 - DNA, 2778 bp, Oryza sativa
  Clone ID: PAT_MRT4530_81658C.1
atggcacggggctccgcaccactcgacggtagcgtgctgccgccttcccgcatcgtgagcgagaggcaggccgggctgccgcgccgattcatgccggaatctgccaccggccgggaggtggtcgcgcagggcgagggacgcccggcgccacactacccggggcggtccgtcttcttcctctctttcgcaatggcggggctggtctcgccattctctatttttttcatggatattctggagttttatgatctccagatggcgcaccttacccccaacgcgataatgacgttggccatcttcgcgcacctgtgcgagatgtttattgggcggcgcgcccggggcgcctgggagtacaccgggcccgaggactacatgaggacccaccaggggcgcaaatgggactgggaccctgaggacttcaggatggtggtccaacgggtgctgaatctcagctccgtggaggcatccctcatcccccaaggggtcctccccctctgctgcgatccagagcgcgccaacatcctgaccatcatgcaagaggtcggggcgtcgggggagcgggccccccgaggccacgatggcgcgggcgggagccgcaggggggaacaatctaccccgggagggggtcatgcatctgggccccgcgacgggggcccggggggcagccgccctgccgacgcccgggggaagaggaagcaggagggtacccctcccccatctcctccccgagggggcggggcggtgcgtgccagcagcaggcgcccggagggtgccgtgtcgacgccgcagcccgagggggagcgaaagaagaaacggctccgcaagatggggggaccgagccatgccgggggaacctcatctcgcccccgaggtggtcgtttagccgacctccccgcagcgagatcccgtcgccccccccccccccccccccgccattccaagtccggccggtctgaggccgaggagacagcaaccgcggaggcccggaggcgggaagctgaccggcgagaagccgcggaccgcctccgggaagccgaggaggctgcccaggaggccgtccgggttcgccaggctgaggaggccgctcgggaggaggccagactccgccgggccggggagtccgtccgggaggcagaggcggcgcgcgcccgccaggcggcctgccaagcccccaacccgactccgcccgaggtgacgatgacttccgaggccacccacgacgaggccgcgggcgcgccgctcgggcccgacccctcgggcgacgcttgggacgagccagcttcgggggatgcccccgagtccggcaggtcgattggcgggccgagccgcgtggcacccacaccgaggcggctctcccctctgccttccgctgccccactgagcacggagcccctcctgcaggccttggccgccgcaaacagcacggtgttagacgggttaagtgcccagatggaggccctgcaggcggagcgggcggagctcgacacggcgtgggcgcgcgtcgaggaggggccacgctcggtggaggccatggtggaggcgggccgcaaggcacaccgccggcacgcctcacagctcgaggcccgtcgtagggacctggcggagatcgccagggaggtggaggaggagcgggagactgccctcatcgccactgccgtgctcgacgaggcgcgggacgacctccgcctccaatacgggagccgggcggcggagctagaggagaagctcgacgccgcccggggagtccttgacgctgccgctgcccgggaacggcgggcggcggagaacgaggcggcgtcccggcagcgcgaagaggtccttgaggctcgcgctacggcgctggaggagcgcgcccgcgccctggacgcgaaggagagagacctggcggaccgcgaggccgccgtcgccacccgggaggcaacactggcggcgcaggaggccgcctgcgccgaagaggagtccgcactccgcctccgcgaggacacactcaccgagcgggggcgagctctcgaggaggccgaggccgcggcgcagcggctggcggacagcctgttcctccgcgaggcagcgcgggaggagcaggcgcgccgcaatctggaaggcgcccgcgccgagagggccgcactggatcagcgggccgcagagctcgaggcgcgggcgaaggagctggacgcgagagcgcacagcagcggggcggccgcgggcgacggcgacctagtcgcccgcctcgcagccgccgaacacaccatcgccgagctgcagggcgcgctggactcgtccgccggggaggtcgaggccctccgcttggcgagcgaggtagggcccggcatgcttcgggacgccgtctcccgtctagaccgcgccgggcggcaggcgggcctctggggcgggcggtacgcgaagtacgccgccaaccaggggggcctcgcccagcgcctctcagagatggccggggtcctcaagcggctccccgaggagctcgaggagacgatcaagtcatcctcgagggacctcgcccggggggcggtggagctcgtactggcaagctaccaggccagggaccctgacttctccccgtgggcagcgctggaagagttccctcccggaaccgaggacggcgcgcgcgcgcaggtccgggacgccgccgaccacatcgtccacagcttcgagggtacggcccctcggctcgcgttcgccctcgactccgacgaggagggcggtgtccacggtgcggacgacagcgacgacgaggccggcgacccgggcgcgtcggagtga

SEQ ID NO: 82206 - DNA, 4458 bp, Oryza sativa
  Clone ID: PAT_MRT4530_81659C.1
atggctacctcagctcccccggcgtcgactcacggccaacggagatcattgagtacgacgacttcggctaccgctacgactaccgcaatctcgacgacttcgacaaagactttgaagataactacacgcctctctacttcggcattttcatggccgacaacgagacggaagaatagcgaagccgaacgacgccgactagaagaggagtgccaagcacaagagcgagaacggctacagcatgagcaacaggagcgtgaacgggctgcaaaggaggctgaggaccagcaacagcgcgccttgtatgccgggcgacgagcacgagaacttatcgggcagcaagacatcgagggaacggcggtttttcgcacccctcatcagtacgcggttgcagcgatcaccctcctcgacaccctcctcaaggaagacgcactcaatcaagccaatcacgtcgtcaacatcttgaaccagaccaagaccatgatcgccgcctcggtcccggttaactctgcaagcgtccgcacgccgactggcagccgagttccccctcttcgatctcaagactatcaacaaccaagcctcagcatcgtcggcgcgggatccagtcgcaggagcaggggtcacgacgagcgatctattcactcacctcctgaacgacacagggagcgtcgagctgaacgaccccgctccccacatcgcaggcgccccatcgatcttcgcgaaactatcaaccaacgctgcgcggcaagtggctacgtcccccattcaccagatcgctatgatgatgacgtggatggagttgctgccttcacaagcgacctgcgtcaactggattggccagccggcttcaagccgactggaatcgagaagtatgacagcaccactaactcggagtcttggctcaccgtctacggtcttgcaattcgcgcagcgggaggagacagcaaagccatggcaaactatttgcttgtggccctagcggattatgcccgggtacctttgaacgccctggtacgcagtttgatctctacaacattattcagaagtctggagaatcccttcgagattacatcccacgcttttccgagcaacgcaataagatccgacatcaccgtcgacgtcatcatcgccgccttcaccaagggcattcgccacgatgacctagtcggcaagttcgggcgcaagcctcccaggacggtcaagcagatgttcgaaaaagccaatgagtatgccaaagccgaagatgccattaccgcgtccaagcagtcgggcaccacttggaagccgaagaaagatacgccgactacagtggggagtggaagtaccaatcacaaggattgcaagcgcaagcccaaggaacttgtggcaactactacaccatcctcccgacaacgttcgcgcgtcaacacttttgacaagatcatgaactcccaatgtccgcatcatcccaattccaatcacgcggccaaagattgcttcgtctacaaacagtttgcagaacaatacgccaagaacacacgcaagacctctgacggagatcaaagcacgtcaaagaagaaggatgatgaagatgatgccctgactggttttcaagaccatcgcaaggaactcaaccacatctttggcggacccctggcttatgaatccaagagaaagcaaaaactgaccgaacgggagatcaacgctgttcagcctgacacgccccaatatcttcggtggtcagagacaacaattaagtttgaccgctcggatcatcttgaccgagtggtccacccagggcggtaccccctgatcactcttccagttactttcggcactcgggagaacttccgcacaaagaacatttgtttcgaagtcactgatttcgagatagcatatcatgctatactcggacgtccgacgttagccaagttcatggcagtcccgcactatacctacatgatgatgatgatgcctggtcctcgaggagtcatatccctgcagagtgacatcaagcaagccgtcacatgtgacaaggaaagctgtgagatggcccacacccgcgagatcacgctcgcccgagaagaaatccgactggcagcgtccacaataagcgaaggagaagtgcctacaaccaagatgccaaagaacggagaaagcgacgccaagaccaagaagattcctctagatccctccgatcctactaagactgctgtaataggcgttgagttagattgtattcctagagaggtgattgagcactctttacatgttaaggaagatgcaaaaccgatcaagcaacgactccaccgtttcgcacaagataggaaggatgcgatcaaggaggaattgaccaagctgttagcagcaggatatcatcagatccgactaaaggaatccgactgcttgaagacttcattcatcatgcccttcggggcctactgctacatcaccatgccttttggattaaagaacgcaggagcaacttatcaacgcatgatccagagatgtttttcaacccaaattggccgcaacgttgaagcttatgtggatgacgtagtcgtcaagaccaagcagaaggatgaattgattacggatctagaacagaccttcgcgagcatccgtgctttcaggatgatattaaaccttgaaaagtgcatcttcggagtaccgtcagggaagcttcttggatttatggtgtcccatagaggcatacaagccaacccggagaaaatcaacgccatcctcaacatgaaaccaccgagctcccagaaagatgttcaaaaattaactggctgcatggcggcgctcagccggttcgtttcacgattcggcgagccggggatgccttttttcaagttgttgaagaaaaccgacaatttccagtggggacccgaagcacaaaaagcctttgaagacttcaaaaaacttctcactactccaccagtcttagcttcaccacattcgcaagagccgttgttgttatacgtgtcggcaacttcccagattgtaagcacggtcctagttgtcgagcgtgaagaagaaggccatgttcaaaaagtccaacgaccaatctacttcgttaccgaggttttggctgactccaagacaagataccctcaggctttcaggcaccggagcgggagttgttctaatttccccgactggagaaaggttgagctacgtattgtgatacatttttctgcgtcacataacgtggcggaatatgaggtgcttcttcacggactaaggattgcggtctccttgggaattcggcgtctgatagtccgtggagattctcagttggttgttaatcaagtcatgaaagagtggtcctgcctcgatgataacatgaccgcctatcggcaggaggtacgtaagttagaagatagattcgatggacttgagctaacccacgttctccggcataataatgaggcagctgacagactggctaattttggttcaaagcgagaagcagctccttctgacgtgtttgttgagcatttttatgagccaaccgtaccaaggaaagagataatcgaggccacggacactcaagacgtaaccatgattgaagccgactggagagagcccctcataagatttttgaccaaacaagaactccctcaagataaagatgaagccgagcggatctccaggcgcagcagactttatgtcatacatgagaccgagctgtacaagaaaagtccattaggaatcctgcaacgctgtgtgtctttggaggagggaagacaattgctaaaggatatacattcaggcatctgtggtaatcacgcggccgcacgaaccatcgttggcaaggcttatcggcagggttttttctggcccacggctgtgtccgacgccgacaagattgtgcgaacatgtgagggttgtcaacttttcgcccgacaaactcatctaccggctcaggagttgcaaaccatcccgttgtcttggccgttcgcggtttgggggctcgacatggttagcccgtttaaaaaggctgtcggtggttatactcatctctttgtagctgttgacaagttctccaagtggatcgaagccaaaccggttatcacaatcacggcagacaaggctagagatttcttcatcaatatcgtgcatcggtttggagtacccaatagaatcattactgataacggcactcaatttacgggcggagtatttaaagatttctgtgaggacttcggcataaaaatttgttatgcctccgtagcgcaccccatgagcaatggacaagtcaaacgtgccaatggtatggtacttcaaggaataaaagcgtgagttttcgaccgactgcatccctatgccggcaagtgggtagaacagctgccgtccgtactctggtccctgtgcaccactcccagtcgggctacgggccagtcgccgtttttccgactcaagcgtgaagacggtactcctatcgacaactcttggaatattgaacatcttcat

SEQ ID NO: 82207 - DNA, 665 bp, Oryza sativa
  Clone ID: PAT_MRT4530_8165C.1
acttatatatgcttctcccaaggaaaagattcacttatttacatggacggatggctctgaatgtgtttgtatctatgagctttcagctttcttgtatactgacagggtatccattctactataacacagcactgtacaagtcgaatcaacttcctataccagtcaacaccaaagagatctatctatctatctatctatatctatctatctagaggcagcagcaagtatatctacttgtaagttgtaaccaaatcaccacatgagctaccctgtcatctcctaaagaaaatcttgtcctggacaatgactaccagctatctgctttcttgcttgccgttctgtacttgcctttagatgttgactgtaagaaattagtcgaataattgagtacacataactatcttttttgtttactcagtttcagaccagattattttccatggtccacctttgctccctaaccttcacagaccagcaattgctcgcaaactcataaatagagcaaggccagcccagattccaccaagaccaaacttaggagcggccacaagcagtactgcggatgagacagctccagcaaataatgtagaatacgccgcgaaagcaaagtcagaaacaccccaataggagcccatcggccacaaaagcaacagcattaatcggtt

SEQ ID NO: 82208 - DNA, 993 bp, Oryza sativa
  Clone ID: PAT_MRT4530_81660C.1
atggccaactcccgccgccccgccgccgcggccaccgctccgtcgccgtcgccgccggcgtcggacctggaggtagggttcgccaagcttcagggggaggacttcgagtactacatgcagacctactccatcgtcctcggccgccacagccgcaggaggaaccagcccgtcggcgtcggagtcggcgttggcgtcggcggcggaggcggaggcggaggcgacgccgccgcggacgacgtggacgtcgacctcgggatcctcggcggcgggatgaacgtgtcgcgccgccacgcgcgcatcttctacgacttcccgcgccgccgcttcgcgctcgaggtgctcggcaagaacgggtgcctcgtcgagggcgtcctccacgagcccggcggcgagcccgtcaagctcgactcccaggacctccttcagatgggggacgcccagttctacttcctcctccccacccgctccgtcttcgccaccgacgccgcgcgccgcgcctccgccgccgcccggcgcgctgtcccgccgcctccctcctcctcctccgacggcgatgatggggaggaagaacgcgaagcggcggtggctaagcggccgaggaacggagacgccgggtctctcgctggaaggaagtctgagaagggatcaaaaggttacagacaatcagataacctacaactcttgcagttggaagagaaagatgttatctcatcaacagctactgtcttatctgatctctgtggacctcaggaatgggtgcctatggacaggcttcatgaagtgatgtttgagaaatatggcgacttgtggcaccacaacagggtgcggaaatatttgacatcagaagactggcccaagagcgaaactgatggtagaccgtggcacgggctctctctgctgctaaggaagtaccctgagcattttgtgataaacataagaatgtcaggggggcggagcattgagtttgtctctctggtttcgctgcaaccctga

SEQ ID NO: 82209 - DNA, 1333 bp, Oryza sativa
  Clone ID: PAT_MRT4530_81661C.1
tactctctcctctctgctccctgctccctgctccctgctctctctagagagagaatagagagagagagagaagccatcagccatggcgtgctgcttcgcctgcctgggcgctggcggcgggaagatgaagaagaagaagaagtcgccgcctcagatcccaccggcctcagaaagagataacccaccaaacctggcctcatcgacagtgatgaagcaggatcaggattcgtttcaattagctgctaacgaggacatccttgtgagcaatggatcatccgagaaccgccgcattgcagctcggaccttcacctttagggagctcgctgcggccacaagcaacttcagggtcgattgcctgctcggtgagggcggttttggaagagtgtacaaaggctatttggagactgtcgaccaggctagtaacttatactccgcttcttgctaccatactgcaaatttctgtttaatcaaactagaatctctgcaactgactgttgtcgcaataaagcagctcgatcgcaacggactgcaaggcaacagggagtttcttgttgaagttcttatgctcagcatgctgcaccacccaaatcttgttaaccttattggatattgtgccgatggtgatcagaggcttttagtttatgagtatatgccattaggttctttggaagaccatcttcacgatcctccaccaggcaagtcacggcttgattggaatacaaggatgaagatagctgctggtgcagcgaagggtttggaatatttgcatgacaaagccaatcctccagtcatataccgagatttgaagtgttcaaatatcttgcttggggagggatatcacccaaaattgtctgactttggattggcaaagctcggcccaattggcgataaatcccatgtttccactagagtgatgggtacatatggatactgtgctcctgagtatgctatgactggccagctgactctcaagtcagatgtttatagttttggtgttgttctgttggagatcattacaggacgaagagctatcgacaacacccgagcagcaggggagcaaaatcttgttgcatgggcccggcccttgttcaaggacaggaggaagttcccccagatggcagatccagcgcttcatggtcagtatccatcgagaggattgtaccaggccttggctgttgctgcgatgtgtgtccaagagcaaccgaccatgagacccctgatcggggatgttgttacagctctcgcttaccttgcctcccagacttatgatccagaggcacatggcgtccatcacacgtcacgtttgatgtctcccggcacacaaggtgtatga

SEQ ID NO: 82210 - DNA, 3054 bp, Oryza sativa
  Clone ID: PAT_MRT4530_81662C.1
atggcacggggctccgcaccgctcgacggtagcgtgctgccgccttctcgcatcgtgagcgagaggcaagccgggctgccgcgccgattcatgccggaatctgccaccggccgggaggtggttgcgctgggtgagggacgcccggcgccacactacccggggcggtccgtattcttccttcccttcgcaatggcagggctggtcccgtcattctcttctttcttcatggatgttctggagctttatgatctccagatggcgcacctcacccccaacgcagtaatgacgttggccatcttcgcgcacctgtgcgagatgttcatcggggtgcgcccatctctccggttgttccggtggttcttcaccgtacagccggtgtcgccaccgtcggtagtcggtggctgctacttccagccgcgggggccggtgctgaaccgctacattccctgcgtccttcgcaagaagtgggatgactggaagagtgactggttctacacccctctcgccgacgaagcgcgcctccgacttccgagccagcccccggcgcaggcctccagctggcgggcgccggtagatctgggagacggctacgacgccgttcttgaccgcctggctggtttgcggtcccaggggctcacgggggccatggtgttcggcgactaccttcgtcgccggatcgcgccgctccagcggcacgcccggggcgcctgggagtacaccgggcccgaggacatcatgaggacccaccaggggcgcaaatgggactgggaccctgaggacttcagaatagtggtccaacgggtgctgaatctcagctccgtggaggcatccttcatctctcaaggggtccttcccctctcctgcgatccagagcgcgccaacatcctgaccatcatgcaggaggtcggggcgtcgggggagcgggccccccgaggccacgatggcgcgggcgggagccgcaggggggaacaatctaccccgggagggggtcgtgcttctgggccccgtgacgggggcccggggggcagccgccctaccgacgcccgggggaagaggaaacaggaggataccccctccccatctcctccccgagggggcggggcggtgcgtgccagcagcaggcgcccggagggtgctgtgccgacgtcgcggcccgaggggaagcgaaaaaagaagcggctccacaagatgggggggaccgaaccataccggggaaacctcatctcccccccaaggtggtcgtttagccgacctcctcgcagcgagatcccgtcgcgcccttcccgccattccaagtccggccggtctgaggccgaggagacggcgaccgcggaggcccggaggcggggagctgaccggcgagaaaccgcaaaccgcctccgggaagccgaggaagctgcccaggaggctgtccgggcttgccaggctgaggaagccgcttgggaggaggcccgactccaccgggccgaggagtccgtccgggagacggaggcggcgcgcgcacgccgggcggcctgccaagcctccgacccgactccgcccgaggcgacgacgacttccgaggccacccacgacgaggccgcgggcgcaccgctcgggcccgacctctcgggcgacgctcaggacgggccagcttcgggggacgtccctgagtccggcacgtcgatcggtgggacgagccgtgcggcatccttaccgaggcggctctcccccatgccttccgctgccccactgagcgcggagccccttctgcaggccttggccaccgcgaacaccacggtgttggacgggttaagtgcccagatggaggtcctgcaggcagagcgggcggagctcgacgcggcgtgggcgcgtgtcgaagaggggcgacgctcggtggaggccatggtggaggcgggccgcaaggcacaccgccggcacgcctcagagctcgaggcccgtcgtagggacctggcggagatcgccagggaggtggaggaggagcgggagactgccctcattgccaccgccgtttttaacgcggcgcgggacgacctctgcctccaatacgggagccgggaggcggagctagagaagaagctcaacgcgtcccggcagcgtgaagaggcccttgaggctcgcgccacggtgctggaggagcgcgcccgcgccctggacacgaaggaaagggaactggcgggtcgcgaggccgccgtcgccatccgggaggcaacgctggcggcgcacgaggccgcctgcgccgaagaggagtccgcactccgcctccgcgaggacgcgctcaccgagcgggagcgagctctcgaggaggccgaggccgcggcgcagcggctggcggacagcctgtccctccgcggggcagcgcgggaggagcaggcgcgccgtaatctggaaggcgcccgtgccgagagggccgcactggatcagcgggccgctgagctcgaggcgcgggcgaaggagctggacgcgagggcgcgcagcggcggggcagccgcgggcgacggcgatctagccgcccgcctcgcagctgccgaacacaccatcgccgagctgcagggcgcgctggactcgtccgccggggaggtcgaggccctccgcttggcaggcgaggtagggcccggcatgtttcgggacgccgtctcccgtctagaccgcgccgggcggcaggcgggcctctggggcgggcggatcgcgaaatatgccgccaaccaggggggcctcgcccagcgcctctcagagatggccgggaccctccagcggctccccgaggagctcgaggagacgatcaagtcatcctcgagggacctcgcccggggggcggtggagctcgtactggcaagctaccaggccagggacccggacttctccccgtgggcagcgctggacgagtttcctcccgggaccgaggacgacgcgcgcgtgcaggtccgggacgccgctgaccacatcgtccacagcttcgagggtacggccccccggctcgcgttcgccctcgactccgatgaagagggcggtgacggcggtgacgaggccggcgacccgggcgtgtcggaatga

SEQ ID NO: 82211 - DNA, 218 bp, Oryza sativa
  unsure (1)..(218): unsure at all n locations
  Clone ID: PAT_MRT4530_81663C.1
tggtcncaaagaaanttttgcncattgagaaagttgntaatttggggggtgggttnaaaagnttttntcataggtagctntnncctgaaaaaatngtnagncagntncntgnttggttntnctnccggggggngcncctntaantngctcaaaaaaaanaaaaaaaaaaaaaaaaaaaaaaanaaaaaaaaaaaaaaaaaaaaaaaaaaaaaaaaaaa

SEQ ID NO: 82212 - DNA, 481 bp, Oryza sativa
  Clone ID: PAT_MRT4530_81664C.1
ttactaaatgcaagttaagttagtgcactgaaggagagcctgagatacgtcgtcgtacacacttgattaattaatggcgtggaggaacagcgggcgggtgaaggtgctgaacaggaggagcagcaggatggcagtcatggcagccgccgtgctggccgtgtgcagctttgcggcggtgaccatggcccagctggagatggacttctacagcaagacgtgcccgaacgtcgaggagatcgtccggcgggagatggaggagatcctccgggtggcgccgacgctcgccggcccgctcctccgcctccatttccacgactgcttcgtcagggggtgcgacgcgtcggtgctgatcgactcgacggccggcaacgtggcggagaaggacgccaagcccaacctcactctccgcggcttcggggcggtgcagcgggtcaaggacaagctcaacgccgcctgcccggccaccgtctcctgcgccgac

SEQ ID NO: 82213 - DNA, 1501 bp, Oryza sativa
  Clone ID: PAT_MRT4530_81665C.1
atggcacggggctccgcaccgcttgatggtagcgtgctgccgccttcccgcatcgtgagcgagaggcaggccgggctgccgcgccgattcatgccggaatctgccaccggccgggaggtggtcgagctgggcgagggatgcctggcgccacactacccggggcggtccgtcttcttcctctctttcgcaatggccgggctggtcccgccattctctaatttcttcatggatgttctggagttttatgatctccagatggcgcacctcacccccaacgcaataatgacgctggccatcttcgcgcacctgtgcgagatgttcatcggggtgcgcccatctctccggctgttccggtggttcttcactgtacagccggtgtcgccgccgacggtggtcggtggctgctacttccagccgcgggggcaggtgctgcaccgctacattccctgcgtcctccgcaagaagtgggacgactggaagagcaattggttctacacccccctcgccgacgaagcgcgcctccgacttccgagccagcccccggcgcaggcctccagctggcgggcgacgcggcgcgcccggggtgcctgggagtacaccgggcccgaggacttcatgaggacccaccaggggcgcaaatgggactgggtccctgaggacttcaggatggtggtccaacgggtgctgaatctcagctccgtggaggcatcccttatcccccaaggtgtcctccccctctgcagcgatccggatcgcgccaacatcctgaccatcatgcaggcagtcggggcgtcgggggagcgggtcccccgaagccacgatggcgccggcgggaaccgtagagggaaacaatctaccccgggagggggtcacgcttctgggccccgcgacgggggcccggggggcagccgcctgccgacgcccggggaaagaggaagcaagagggcacgccccccccatctcctccccaaggggcggggcggtgcgtgccaacagcaagcgcccggagggtgctgtgccgacatcgcagcccgagggggagcgagagaagaaacggctccgcaagatggggggaccgagccatgccgggggaacctcatctcgcccccgaggtggtcgtttagccgacctcctcgcaggttcgtccccgagcacaccgcggccgtattcattctcccatctcccaaggcgagtttccactcacccgcttctttttgtcttctggtttttcttctgcctcagcgagatcccgtcgcgccccccccccccccccccggcattccaagtccggccggtctgaggccgaggagaccgcgaccgcggaggcccggaggcgggaagctgaccgacgagaagccgcggaccgccttcgggaagccgaggaagctgcccaggaggccgtccgggttcgccaggctgaggaagcccgctcgggaggaggccagactccgccgggccgaggagttcgtccgggaggcggaggcggcgcacgcacgccagg

SEQ ID NO: 82214 - DNA, 339 bp, Oryza sativa
  Clone ID: PAT_MRT4530_81666C.1
atggcgagagtctcggcggggaagacgaaacgacgctctgacttcggcgtttatttctctaggatcaagaatcccgaaggaaccgacgcgaggtggaccacggaggaagatcctcttcttcttccccaactccggccgccgacgccattcctttatttctccttctctgtagaagcccgggggtacaccgtcgacgacgaccgtagcagccgcgccgtcgccgaaccagtacaccatcgccaagacttcgtcgagccgcgtttgcttcttgctgagatcactcctgaggaggatgatttcaatggggatgtctctttcttccaggatggttcttactag

SEQ ID NO: 82215 - DNA, 765 bp, Oryza sativa
  Clone ID: PAT_MRT4530_81667C.1
acccaatgtcagaagcagttcttttgtgggagagagacaagtctctgaaccaaacacgatacaacctttccccttttgcaatttcactaaatgaattgacagctaacctggcgaagaagttgcctcctactgattctcgtctgaggcctgatcaaaggcatcttgaaaatggtgaatatgagatggctaatgcagagaaacttaggcttgaacaactgcagcgacaggcccgaaggttacccagagaaaggatggcaacccaggtggtttagcaaggatgacgacgacagctaccgctacattggcggttactgggaagcaagggagaaggggaactgggatgggattccagacatcttcggtcagcgcagcgcttcacctgggtggtcatagcttacctaccccctctccctgtgtagtgtaatcccacatttctttacagaaaaaaagtatgttaccttctatatatacatatattgaagcaatgtccatatgtgtgccgatgtactggattcagagagccgagatgtactggtaaaaacacggcaagattacgttagtaggaattcggaccccaagtaggttagattaatccaaagtttgagtataattttattgtcggccagaagatgtcctggttttgaggctactcttgtacatttaaattttctcaactcacgagtacttgagagctgtttcctgctagaacctcaagtacaaggcaatatattagttgtttcctactctatccagcgcaattcaggc

SEQ ID NO: 82216 - DNA, 402 bp, Oryza sativa
  Clone ID: PAT_MRT4530_81668C.1
atggacttctcgccgcttctcagtctggtgccccgcaatgaatcatgctatacaaaagaatacgacctacatgtctcccacatcttcggtggatccacatcatacacctcaaagagagagtacaagaaagcggaacacgaagtctgctccacctcacagacgactactaccaagatgaagtggtctcaacacaagatcaagttatcggaagcggatcaccccaaaattgcgactacacctggcagatatccgatcgtggttgaagccactattcggaacataaaggtggcaagagttctcatcaacggcgggagctcgatcaacctgttcttcgccagcaccttagacgcgattgtaatacctcaaagcgagctgacgcccatagatcagcccttccattga

SEQ ID NO: 82217 - DNA, 2494 bp, Oryza sativa
  Clone ID: PAT_MRT4530_81669C.1
caacacttgggcagggcgaagaaaggttgtcctcgttctcccatccttgcgacgaatcggcttaacgaagccatgcatcttgtcaccgctggacctccttaagccttgtgggcgacttcatgttttcgatcgccttgatcttctcaggatttgcctcgattcctcgtcctgaaaccaagaaaccaaggtgcttccctaacggtcctccgaacgtacacttgtccgggttgagcttcatttgatatgttcggaggttgtcgaatgtttccctgaggtcatcgatcaatgagtcgctcttcttgatcttaacgacgatgtcgtccacctatgcctcgacgttttgtccgagctgagtaccgagtgctccatggatcccgcgctgatatgtgttgcgtgcgcttattaatccaaaaggcatcttggtataacagaatacacctaaagacgtgataaacactgtcttctcctcaccctcttttgccatgctgatttggtggtagctggagtaagcgtcaaggaagcttaacaactcacaaccagccgttgaattcaccaactggtctattcgaggaagagggaactggtctttgaggcacgccttgttgagatcggtgaagtcgacgcacatcctccacttcccgttggctttgcgtaccattactgggtttgcgagccactctggatagaggacttctcttatgaagccagctttgagaagttttcagaagtttttggcgtgtccgaaggtgacgggtagcgtgttttttcccaacggtttagacgacgactccggggtgattcaatggaagggctgatctatgggcgtcagctcgctttgaggtattacaatcgcgtctaaggtgctggcgaagaacaggttgatcgagctcccgccgttgatgagaactcttgccacctttatgttccgaatagtggcttcaaccacgatcggatatctgccaggtgtagtcgcaattttggggtgatccgcttccgataacttgatcttgtgttgagaccacttcatcttggtagtagtcgtctgtgaggtggagcagacttcgtgttccgctttcttgtactctctctttgaggtgtatgatgtggatccaccgaagatgtgggagacatgtaggtcgtattctggaaaggcggaatcagaagccagcgtgggcaacggctttaccttttgtatagcatgattcattgcggggcaccagactgagaagcggcgagaagtccatgggggtcgctggggagtccatgcctcttgttatatttatagagggggtgattatgatccaggaatggtgcactgtggtgagttatgttgtgcatggggtattgtcacagcctctattcgggtactttccagtatcgcgacgcatggtagacatgatgttgaggctgtgtcttgtgggtatagtggtacacctaataattattgatgctataattggtaataatttgcttagctcctggtttggagatagatctgtacagccgggtatggttgttcagaatggttgggcctgagcagcatgggcgcccagttgagttccctgtgggagtggagctgaagccatcgctaaaccgttattccgctgctgttgtttttcttttcttttgtaagtatgtaacgttattattatgatggatttgtatattaaattgtcagtttgtgtacctcggctgattcctggacgaggattttatgcacaaattacttcggaaattattagtgaatttccgggcgtgacataacagtcctccatggcgtgattgcttgtcttgtggattgggcaccatgccttgcgcgagtcgtcgctctgggggttggagcgcctggaaggtgccagatgatctcgaatagcttcgagcagatgtgattcggcgcgttgccagctcctggctggtgtaccgatctcggacgcctgatttgaatgctcgtatgatagaagtatcgatgatctcggggatcgtatttctacactcgttaaagagccgaatatactcccgcaatgactcgcccgggttctgagttagagcgtgtaggtcatcttccatcgtgtggcgcttgtatgtcccttggaagtgggggacaaactgctgccataagtcttcccacgaagaaatcgggttcagcgggagatggacaaaccatgaacgagcagagcctttcaacacggctggcagataattagccagggcgttgacgtctgcactggcagcatagagaactgtggagtagacttgcagaaattcttctgggtacttccatcatatttctcaatcgatcccggtcggaacttctcgggccatcgcacattgcgaagtgtgggtgtgaatgccctacgtccgtcgtcctcacgacgacgacggtcattctcgtttcgatccctcctattccgccggcgccggtttagatgttcacgaagatctaaaccttcacggcgcggcggtgtaggatctcgtcttcatcgaggtgaatggt

SEQ ID NO: 82218 - DNA, 918 bp, Oryza sativa
  Clone ID: PAT_MRT4530_8166C.1
atggcccctagggcaaaagggcgagggcttctacgaggggaattaacaatgatggagcttatcaacttcagtgatgaagacttacacaagtttactaaaggtttctcagagaagaggttgcttggaaaaccaggagcctttgggcaggtttacaagggcaggaataaagggaataactatgcaaattgccctcgaaaagttgctatcaaaatttctaaaaggaaggatgagtatgtccggattatgtggaagatcaatgccctaagttcaatttcacatgcaaatgtcataaatcttgtgggttttgctgacacagaggagtactatgctctagtttatgaaagggctaaacaggacctcgaaggattcagagcatccaataaaggtgagttggatgctatcttgcttggagtggcatctggactggaagctattcattctgcaggctttgtccattgggacattcagttgaggaatattcttttgatgaaggataatacagttaaaattgctgattttggattggccacaaggaagggagagaagatgagtttcttcaaggatagaagatttggcatctttaatgcaaatgataaagagagtgcccaggaaaaaattggtgtcttctgttttggaaatctcatcagagaactggttttactagaaaggaaagagtggagccccacgaaatgtcccaggatacttttggcagatacatgtattgttaacaatccagatgatcgtccctcaatggctactttggtttcaaaattgaaggttccgtgttcagctatggtcaattggttactcaagctcgaaaagtgtgcgtgtatatataacaacatagaactagaaaacgtggacaccattgaagagtatgatgttgtcctatacgctcaacatactactagagtataa

SEQ ID NO: 82219 - DNA, 405 bp, Oryza sativa
  Clone ID: PAT_MRT4530_81670C.1
atggacaagtcagaaactgtcaagcagatgagcttaaagccattggagtattctttcttcttgcccctgtctgttcaagcatatgaggagtttcttgctttggagaatgagatgattcaacttcacttacaaatgtccaatggtgacagacggagttacatttggaactcagagaggccacttgtttggctttggaagatatgctgtgtgatgaagaccaagccagagatgttgacagcatctaggaattacgtggaacatagatatcggcttcttccaaatgatagtgttggcttggttacatttttcacaaaaatgcttcttggaatttttcttcatctcatgctggcatatatggaaacaaaggaatggactaatcttccagaatgtgcatctaagctttga

SEQ ID NO: 82220 - DNA, 326 bp, Oryza sativa
  Clone ID: PAT_MRT4530_81671C.1
cccactcgtacgatcccgtcccagcggctgcggctaccgctgttactgcgggggcggaggcggcttcctctacggcggtgacctctgctactgcttgggtgtcatgttgttacagattaaacgagtcgtgatacacaagtaatgattatgctaagaccacatgtgttcgtgctcattcctttcagtgatgataatttatgtgatgcttctggctctcgccatgtgatcaagaaggatgtcctttgcgagactgatcattctgtaccatgtgtacactttgatcatccatactgatgctatatacactatacttattgacattgaat

SEQ ID NO: 82221 - DNA, 1995 bp, Oryza sativa
  Clone ID: PAT_MRT4530_81672C.1
atggtcacatcagcgttgttgggcgtctacatcttcacagccggcctgccttcatcgccgctgactggtgtctccacctatacgctggcctattatgccgccgttgttacgcgtctacgacttcaccgctggcctgcctccatcgccgccgactggtgtcctcgcctttacgattggttggtcacaccaccgttcatgggcgtccacgtcttcaccgaccgactggccttcgacgccgccgactggaatggatcagttataacatcaccaccggcttgccttcgtctgccgccgactggtgtcatcgcctacacgattggttggtcacaccaccgttgttgggcgtctatgacttcaccgtcggcttgccttcgccaccgccgactggtgtgtcttcgccaatacggttggttggtcacaccaccgttaatgggcatcgtcatcatcaccgccggcctgacttcgccgccgccgactgatgtgtccgcctatacggttggttggtcacaccaccgttgttaggcgtctacatcttcaccaaacggctgccttcgccgccgcctgcacggctggcctattacgccgccattgatgggcgtctacgtcttcaccatcggcttgcctatgccaccgccgacaggtgtcctcgcctacacggttggttggtcgtaccaccgttgttgggcgtcatcgtcttcaccaaccagtcgcctcgtctatcatcaattggtgtcctcacctacacagttggatgtgtctttaccttcatgattggtttattatgccgtggatgctggcaactacgtcttcactaccggcttgcctctatcgccgccaactggtgctatcgtcttcacggttggcccatgccgccgccactgttaacaagcgtcatcattttcaactgccctcgcctctatggctgctggttggtcataccgtcgttgataggcatcatcgtcttcgtctttggcttgcctttgccgcaccgtccatggtgtctttgctttcacgactggcctattatgctgccgctcaaggacgtcttccttttcatcatcattcaacttcttccatcgccgtctggttatgccatcgccaactggtgttttttttatcttcagtactacgcgtcttcgctactggtttgcttctgttgctgtcgactcgtgttcacgtcttcacaactatgaaactttgtcaccatggtggagcaacttcatcttcattgtcttctgcaccggcaaacccaattgctgctacttcgcaagttttgctacttcaccaaccacgacatctcggcatgcacttccaagattcgacgctgtgttattttactacaacaagtggtttttcaatattcaatatttctactcggacattgggcgttgcatcagtcttcgttatgcacatgcttgcatcaaggaaactactcgagcttcgatatattctcaacagtttgatggattattgtcactgacatcatcagcagcacctctacttcatcggcccccgacgtctccgccgttactaaggggtgactatgtcttcgccatcgtttgcttctgtcattgtcgacttgttatttcgccttcacggttgacctactacgcaaacgttgtcgtcattatcattggctgctacactactattgactggatcaccgacatcgtcatcttcatcaacatcctatcaagcctcttcaacatagcctactctactactactgatgggcaacttcgccatcatagtcaatcatctctgttgctgctaatagtcattaccttcggctgcttgtctcatttgtcaccgattgattatttcgccgccatggctacacaactctgtcgttgttgctgggtgctttcgtcttcactgttggctggcttgtctgctgccgactggtttcttcgccgtcatggctatgtgacttcatcacctttgattggtgtcattgtctttaccaccaccaaaatcttcgtcagctttgatggg

SEQ ID NO: 82222 - DNA, 1755 bp, Oryza sativa
  Clone ID: PAT_MRT4530_81673C.1
atggaagttgtctttcaacttgacgtggcacaggagtcaagagttttaaccaatgatgagcggcagctatactcaaacctcaaagcacgtattttgggcctctcggttctgaataagttaaagatcaggcaacgttctaggttaacatggattaaggagggtgatgtaaattccaagttcttccatataaaagcaacctcaaggaggagaaagaacttcatccaatcactgaaaactccatcaggcttagcagtttcagccaaggataaagaagatgagttgtttagattctatagtgagaaattggggacaaattttcaaaggacgaagaatctgaattggaccaatttgcaactgccttcttttaatctgtccgagctagaggaagacatctcggaagaggaacttagaggaacgatttttggcatgcctcccgaaaaggctccaggtccggatggtttcattggagcttttttcaaagttgcctgggaaataatcaaaggtgaccttctagcagcggtgacttccttcatgaacctaagcacttcacatcttgaggagctaaattcggcctacatctttctgctgccaaagaaagatgacgcttcaggtgctgatcattttcgtcctattagcctcgtacacagttttaccaagataatcaccaaagtgttagcaaatcgtcttgcactgagactaaacgagatgatctctcaaaatcaaaatgcttttgtgcgaaaaagagcaattcatgataatttcatttttgttcaaaacttggttcagcgcttacacaggacaagaaaacagagtttgttcattaaagttgatattgccaaagctttcgatatggtgtgctggccttacctccttgatgttcttcgacagttcggctttggcaaccgttggctcaattggatctgcaacctttttgccacctcttcgtcccaggtccttctcaatggtgcaccgggacaaccaattcctcatgcgaggggtcttcgtcagggcgatcctctgtcaccaatgctctttattctcgccatggaacccttccactggattcttaaagcggccgaaggtgcttccatcctttctccgttagagagtaaccgcaacaggttccgttgctctttatatgctgatgatgtagctgttttcacaagaccagatgcgacagagctcaccaccctttcaaagcttctaaatttcttcgcgcaagttttaggcctccacacaaatgttgccaaaactgaaatttttcctattagatgtgaaggaattgatctagctcctttgttgcaaatcttcccaggcacaattaagtcctttccctgtcgttatcttggattgccactccactaccgaaaattgaggaaaattgattttctccccttaattgagaaaattggttcacgactccctacttggaaaggaaggtttttctcctcttcgggtcgcgaaaccctggtaaaaacggttcttagctcaatgccaatccaccatctttcggccctccaaatgccaaagtgggttttcaagagaattgataggtttcgaagatctttcctctggaagggcgaggacccagaccattcaaacccaggcagctgtttggtaaactggcagacagtgtgcagaccaaaatctttggggggattgggactccttgatttggaaaaattttctagagctctccgtctcaatggctgtggcttaaatggaaagacgaggacaaaccctgggctggtatga

SEQ ID NO: 82223 - DNA, 2985 bp, Oryza sativa
  Clone ID: PAT_MRT4530_81674C.1
atggcgcataaatacttctggtatattatggttacagagttcatccgcaagcgcacggatataccattttttggaggcaatgtgtctccggggtggaaagctatcgaacatgggttgtctctactgaaggaagggatcatatcgagggtgggtaatggcaggttggtgcgcatctgctgggctctgaagctgaagaacatgtcaaagtgctctggttcctcgagtgagatttcttgtaaggcgtgggatctcatttggaagaatgctgctcctcagaaggtaaaaatttttgcgcggaaggtagcagtcaattgtttggcaacgaaggagaacaagttcaaaagaacccttgagtcggatgccctttgttcgatctgtggaactgcaaatgaggatactgcacatgccctctgccagtgcccccaagcaagatccttgtggctttccatgtatgatgcaggaacaattttgtccgtaccggctgtggggaggatgaacccaaattggttattcgatcagctggccatgctctctgaggacgaacggatgagctacatcagttcactgttcaatatccgacaacaatctcctgctggttcagtgaaaggaaaagctgtaatcccttctactccaaggagatgccgtggacctgatggatccagttcagccagtaaaatgagatgggagaggccacaggaaggatggatgaaggcaaatgttgatggttcctttgacagccagcagcttaagggtggaattggtgtcgttataagggactgggagggggcgctgatacagtcaaaagaaagagcaatgtctgagcaggcttatcttgttagggagatcagggatctcttggatggaagcagagaatttgttctcaggaaaattcggcgcgagcagaatatggtcatccattttcttgctaataagggtcgctccgccactagccgggttgccaccatcgctccggagccgccgttgccgccacacgacgctgctgtcaaggaggaggaagtcaacgtcgagggagaggaggtagccatactgggagggtgggaggatagggaggagagaattggagacggctcgttttccggcgatcttggaacagcaatgggtctcggcaagtcgtcttccaccggcgcgacattgaagaaccttcaggaggacggcgcccttcccggccatggagacatggagagagaaaacaggtggttctatcttgagatcaaggactcgaaccctgtcttcgttgttcccgaggatcaaccggacaagattccggcctggaccgccaagccccctttgaccccctctcttcagtcgtttatcgacatcatcgatgatctccgagaacggggcttgtcgggatatgaagtcgctgcagacttcgtcggtctgagcagcgaagctgtagagcggcgcgtcgatcaagtgatgatcagcggtccgactacggctagcgacatccccgtgcccctttgtgaaaagggggcggcggaacgcgatgaagccatcaacgcccttcctttgactaacatcatcgggccgctcgcggaccatcaggtggcgacatctctaaaggagaaggttgtcaaggaggcatctgatgcggccaccactagcgctggcaaagtcccaaccaaggcgaggaaattctcgtctcgcattgtgacgatcggcgagaaggaggcgcgggcgaaggcggcacgggccaagtccgagagagcttccagcgcgtcacctgccacggcctcaacagatgttgtgcccgtgaccgggagccgggaggcgacgcctagcggccccgtcagcgatcccgctgtgggtcgtgatctgccagcggccgttctcacctgggaggaactccaagtcgagatggggcgccttctcgaagctggtgctcatggcatcggccgcgagatctcggaggcgaggtcagaagcggcgacggcgaacgcgcgtgctgagagattggtgcgcgagctagctgaagcccgtgaggacctcacgaagatgagggagttggtggccggcaacaagcgtcaacggaaggggctcgaggaccgaatgtcggaactcggggacaatctctccgagatccgtggctcgttgcgggtcacctacactggcctctatcagctcgccgaggagtgcggcgtcaagtccacgatcccggcgaatcccgacgagttttcgctgacttcctctcttgcggaactggcgacggcgatgggggaaatcccctccaagcatgcggccaggatcgcggaggagacgtcgaacgacatctacaccggggcgtgtcacgtcctcgcagatgttgatgacgaggatgtccagcagcgcgggcagcctgagttactggcgatgattccggtactcgatttcgaaccacatgtttcgtttgacaatgtggatcaaactcttgatgcggaggccgggatggcaacggccacctcaaatctcgagggtgcccttgcaaatcaagatcgttgtatccaatattggaagacgaaatttgaagtggcggaacttgagagaaccatgctggccttgaagaaagagcaggctgtggagacggtccgaggtcgcgaggtgtggtttaattcttacttgaagagttgttgtgcctccatggctagagtatgcagggaacttcgagtagtccgcggtgatcccgaggagtcggcggccgggtacatctcttggctaaccggggcctgtgcccaactcgatgtcatcggcaagcatatcgacgaggccttgaagcaagagtgtcgtcgagcgagtcgatatgccgtagggcacgtgctggcttgcctacgagatcaccacccgcgcctagacctcgagtttctccgcgaaggttttgcttgttctcggagaactccggcggagatagaccatctagcgaggtcgatgtcgccgctggccgagaaaatcttccagtctatggactggcgttggccttcttggtag

SEQ ID NO: 82224 - DNA, 491 bp, Oryza sativa
  Clone ID: PAT_MRT4530_81675C.1
tcgtacattactggtatcgaagaggtcaatatcttcatggctgatgtggatatgcactttcagattgcaaaagagcaagcatccatatgttgcaaatacatgggtagtgagtgagacactacagacgaagatgctacacgatctgcttgcaacaattatcaaccagttgctacctgataatcctggacaacctcaggaggcttgcttagcaggtccatatcttgtacccgcctctgatgctgttgtcagctcaggttacgtttagtacgacgactatgatgaccctgatcttgtccctggatagacgtcatagtaggctgcagagtagacggagcctgaggtgaagaaagactcagaggcggaagacaagattgagacactctagatatagtcatcgccgtcggctattattgttgtgaaggagtggtgtttcaatggtacccactaccatgcctgggacgtgctcttctatggactccgacctgacttac

SEQ ID NO: 82225 - DNA, 133 bp, Oryza sativa
  Clone ID: PAT_MRT4530_81676C.1
ctttatctctacatcgcctccataaacaccagggtgggctttttcaaaaacgtggtgcgttacctacccttccctaccagaagacatccatttatcctccaacaccttcagccggcttctactgcatgatcaa

SEQ ID NO: 82226 - DNA, 855 bp, Oryza sativa
  Clone ID: PAT_MRT4530_81677C.1
cacgagggagagggcgattcgtcacgcaacacaagaaagactccccattgttgtcgtgattaacaaggttgatagattgattacagagctaaagctgccacctaatgatgcatatttcaagctacggcatacactggaggcgatcaatgatctcatctcgtcttgttctaccacagtaggtggcactcaactggttgatcctgctgctggaaatgtttgttttgcaagtggttctgcaggctggtcttttaccttgcaatcttttgctcatctttatttaaagatccatgggattcaatttgatcatgagaaatttgcatcgcgtctatggggagacctatattatcaccctgacactagaaccttcaaaaagaagcctccaaaggaaggagctaatagatcatttgttgagtttgtccttgaacctttgtacaaaatatatagtcaggttgttggggagtcaaagggtaaggttgaagcaactctttctgagctgggtgtgacgctgagcaatgcagcttataagcttaatgttaggcctttgctgagattagcttgtcgctcaattttcgggacttctactggctttactgacatgctagtgaaacacataccctctgtcaaggatgctgctccaaggaagatagaacacatatacactggtccacaagattccactattgtggatgctatgaaaaaatgtgatccacatgcgccccttatggttaatgttacaaagttgtatcctaagtctgactgtagtgtctttgatgcctttggacgagtttatagtggcacaatacagactgggcaaactggtgcgtgttcttggaagaagctattcttctgatgatg

SEQ ID NO: 82227 - DNA, 2229 bp, Oryza sativa
  Clone ID: PAT_MRT4530_81678C.1
atggagagagaagtaggaggtactgatcctcagcccctcttaggtcgcatggttgtgatcgaagattacgttctctgcggttttcttcctccaccttccgagtttcttctcctggtgttgaatttctatggtctttctcttctccatttgaatcctaattccatcgcctttcttagtatctttgttcatctctgtgaggcctacattggggtagagccttttctcgatctcttccgtttctactatgaactgcgttggatggaatccaatagggtgtctggttgcgtcgggttccgacttcgtgatggcatgaagtcgcgttatatccccttccagtgtccttcttcccgcagtaagtggcggaacaggtggttctatcttgagatcaaggactcgaaccctgtcttcgttgttcccgaggatcaaccggacaagattccggcctggaccgccaagccccctttgagcccctctcttcagtcgtttatcgacatcatcgatgatctccgagaacagggcttgtcgggatatgaagtcgctgcagacttcgtcggtctaagcagcgaagctatggagcggcgcgtcggtcaagtgatgatcagcggtccgaccacggctagcgacatccccgtgcccctttgtgaaaagggggcggcggaacgcgatgaagccatcaacgcccttcctttgactgacatcatcgggccgctcgcggaccatcaggtggcgacatctctaaaggagaaggttgtcaaggaggcatctgatgcggccaccactagcggtggcaaagtcccgaccaaggcgaggaaattctcgtctgtactcggacattgccgcaaggcagcgacccccctcggtatcatcttgtcgtcagatcgtgcagcaaggagggtttcttcttactctgtattgattgtctttcaggcttcagacgcgtcccctccacctccacgacgacagcgcattgtaacgatcggcgagaaggaggcgcgggcgaaggctgcacgggccaagtccgggggagcttctagcgcatcacctgccacggcctcgacagatgtcgtgcccatgaccgggagccgggaggcgacgcctagtggccccatcaacaatcccgctgcgggtcgtggtctgccagcggccgttctcacctgggaggagctccaagtcgagatggggcgtcttctcgaagctggtgctcgcggcatcggcagcgagatctcggaggcgaggtcggaagcggcgacggcgaatgcgcgtgctgagagattgctcgccgaggagtgcggcgtcaagtccacgatcccggcgaatcccgacgagtttttgctgacttcctctcttgcggaactggcgacggcgatggggaaaatcccctccaagcatgcggccaggatcgcggaggagacgtcgaacggcatctacaccggagcgtgtcacgtcctcgcgtgtgtaagattgtcgcgtcctgaactcgatctgcgcgagatcttggatcagggggcggcaagcgacacgcgtaaggaggtgatggaagaagtcagtgatctgggggagtctgttctgcccctttttgaagaagatgttgatgatgaggatgtccagcagcgcgggcagcctgagtcactggcgatgattccggtactcgattttgaaccacatgtttcgtctgacaatgtggatcaaactcttgatgcgaaggccgggatggcaacggccacctcaaatctcgagggtgcccttgcaaatcaagatcgtcgtatccaatactggaagacgaaatttgaagtggcggaacttgagagaaccatgctggccgtgaagaaagagcaggttgtggagacgctccgaggtcgcgaggtgtggttcaactcttacttgaggagttgctgtgcctccatggccagagtatgcagggaacttcgagtagtccgcgatgatcccgaggagtcggcggctgggtacatctcttggctaaacggggcctgtgcccaacttgatggcatcggcaagcatatcgacgaggccttgaagcaagagtgtcgtcgagtgagccgatacgccggagtgcacatgctggcttgcctacgagatcaccgcccgcgcttggacctcgagtttctccgccatggttttgctcgttctcggagaactccggcggagatagaccatctggcgaggtcgatgtcgccgctggccgagaagatcttccagtctatggactag

SEQ ID NO: 82228 - DNA, 1806 bp, Oryza sativa
  Clone ID: PAT_MRT4530_81679C.1
atggatctcggcaagtcgtcttccaccggcgcgacgttgaagaaccttcaggaggacggcgcccttcccggccatgaagacatggagagagaagtaggaggtactgatcctcagcccctcttgggtcgcatggttgcgatcgaagattacgttgtctgcggttttcttcctccaccttcggagtttcttctcctgtgtccttcttcccgcagtaagtggcagaataggtggttctattttgagatcaaggactcgaaccctgtcttcgttgttcccgaggatcaaccggacaagattccggcctggaccgccaagccccctttgaccccctctcttcagtcgtttatcgacatcatcgatgatctccgagaacggggcttgtcgggatatgaagtcgctgcagacttcgttggtctgagcagcgaagctgtagagcggcgcgtcggtcaaatgatgatcagcggtccgactacggctagcgacatcctcgtgcccctttgtgaaaagggggcggcggaacgtgatgaagccatcaacgcccttcctttgactgacatcatcgggccgctcgcggaccatcaggtggcgacatctctaaaggagaaggttgtcaaggagacatctgatgcggccaccactagcgaagtcccgaccaaggcgaggaaattctcgtctgtactcggacatcgccgcaaggcagcgaccccctcggcttcagacgcgtcccctccacctccacgacgacagcgcattgtggcgatcggcgagaaggaggcgcgggcgaaggctgcacgggccaagtccgggggagcttccagcgcgtcacctgccacggcctcgacagatgtcgtgctcgtgaccgggagccgggaggcgacgcctagcggccccgtcagcgatcccgctgcaggtcgtggtctgccagcggccgttctcacctgggaagagctccaagtcgagatggggcaccttctcgaagctggtgctcgcggcatcggccgcgagatctcggaggcgaggtcggaagcggcgacggcgaacacgcgtgctgagagattggtgcgcgagctagctgaagcccgtgaggacctcacgaagatgagggagttggtggccggcaacgagcgtcaacgaaaggggctcgaggaccgaatgtcgaaactcgggaacaatctctccgagatccgtcactcgttgcgggtcacctacactggcttccatcagctcgccgaggagtgcggcgtcaagtccacgatcccggtgaatcccgacgagtttttgctgacttcctctcttgcggaactagcgacggcgatgggggaaatcccctccaagcatgcggccaggatcgcggaggagacgtcgaacgacatctacaccgaggcgtgtcacgtcctcgcgtgtgtaagattgtcgcgtcctgaactcgatctgcgcgagatcttggatcagggggcggcaagcgacacgcgtaaagaggtgatggaagaagtcgatctcgagggtgcccttgcaaatcaagatcgtcgtatccaatactggaagacgaaatttgaagtggcggaacatgagagaaccatgctggccatgaagaaagagcaggctgtggagacgctccgaggtcgcgaggtgtggtttaattcttacttgaagagttgctgtgcctccatggccagagtatgcagggaacttcgagtagtccgcagtgatcccgaggagtcgacggccgggtacatctcttggctaaacggggcctatgcccaactcgatggcatcggcaagcatatcgacgaggccttgaagtaa

SEQ ID NO: 82229 - DNA, 2914 bp, Oryza sativa
  Clone ID: PAT_MRT4530_8167C.1
ggaggggaaaaaataacaagggggagcatgggaattttttcagcagccaattcacaaaacaaaaacaacagaaactctcacatcatattaaaaacaacacaaacttttcaatgcacaaatcctccgggctaaaccccgcgcaactgctaaaatggaaaaacaaagcttcctaatcctatgacaacaattttttttcttgggctagtcatattccctttgctgatacatacatggaacggaatgcaaagtagtatatagctgtgtaaagttgcaaatgaaatcccctggaatgccagtgctgcatctgcatgtatataaattaacccgtctccgccccacccggctgccgtcgttggtccctcacccgccgcctgcagccgcctccgcgcctgcctgctgctggcctcggctcctcgcccgccgcccgagcccgcctccgcacccatccccggcgccgacctcggctcatcgcgtgccgccagcagcccgcgcccgctaccgcctcgcctcctttgccctcgccgccgcctccgctggcggcaacggctgcaggtagaacctctccttcactggagggcagtggtaggaggccaagcttgatgggcttggcggccttggtgagcgctgcctgcgcgagggcgccgccggtgatcccagtggcgacgaggccgagcatggcgcagcggctggtctggacgttagcggcggtgtcggccgtgacaggcgtggcctcgttggggaaggacgcgtccagccatccacccttcttggcgcgctcgacgtagcagcataactgcttgccggcgtccggcacgtcgagcgcgaggtcgtcgacgcagccggccacccgctcgaagcccttggtcatctggttcggcgtgatgaggccgcggccgtagcactcggcgaggaggccccacagccgctcgtccttgccacgcttctccatgatcgccaccagcgccttcttcaccacctcgtggtggaagaatggcatcccgagctccttgatgcactggcacgcctcccggatgtcgccgccgcagtcgtactcctgcagcagcctgccgatcttgtccttcacgtcgtccagctcccacccggccttgccggtggcgccgccgccccagcaacgcagtatccgctccgcagagagcttcgcgccgagcagggcacgggcgttccggagcgccaataagccggtggaggatccccctggcttgccgcggccggcctcctcctccattttctctaggttcgatggcgcgatcacctcgtcgaccactgacctggcgaagaacatggtcaggtcctcgacgatggcggggttgtccagcgcggcgtcctcggcggactcgatcaggaggtggaaccccgacacgacgtcctccggcggcattccgagcgaggacagcagcacggacgccatctccttctcgcggctcttccggtccatcgcggaggtgatcagcttcttgacgaagatggcgttgtaggaggaggaacacgcgtagttctcggcctccaggctgctcatcacctcgatgatgtcccctgtcaagaagtactcctttatgatcgacaatgtcttcgccttgaactgccgcaccgcagcgtcgtcctcgacgacggccttcttcggctcggggcccagcggcttcagcgacgacgcgcagagccatccctccgacgaggccttcaggatcatcgatttcaggaggcgcctcgcgtttggcacgtcgagcgtcagatcgtcgacggaatcgatgaggcggttgaaccctttggtgatctggctctcgttgatgatgccttcgtcggacgccgacttgaggagatccaggatgtgcccctcggcgccgccgccgcgctccatggcgagggtgagggcgcgcttgacgatgtcgtggtggaagaaagagatcttgaggcccctgatgcaccggcaagcctctccgatgtcgccggcggcgaggtactcctcgaggatgtcagcgatcttggccttggcctcctccaccgtgatgctcttgctcccgccccacctctgcaggatgatctcgccgtggtgcggcacggacaggtagcttttctccgccctgtgaagaacctcggcgcccttgcatccctccggcaggcacgtcagctgcttggccaggaacgccggcgggagtatgtcgtcgatgatggcgcgggcgacgaacacggcgaggatgtcgacggcgtcgggcgtgtcgacggacaggtcgtcgcaggactcggcgagcttgccgaaccccttgtacacctgcggccggtcgatgacgtcgccgtacagcgaggacagcagcacggccgccatctccttctccctgtcgtggcggtccatggccaccgagaccagcttcttgacgaagtagtagtggtagcacggcacgcgcagctccctcagctcgttcgccgtcgccgcgacgtcgtccgtggagaagtactcctccaagatcgtcgtggctttcctcttgaactgcatgaactcctccgacgacaccgtcgggcttcgcagcaggctcgcgtcctcggcggcggcgcattggatcgccggcttgtgcatcgcgggaggaacaagatcatcaggacgggactccatgggggacatgctgcaactcgttcaaactcaaaccatccgagttccgcaagctgcagatgccccctgctgcatgcagggggagacacctgtaacctcggttattcttgacgtggcgtccaccaaatgcatgcaggcgccacgatcctcaacttgttacatgtacagaaacgatcggtgatgagaagaacaccagaattattccgccccgagttgtcgagatcgagaggctgccgtgttcatctggtattatttgcctttggcagggacagctctagctcaggggacgat

SEQ ID NO: 82230 - DNA, 2241 bp, Oryza sativa
  Clone ID: PAT_MRT4530_81680C.1
atggatctcggcaagtcgtcttccaccggcgcgacgttgaagaaccttcaggaggacggtgcccttcccggccgtgaagacatggagagagaagtaggaggtactgatcctcagcccctcttgggtcgcatggttgcgatcgaagattacgttttctgcggttttcttcctccatcttccgagtttcttctcctgatgttgaatttctatggtctttctcttctccatttgaatcctaattccatcccctttcttagtatatttgttcatctctgtgaggccgagccttttctcgatctcttctgtttctactatgaactgcgttggatggaatccaatagggtgtctggttgcgtcgggttccaacttcgtgatggcatgaaatcgcgttatatccccttccagtgtccttcttcccgcagtaagtggcggaataagtggttctatcttgagatgaaggactcaaaccctgtcttcgttgttcccgaggatcaaccggacaagattccggcctggaccgccaagccccctttgaccccctctcttcagtcgtttatcgacatcatcgatgatctccgagaacggggcttgtcgggatatgaagtcgctgcagacttcgtcggtctgagcagcgaagctatagagcggcgcgtcggtcaagtgatgatcagcggtccaacgacggctagcgacatgcccgtgcctctttgtgaaaagggggcggcggaacgcgatgaagccatcaacgcccttcctttgattgacatcatcgggccactcgcggaccatcaggtggcgacatctctaaaggagaaggttgtcaaggaggcatctgatgcggccaccactagcggtggcaatgtctcgaccaagccgaggaaattctcgtctgtactcggacatcgtcgcaaggcagcgaccccctcggcctcggacgcgtctcctccacccccacgacgacaacgtattgtgacgatcggcgagaaggaagcgcgggcgaaggctgcccgagctaagtctgggggagcttccagcgcgtcacctgccacagcgtcgacagatgtcgtgcccgcaacccggagccgggaggcgatgcctagcggccccgtcagcgatcctgcgggaggtcgtggtctgccagctgccgtcctcacctgggaggagctccaaatcgagattgggcgcctcctcgaagctggtgctcgcggcatcggccgcgagattgcggaggcgaggtcggaggcggtgacggagaacgtgcgtgctgatcgactggtgcgcgagttggctaaagcccgtgaagacctcacaaaaatgagggagctggtggctggcaacgagcgacaacggaatgggctcgaggaccgcatgtcggaactcgagaacaacctgtccgagatccagggcttgttgcggatcacctacactggactccaccaactcgccagggagtgcggcatcaagtccacaatcccggtgaatcctgatgagttctcattgtcctcctctctcgcggaactggcaacggcgatgggggagatcccctccaagcatgcagccaggatcgcggaggagacgtcgaacgggatctacaccggggtgtgtcatgtcctcgcgtgtgtaaggttgtcgcgtcctgaactcgatctgcgcgagatcttggatcagggggtggcaagtgacatgcgtaaggagcgtgggcaacccgggtcactggcgataattccggtactcgagcttggaccacacatctcacctgacaatgtggaacaaacccttgatgcggagacgatgactgcctcaaatctcgaggatgcccttgcaagccaagatcgtcgtatccaatactggaagacgaagtttgaagtggcggaactcgagagaaccatgctggccgtgaagaaagagcaggctgtggaaacgctccgaggtcgcgaggtgtggtttaactcgtacttgaagagttgctgtgcctccatggcgagagtatgcagggaacttcgagtagtccgcggtgatcccgaggaatcggcggccgggtacatctcgtggctgaacggagcctgtgcccaactcgatggcatcggcaagcgtatcgacgaggccttgaaacaggagtgtcgtcgagcgagccgatacgccggaggacacgtgttggcttgcctacgagtcaccgcccgcgcctggaccttgaatttcaccgcgaaggttttgctcgttctcggagaaatccggcggtga

SEQ ID NO: 82231 - DNA, 1788 bp, Oryza sativa
  Clone ID: PAT_MRT4530_81681C.1
atgcccctcacatataatttgcaagtcgagatattcgatgtttggggtatagactttatgggacctttccctaagtcacgcaactgcgagtacattctggtggcagtcaactatgtctccaaatgggttgaggctatgccgtgcagcgccgcggatgcgaggcatgccaagaagatgttcacagaaatcatcttcccaagggttaagctttttggccacagaaaactacgtagtaaatgggaaggaccgttcgacgtcatcgacacctctttgcacggggcaatcacactccgcgacgactcaggcaacatatttaaggcgcgacgccttttccaagatgacgggaaggccgcgccgcctcccgccgagcactatgtgggcaccctgttcaccaaggcaggggatgagggagtgcaaactcccggcggtgggtatggcaagggtttactccggccgttgatagcatcggagaaggagggggcagcggaatcccgtagccctccacctatgaaggtgaagcgtcatttgacaccccctccaatagtaaggactccaggccaatatcaagaagatgaggtgaagtcgccggagccctcaatccataagctcgctgcgcaagtgaagaaactccgcaaggagaacatagagtttagggatcacaacgcggagctaggggccttgtgcgaccttggagccagtgtcagcatcatgctaaaagacgtcttcgacaagctcaacttcacggtgttggcaccaacaccaatgcgccttcaactggctgattcgtcagtctgttacacagcagggatagaggaggatgtgccagtcaagatacgagacttcttcatcctggttgacttcgtggtgctggacatggacacgggaaaagagacgccgctcatcctggggcgtccgttccttagcaccgcaggagccaactttgacgtgggaacggggagtatccgtttccacatcgacgggaaggaagtgaagtttgagtttcaaccgaggacggaacaatgttccatggttaggataaaagaaggaaacaacgatgctcaagaaccattattggaggacgccggtaaaaccacccataccggccaagaagctagagcagccaactcagaggaagctgccctccgcaccaaagccaacgaaggtgtggagggagaagccaaagatgcccgctccatcacctccagagacggaatgaggaggcgattgtctcgtctgttcaaggggtccggctcttcatcaagtcatcatgacgagtctagtactcgttcatcagctgttgtctcgatggaagacgccaaagctccgcgacgactcctgaacggcaccgacatcgaccatgtcaatgatcgggagagacaagcctactacatgctgagcgactgggagtatgctcacacgcgagaatactctccagagctgctgaaaaagatagggtatcatttgtacaactatcgtgaactaaccattcccctgcagaccatagaagaatctcgtgcaggtggagcatacagggagacgcgcaacatggcaaggaacgaacgaaaaagttcatcatcctcaacacccgtgcagatgtatgaggctggttgggagccaactgcggatgcacccggatggacccaagctccgcgccacagcatcgggacgggggagatccagtacaacctcacggaacacatagcccagatgcaagaatggcaacaggctactgatgctcagttcgccaacatcaacaacatgatgcatcaacagggcgacgatctttaa

SEQ ID NO: 82232 - DNA, 418 bp, Oryza sativa
  Clone ID: PAT_MRT4530_81682C.1
tcctttccgtcatgctcctagtttctcactctacctgtgccctcctcccctagctaacccctctctctttctctctctaaagctgcaatctctctacctttctctctctaaaagctggagcagcttaatttctatctctctttctctttctcagctgggatcgcacagtgaagctagggagaggctatagctatggggagcgtgtacctgagcagcgaggctagtgacaatctatctgtcacacacacacacacaaaaacactcgtggattttaggcagatgatggcctgcaaaggaagctgcccttgccagcccaaatgttggacgtgcacgctagccctacctattaaacccgtccttctacgatgctccctttccttcttctccactggcgacgccgacggcaccttttccggca

SEQ ID NO: 82233 - DNA, 2271 bp, Oryza sativa
  Clone ID: PAT_MRT4530_81683C.1
atgtcagtaactattaaacaaattgaagtgtcaaaatgtcattcctcttcatatcttcagttctgaatcttgatgtgcatccattacttatgccagagttctaacttgtccagttaggttgttatggcgttttcttctctacatctcaagaaggaatagatggtcgccatcgcggataacactgacatcatctatttcagcataatctctactgaccacctttctaggatgaaaaccttgaaacttctgactgccaattttgaacagttcctccaatgatgtaggcagcttgataagctttccattttgcgcagcagagactgttgagttatgacgatatttgtgaattgtaactcttttgtttgcttcttttatgtagtactcatctggaattcttcttgttatgttttcttctgttttatgtggagaccctgtctgcactgttgcattcattgttcgctgactgtatgtggagctgctatcttcagagtttatctggatacagtgctcttccgttctttttttgatctcacagtttgtgtgaacttcatcatggttctcttctttatctgtcatactgctattttcgttttctgatgccgaagatcgggttgcttctccaagtaactgtctggaatatctgtcacctccaaatactggagtgttgttactagaatccctacttgtgtgctctgtgtaatgtagttgtgactttttcagcagccatgcttctcgaggaacgtggaatagctcatacttgctcaagaatcttcggtctggttgattcatgtcaggtaaactttctcgtagcttcagcttctgaactaggttgttcattagaatgttactgtcttccctgttttcttcaatgatctctctaagccttgttttgcttattcttaaaagctgtgatagctccgctgtgcggcaagtaaatggctggggtatgttacataaagaaccaacctctccaaacatttctccctctgcaattttctcatatacctgctcattcccatgtattgttgttattatattcactgctcctgaaactactatgtaaacatctgcttctccttcattctgcaatattatatcttcctttggtgggaagtactcagcctgcacttccatgaccagttctgcaatgaaattgccagatactccattgaagagataggcttgccggatgatcggaaagaataagctgtatgctatgcttgagcggattccttttggtagacagtctaacatgacctgctggttgagtccctctgtcttgaattgtaggcagaagtgagatagcacttgctgctttatgttctcaggtagctgattgcgtgctgcaaactctgatgctgcttggattgagtccctaaatttcctggtgcggctggtcccatggacaactaggttggtcatgttgccaatgagataagctgtcaagcccagattaaacatcatatagacaatatcaaatagcatctctgttggattttcagcatgtaggtccccatatcctgttgttgtcagtgttgtaatggaccagtaaagagcagtaatatatctagtccataagctctctgatctgaaagttgacatcacagctcctatccatgttttctctgggttgggatatctgtcagcaatcatataattgaagcatcctgcacaatgtactgcgaagagggtcacagaaataagttttgagcacctagtccagaaatagttgaatcggatgtctttctccagccttgaaagcaatgtcattccccttgtgtgtaaatagaaggatgattggttgaaatggtgctgcagatgatcgtagtttgctaatgtcagggcagaatcgtttgggcctttttcaattccaaatgtggggtttctcattgcaattctctttcggtcatccacaagaagatgtgttttgctatcgacataagcaacgaagaacgtcaaaacaatatcaatggcaaagaatatatccacaatgttctcaactagcaaaagcttagatggtaagtccctcaggaatgctagttcaaacggacaaatccaggcagagtaaacaactaggactataaggaacagctcccaggatctgtaccggggatcataaggcgatatgatgaacttctgcaacttgttggagtggtttatagttgcaccaagggatggcagtagctctacagtgaagctatcgctgctcctcttgatctggagtccatcccagaactggtggaagcaagattttgagtgagcttgggtcat

SEQ ID NO: 82234 - DNA, 440 bp, Oryza sativa
  Clone ID: PAT_MRT4530_81684C.1
ttttatttggttatactacgattagttgcttgcgtcaatggggatcacttttaacaatttaacagggctgaacacgtggcagaagcaacccaagggtccgctacactacaccagatagcaacaacgaacataagcaacttgactgatcatcaaagaggaatggacatggtagcttgtatctctcactaccaaagaaaccttcattttggtggctcgatgctttacgagctgcagctgtgatgcttttcatggtgaaccatcttcaagcagaccatgatcttgagctattccatggttaaacccatactggcccgttattactttcttacggtcccgaaacggagcttcagatccctgcgctggtggaccgtctttttgacactgacgtcccgttttaaccaccccacgcgcttggtgcccgaacgcattgctttcctgcc

SEQ ID NO: 82235 - DNA, 1926 bp, Oryza sativa
  Clone ID: PAT_MRT4530_81685C.1
atggatctcggcaagtcgtcttccaccggcgcgacgttgaagaaccttcaggaggacggcgcccttcccggccgtggagacatggagagagaagcaggaggtactgatcctcggcccctcttgggtcgcatggttgcgatcaaagattacgttctctgcgattttctttctccaccttccgagtttcttctcctggtgttgaatttctatggtctttctcttctccatttgaattctaattccatcgcctttcttagtatctttgttcatctctgtgaggcctacattggggtagagctttttctcgatctcttccgtttctactatgaactgcgttggatggaatccaatagggtgtctggttgcgtcgggttccgacttcgtgatggcatgaagtcgcgttatatccccttccagtgtccttcccgcagtaagtggcggaataggtggttctatcttgagatcaaggactcgaaccctgtcttcgttgttcccgagaatcaaccggacaagattccgacctggaccgccaagccccctttgaccccctctcttcagtcgtttatcgacatcatcgatgatctccgagaacggggcttgtcgggatatgaagtcgctgcagacttcatcggtctgagcagcaaagctgtggagcggcgcgttggtcaggtgatgatcagcggtccgaccacggctagcgacatccccgtgcccctttgtgaaaagggggcggcggaacgcgatgaagccatcaacgcccttcctttgactgacatcatcgggccactcgcggaccatcaggtggcgacatctctaaaggagaaggttgtcaaggaggcatctgatgcggccaccactagcgcggccattctcacctgggaggagctccaagtcgagatggggcgccttctcgaagctggtgctcgcggcatcggccgcgagatctcggaggcgaggtcggaagcggcgacggcgaacgcgcgtgctgagagattagtgcgcgagctagctgaagcccgtgaggacctcacgaagatgagggagttggtggccggcaacgatcgtcaacggaaggcgctcgaggaccgaatgtcggaactcgggaacaatatctccaagatccgtggctcgttgcgggtcacctacactggcctccatcagctcgccgaggagtgcggcgtcaagtccacgatcccggcgaatcccgacgagttttcgctgacttcctctcttgcggaactggcgacagcgattggggaaatcccctccaagcatgcggccaggatcgcgaaggagacgtcgaatggcatctacactggggcgtgtcacgtcctcgcgtgtgtaaggttgtcgcgtcctgagctcgatctgcgcgagatcttggatcagggggcggcaagcgacacgcatctcgagggtgcccttgcaaatcaagatcgtcgtatccaatactggaagacgaaatttgaagtggcggaacttgagagaaccatgctggccgtgaaaaaagagcaggttgtggagatgctccgaggtcgcgaggtgtggttcaactcttacttgagaagttgctgtgcctccatggctagagtatgcagggaacttcgagtagtccgcggtgatcccgaggagtcggcggccgggtacatctcttggctaaacggggcctgtgcccaactcgatggcatcggcaagcatatcgacgaggccttgaagcaagagtgtcgtcgagcgagccgatatgccggagggcacatgctggcttgcctacgagatcaccgcccgcgccaggacctcgagtttctccgccatggttttgctcgttctcggagaactccggcggagatagaccatctggcgaggtcgatgtcgccgctggccgagaagatcttccagtctatggactggcgttggccttcttggtag

SEQ ID NO: 82236 - DNA, 3882 bp, Oryza sativa
  Clone ID: PAT_MRT4530_81686C.1
atggagcaacctctttttgagctgtctgctcctcggggcgaattctatgagccacctccttcatcggagcccatttatacaactggctatgaaattcgtcccgaactaattagtatggttaaggaaaatcctttttctggttttgatctagagaatccttaccatcatctgcgagactttgaacaagtctgctcatgccttaagattcgtggcatgagacaagaaaccgtgcggtggaaattgtttccgttctctcttcaagagagagcaaagcaatggtacacctccaccgttggatgtgtaaacggatcgttcatgcataaaacgccgtcagaaggaaaaacgattttggatcacattctagaaaacacttccttcatgacacagtccaatgaaccccagctggaggcatccgtgtccaagatagaggtgcctctaacgatcgagccacttgctgaaccatctacttctactagctcgattaatgagaaggttcctgagcagccgtccgtcgagaatgaagaaattcagattccggattgtgccacaattatgttcagggaaggttttgacgaagactacggcaataccctgaactattttagcaagagaaaaccacccgttcctttgtcacctcctgatcctatggaacttgggttcctgcaagaaactgtccgggagttgacatccataatgagcgacgaatggctaagggaggcagagctttcatccaaagtaattcggataaataccgctccccgaatcattccttgccatctggaagggaacgacgtaggtattctctacagtccaacagtcggggccaacctcgtctctgaatcttttgcattcgcttatttaagcgataaggtagtgaccccgacaaccaaattcttcaagcatccgaacggaaatatcatcgaaggatttgggattgtgcaagatgtgcctgtctgctttgaagacagggaggcgatcttggatttccacgtctttgaaatccaatactttgatatcctagtcgggctgcccattgagcaacttctcatcaacacaccccgattaggtaacctcaaaataacacggggagagaatgaattctcaattccattctcgcaggcaaggatcaccttgaccgacactctcctagaaattgagtcagcagaagaggttactgcagttcctcctcatgagtctcccgaggcccttctggaagatgaggtccccgacttcatcaaggaagaagcagatcccggtgagactctcgacctaccaattatggaaccaccacctcgacctccgctcgagcttaaacctctacccccaggcctacgatatgctttccaacacaatgacaaagaagcccctgtcataatcagtgacaagctctctgaagacgagactcaacgccttcttaccgtgttggaaaagcatcattctgttcttggctactcgctccaggaccttagggggattaatctcgcactttgcacccatcatattcctattgaccccgagagtactccctccaggatgtccttcggactgtgtagtgctcctgcatcgttccaaaggtgcatgatgtctattttctcggacatgatcgaagatatcatggaagtcttcatggatgacttctcagtttatggaaagactttcggtcattgtctgcagaatctagacaaagtcttacaacgatgccaagaaaaagacctggtgcttaattgggaaaagtgtcattttatggtccatgaaggaatagttcttgggcatcgagtgtccgaacgaggaatcgaagttgatcgtgctaaaatcgatgttatagatcaacttcctcctcctgtgaacatcaaaggaatccgcagcttcttgggtcatgccggcttttatagaaggttcattaaggacttctctacaatcgccagacctctgaccaatctgctagccaaggatgcgccctttgagtttgatgacgcgtgcctaaaatcttttgaaattctcaaaaaggcactcgtctctgctctaatcattcaacctcctgattggactctgcccttcgagatcatgtgtgatgcaagtgacttcgctgttggtgcggtcttcggccaaaccaaagataaaaagcatcatgcaatctgttacgctagcaaaactctaaccggagcccagttgaataacgcaactactgaaaaagagctgctcgcggttgttcttgctatcgataagtttagatcttacttagtaggagccaaggaacagccgatcaatgatttcttaagagatgacatgctgatgacggttagcgactccaatccatggtatgccaacatagtgaactacatagtatccaagtacataccaccaggggaaaatcaacgaaaactaaagtatgaaagtcgccgtgacatatgggatgagccatacctatatcgggtctgctccgatggcctgctacgaagatgtgtgccaactgaaggactcaagatcatagaacgatgccatgcctcaccctatggtggccattacggtgcattccgcacccaggccaagatttggcaaagtggtttcttctggccaacaatgtacgaagactcaagagaattcgttagaagatgcaccagctgccagaggcaaggaggaatcactgctcgcgatgcaatgcccctcacatacaatttgcaagtcgagatattcgatgtttggggtatagacttcatgggacctttccctaagtctcgcggctgtgagtacattctggtggcagttgactatgtctccaagtgggttgaggctatgccgtgcagcgccgcggataccagtggacaagcagaaacatcaaacaaacaaatcaagaatattctgcaaaagacggtcaacaaaatgggaacaggatggaaggatagattaccggacgcactgtgggcatactggacagcatacaagacacccattggaatgtacccatatcagatagtttacgggaagccatgtcgactccctatagaacttgagcacagagcatactgggccattaggaattggaacatggattttgagggagcaggagaatggagaaaaatgcagatcgctgaacttgaggaatggagagaaaaggcttaccacaacgcaaagatatacaaagaaaggacgaagcgctggcatgacaaaagaataaagatcaagaaattcaagccaagagacaaagtactgatgttcaaatctagggttaagctcttcggccacggaaaactgcgcagcaaatgggaaggaccgttcgacgtcatcgacacctcttcgcacggggcaatcacactccacaatgaatcaggaaacatatttaaggcacgatgccttttccaagatgacgggaaggccgcaccgcctcccgccgagcgctatgtgggtaccctcttcaccaaggcaggggatgaggtgctccacaagtataccacacccaccgttactccatccaccccaaagggggagcgtttccgcattcagggagtacgaactcccggcgatgggtatggtaagggtttactccggcctttgacggcattggagaaggagggggcagaggaatcccgtagccctccacctatgaaggtgaagtgttatttgacgccccctccaattgtaagggctcccggccaattccaagaggatgaggtgaaatcgccggagccctcgatccacaagctcgccgctcaagtgaagaaactccgcaaggagaacatagagcttagggatcataatgcggagctaggggtagaactcgctgaacttaggaatagttttgatacccttagtcgcggtttgtgcgctaagatcaagcgtgcattcatagatatgggaaaggaaaataagtattatgctaattag

SEQ ID NO: 82237 - DNA, 442 bp, Oryza sativa
  Clone ID: PAT_MRT4530_81687C.1
gatgagtaaactaacaactacatcgttatcaagcgagaaatcagcagctaaaacggtaaacaaatgagctaacggcctcatccagtgtgtacaaatacatgactgatgtggagacatcaataacccatcgtctggcaaccttgaccgtggggacatgcttaaatacacacttgagactctgagggtgggggctgcaaaaggctacgcataaaatgatctggaactgttaactgagcaagggaggctcgcacggattgggcacagcgaaccgaacaaacgtgggcgccctctggtcaaaaactgcttgcgatatgagacatattctgcattgctgatagtataacaagctcacgcggttcgtatgccaaattcaggttactgcacgggtcaaggaaaacatagccattgacttggccctgcaccaagggccactgaaaaacgt

SEQ ID NO: 82238 - DNA, 1818 bp, Oryza sativa
  Clone ID: PAT_MRT4530_81688C.1
atggatctcggcaaatcggcttccaccagcgcgacgttgaagaaccttcaggaggacggcgcccttcccggccgtggaagcatggagagagaagcaggaggtactaatcctcagcccatcttgggtcacatggttgcgatcgaagattacgttctctgcggttttctccctccgccttccgagtttcttctcctggtcttgaagttctatggtctttctcttcttcatttgaatcctaattccatcgcctttcttagtatctttgttcatctctgtgaggcctacattgggtgtcctttttcccgcagcaagtggcggaacaggtggttctatcttgagatcaaggactcgaaccctgtcttcgttgttcccgaggatcaaccggacaagattccagcctggactgccaagcctcccttgaccccctctcttcagtcgtttatcgacatcatcgatgatctccaagaacggggcttgtcgggatatgaagtcgttgcagacttcgtcggtctgagcagcgaagtcgtggagcggcgcgtcggccaagtgatgatcagcggcccgaccacggcgagtgacatccccgtgcccctttgtgaaaagggggcgacggaacgcgatgaagccatcaacgcccttcctttgactgacatcatcgggccgctcgcgaaccatcaggtggcgacatctctgaaggagaaggttgtcaaggaggcgtctgacgcggccaccactagcggtggcaatgtcccgaccaagccgaggaaattctcgtctatactcggacatcgtcgcaaggcagcgaccccctcggcctcggacgcgtctcctccacctccacgacgacaacgcattgtgatgatcggcgagaaggaagcgcgggcgaaggctgcacgagctaagtctggaggagcttccagcacatcacctgccgcggcctcgacagatgtcgtgcccgcagccgggagccgggaagcgacgcctagcggccccgtcagcgatcctgcgggaggtcgtggtctgccagctgccgtcctcacctgggaggagctccaagtcgagatggggcgcctcctcgaagctggtgctcgcggcatcgaccgcgagattgcggaggcgaggtcggaggcggcgacggtgaacgcgcgtgctgatcgactggtgcgcaagttggctgaagcccatgaagacctcacgaaaatgagggagctggtggccggcaacgagcgacaacggaaggggctcgaggaccgcatgtcggaactcgggaacaacctgtccaagatccggggctcgttgcggttttgtatgttgatctcggaagcttttgtccattgtagagatgctgatgacgaggatgtccagcagcgcgggcagcccgagtcactggcgataattccggtactcgagcttgaaccacacatctcgcctgacaatgtggatcaaacccttggtgcggaggccgggatagcgacgactacctcaaatctcgaggatgcccttgaaagccaagatcgtcgtatccaatactggaagacgaagtttgaagtggcggaactcgagagaaccatgctggccgtgaagaaagagcaggctgtggaaacgctccgaggtcgcgaggtgtggtttaactcgtacttgaagagttgctgcacctccatggccagagtatgcagggaacttcgagtagtccgcggtgatcccgaggagtcggcggccgggtacatctcgtggctgaacggggcttgtgcccaactcgatggcatcggcaagcgtatcgacgaggccttgaaacatgagtgtcgtcgagcgagctga

SEQ ID NO: 82239 - DNA, 1557 bp, Oryza sativa
  Clone ID: PAT_MRT4530_81689C.1
atgagcaatgaatggctaagggaggtagagctttcatccgaagtaattcagataaatacggctccccgaatcattccatgccatctagaagggaacgatgtcggtattctctacagtccatctgtcggggccaacctcgtctctgagtcttttgcactcgcttatttaagcgataaggcagtgtccccgacaaacaaattcttcaagcatccgaacggaaatatcatcgaagggtttgggattgtgcaagatgtgcctgtctgctttgaagacatggaggcgatcttggatttccacgtctttgaaattcaagatttcgacattctaatcgggcttcccattgagcaacttcttattaacacaccccgattaggtagcctcaaaataacactgggagagaatgaattttcaattccattctcgcgggcaaggatcaccttgaccgattctctcccagaaattgagtcagcggaagaggttaccgcagtccctcctcatgagtctcctgaagcccttctggaagatgaggtcccagacttcatcaaggaagaagcagatcccggcccctgtctcataatcagtgacaagctctctgaagacgagactcaacgtcttctcaccgtgttagaaaagcatcgttctgttcttggctactcgcttcaggaccttagggggattaatcccgcgctttgcacccatcgtattcctattgaccccgagagtactccctccagggaacctcaacgatggctcaataatgcaatgcgagaggttgtaaagaaagaggtcttgaaactcctgcatgccgggattatttatcccgtaccatacagtgagtggcccctcgcagcagtgccgggctcccctgaaaatctggagcccgtcgacgagctccctggttcgaccaaaccaggggttcggccaaacccttctcggccccgttcggccccctgttcggcagcgcgatccctctcccctcgccatgtcacaaggacaaaaattcggggggattcgcctgctcaacggctgacgatgggagagctcggtctcttaaaggcatgtcgcctttttcaagatgacgggaaggccgcgccgcctcccaccgagtgttatgtgggcaccctgttcaccaaggcagtggatgaggtgctcacaagaggagcgattccgcattcagggagtgcgaactcccgcggtaggtatggtaagggtttactccggcctttgatggcatcagagaaggagggggcagcggaatcccgtagccatccacctatgaaggtgaagcgtcacttgacgccccctccaattgtgagggctcccggccaattccaagaaaatgaggtgaaatcaccggagccctcgatccataagctcgctgcgcaagtgaagaaactccgcaaggagaacatagagcttagggatcgcaacgcggagctaggggtagagcttgctgaaattaggaataatttcgatacccttagtcatggtttgtgcgctaaaatcaagcgtgcattcatagatatggggaagaaaaatatatattatgctaattag

SEQ ID NO: 82240 - DNA, 372 bp, Oryza sativa
  Clone ID: PAT_MRT4530_8168C.1
ctcgatgaataattcagggaacctttatatgattagaatgaattttgttccattttggagcgccggcaatttatccagtttacattttcacacaagggggtttttaatttttttataattaaaacaatttgcattctcctaatgaaagccatggagagatagagggggaataaacaacagatttactacataaaagtaaagggaacaaaccgggaaaggaaaaagggaacattgtccaagagcttttaaaaccctacgggtttagattttccagggcctccagaagaatgggcctgaaccttttgcagcccagcttaacattttgttggcccatgaaagtttgcctgatgaaattgaatccccgttggggga

SEQ ID NO: 82241 - DNA, 1833 bp, Oryza sativa
  Clone ID: PAT_MRT4530_81690C.1
atgccggcgcggtcggcgggaggcggcgcgcccgcgtccctatggtcgccggcggcggccataggcacggcggagtggcggccgagagaggggagggaaagggggaaacgaggcggcggtccacggctcaccccgaggcgacggcggcgacggaggaggcggcagaagcggagggacgcggtggcgcggctcgggtcgacggggtcggcggcgctccggcggtcggcgaccgaaacggaggggtggacgagggtcgttttgggacgtgacatgatcagcggtccgaccacggctagctacatccccgtgcccctttgtgaaaagggggcggcggaacgcgatgaagccatcaacgcccttcctttgactgacatcatcaggccgctcgcggaccatcaggtggtgacatctctaaaggagaaggttgtcaaggaggcatatgatacggccaccactagcggtggcaaagtcccgaccaaggcgaggaaattctcgtctgtactcggacatcgtcgcaaggcagcgaccccatcggcttcagacacgtcccctccacctccacgacaacagcgcattgtgacgatcggcgagaatcgagatgggcgccttctcggagctggtactcgcggcatcggccacgagatctcggaggcgaggtcggaagcggcgacggcgaacgtgcgtgctgagagattggtgcgcgagctagctgaagcccgtgaggacctcacgaagatgagggagttggtggccggcaacgatcgtcaacggaaggggctcgaggaccgaatgtcggaactcgggaacaatctctccgagatccgtggctcgttgtgggtcacctatactggccaccatcagctcgccgaggagtgcggcgtcaagtccacgatcccggcgaatcccgacgagttttcgctgacttcctctcttgtggaactagtgatggcgatggggaaaatcccctccaaacatgcggccaggatcgcggaggagacgtcgaacggcatctacaccggggcgtgtcacgtcctcgcgtgtgtaagattgtcgcatcctgaactagatctgcgcgagatcttggatcagggggcggcaagcgacacgcgtaaggaggtgatggaagaagtcggtgatctgggggagtctgttctccccctttttgaagaagatgttgatgacgaggatgtccagcagcgcgggcagcctgagtcactggcgatgattccggtactcgattttgaaccacatgtttcgtctgacaatgtggatcaaactcttgatgcggaggccgggatggcaacggccacctcaaatctcgagggtgcccttgcaaatcaagatcgtcgtatccaatactggaagatgaaatttgaagtggcggaacttgagagaaccatgctggccgtgaagaaagagcaggttgtggagacgctccgaggtcgcgaggtgtggttcaactcttacttgaggagttgctatgcctccatggtcagagtatgcagggaacttcgagtagtccactgtgatcccgaggagtcggcggccgggtacatctcttggctaaacggggcctgtgcccaactcgatggcatcagcaagcatatcgacgaggccttgaagcaagagtgttgtcgagcgagccgatacgccggagggcatgtgctggcttgcctacgagatcaccgcccgcgcctggacctcgagtttctccgccatggttttgctcgttctcggagaacaccggcggagatagaccatctagcgaggtcgatgtcgccgctggccgagaagatcttccagtctatggactggcgttggccttcttggtag

SEQ ID NO: 82242 - DNA, 855 bp, Oryza sativa
  Clone ID: PAT_MRT4530_81691C.1
atgttcaactccagggttaagctttttggccacgaaaaattgcgcagtaaatgggaaggaccgttcgacgtcatcgacacctcttcgcacggggcaatcacactccgcgacaactcaggaattagtgggcctaggacgagaagtggaggcctgccagatccaccagggcaaatcactgatcccattcattcgctcttcttccaattccacttacaatctcaccggagagccaacgccgacaaatcaattgattccgctgtgccgggctcccctgcaaatctggagcccgacggcgagctccctggttcggccgaaccaggccctctcggccccgttcggccccccgcgcgacgccttttccaagatgacgggaaggccgtgccgcctcccgccgagcgctatgtgggcaccctgttcaccaaggcaggggatgaggtgctccataagtatgtcatacccaccgctactccatccactccaatggaggagcgattccgcatccagggagtgcgaactcccggcggtgggtatggcaaggtaagggctcccgaccaatatcaagaagatgaggtgaagttgccagagccctcaatccataagctcgctgcgcaagtgaagaaactccgcaaggagaacatagagcttagggatcgcaacgcggagctagggagggatcgggcatcaggttcggccgaaccaaagctggccccaatccctcccaattttcacaggtatgccccgatttatccctaccaagctccacatatcagccttagaatagggatgaattatggcacatttttccttgggacgagcaaaggactaagtgtggggggttttgttggcggctgttaa

SEQ ID NO: 82243 - DNA, 210 bp, Oryza sativa
  unsure (1)..(210): unsure at all n locations
  Clone ID: PAT_MRT4530_81692C.1
cccacgcgtccgctcgatcgattctttccacggtttccatactacacgaatggatcgccacgtcttgcagggcggcgccggtggtcatcaggcggatgtggtcgtcgtcgacggggcgttcctgatggagctgctcgacgacacgccggcggggcctgtggcggcgganagcagccggaagngancgacgccgaacgaccggctgagccg

SEQ ID NO: 82244 - DNA, 1535 bp, Oryza sativa
  Clone ID: PAT_MRT4530_81693C.1
atggcagaaagttcagccatttggtatctgacacataatcatttctctgattacatgtctcgaaacatggcagaaaatgccaagcgtctcattggccggagatttactgatgcttctgtccagagtgatattaagctctggcccttcaaggtcattgctggacctggtgacaagtcaacgattgtggttcagtacaagggtgaagagaagcaggttgcagctgagcagattgatgatgaaacaatttctccaagcgtttgttacgctgatccatatgatggagggctatgtgcctcttatgcagatgccaagcgtctcatcggccagagatttactgatgcttctgtccagagtgatattatgctctggcccttcaaggtcatcgctggacctggtgacaagtcaatgattgtggtccagtacaagggtgaagagaagcagtttgcagctgaggagatctcttctatggtcctcatcaagatgcgtgagattgctgaagcttaccttggcaccaccataaaaaaagctgtcgtaacagttcctgcttacttcaactactcacagaggcaggctaccaaggacgctagggtcattgctggcctcaatgtcatgcgtatcatcaatgagcctactgctgctgccattgcctatggtcttgacaagaaggcttccagtgttggtgagaagaacgtcctcatcttcgaccttggtggtggtacctttgatgagttcaagaggaagagcaagaatgacatcactggcaacccaaggcctgtcgggaggctgaggacagcttgtgagtgggcgaagaggactctctcccctccacttcccagaccacccaccattgagattgactccctgtacgagggcatcgacttctactcgaacatcacctgcgccaggttcgaggagctgaccatggatctcttcaggaagtgcatgaggggataccaagatggacaaagagcagcgtgcacgatgttcatccttgttggtggctccaccaggattcccagagtgcagcagctcctccaggacttcttcaatggcaaggagctctgcaagaacatcaaccctgatgaggccgtcgcctatggcgccgctgtccaggcccccatcttggtctggagacggccagaggagtgatgacctagaaggagcaggccggtcttctccacctactccgacaaccggcctggtgtgttgatccaggtgtacgagggcgatgggagaggaccatgacaccattgagtaagtgaggagatcgagaagatggtccaggacgcggagaagtacaagtcggaggacgatgagctacatcgaagaacatgcacaaacaccatcaaggtccgagcacccacgcggcggccaagaagatgggaggacgcggtgggagattgagccaagatggacgaggacgtgccgttaaattttggctgatcatggtggttaaattttggctacgttgtaatgaaaaatgcattggttccttcgttaaagtaatagtactactattgttctgtttcggttcg

SEQ ID NO: 82245 - DNA, 2139 bp, Oryza sativa
  Clone ID: PAT_MRT4530_81694C.1
atggcgaccttcccaagcggcgacgacaaccagagcgacggcggcatcttctcttctaggcttttaaaatcaattctaataattccaattaaacaacaatttatatatttaggatttttagggtgtgacatgaccccgacaaacaaattcttcaaacatccgaacggaaatatcattgaaggattcaggattgtacaagatgtgcctgtctgctttgaagacagggaggcgatcttgaatttccacgtgtttgaaatccaagattttgacatcttcattgggctgcccattgagcaacttctcatcaacacaccccgattagatagcctcaaaataacactgggagagaatgaattttcaattccattctcacgggcaaggattgccttgaccgaccctctcccagaaattgagtcagcggaagaggttactgcagttccccctcatgagtctcctgaggcccttctggaagatgaggtccccgatttcatcaaagaggaagcggatcaggaaccaccacctcgacctccgcttgagctaaaacctctacctccaggcctacgttatgttttcctacacaatgacaaagaggcccctgtcataatcaatgacaagctctctgaagacgagactcaacgtcttctcatcgtgttggaaaagcatcgttctgttcttggctactcgcttcaagacctcagggggattaatcctgcgctttgcacccatcgtattcatattgaccacgagagtactccctccagggaacttcaacgacagctcaataatgcaatgcgagaggttgtaaagaaagaggtcttgaaagtcctgcatgccgggattatttatcctgtaccatatagtgagtggggaggaatgacggtcattgcaaatgctcgaaacgaacttaatccgcaacgaaccataaccggatggaggatgtgcatcgactacaggaagctcaacaaggctacaaaaaggatcatttcccgctacccttcattgatgaaatgttggaacggctggcaaatcattcctttttctgtttccttgatgggtattccgggtatcatcaaattcctatccatccggaggaccaaaaatttagacaaagtcttacaacaatgccaagaaaaggatgtggtgcttaattgggaaaaatgccatttcatggacacgccagctttttatgacttttctacaatcgcccgacctctgaccaatctgctggccaaggatgcgccctttgagttctatggcgcgtgcctaaaatcttttgaaattctcaaaaaggcacttgtctccgctctaatgattcaacctccggattggactctgcccttcgagatcacgtgtgatgcaagcgatttcgttgtcggtgcggttttgagccaaaccaaggataaaaagcatcaagcaatctgctatgctagcaaaactctaaccggggctcagttgaattatgcaactaccgaaaaagagctactcgtggttgtttttgctatcaataagtttaggtcttacttagtgggagccaaggtgataatttatactgataatgctgctttgaaatacctgctcactaagaaagatgctaaaccacgtctcttaagatggattttgctgctccaagaatttgacttagaaattaaagataaaaagggagtagaaaattccgtaacagatcacttgtctaggctgcagatcactgacatgcaggaacagccgataaatgatttcttgagagacgacatgttgatgacagttcgcgactccaacccgtggccaagatttggaaaagtggcctcttctggcccacaatgtacgaagactcaaaagaattcgtcagaagatgcacaagctgccagaggcaaggatgaatcactgctcgcgatgcaatgcccctcacatacaatttactttatggggcctttccctaagtctcgcaactgcgagtacattctggtggcagtcgactatgtctccaagtgggttgaggctatgccgtgcagcgccacggatgcgaggcatgccaagaagatgttcacagaaatcttcccaagatttggtacccccaggattgtcataagtgacgaaggttctcacttcattgacaaaaccttccgagacctcctacgatag

SEQ ID NO: 82246 - DNA, 630 bp, Oryza sativa
  Clone ID: PAT_MRT4530_81695C.1
atgagcctactgctgctgccattgcctatggtcttgacaagaaggcttccagtgttggtgagaagaacgtcctcatcttcgaccttggtggtggtacctttgatgtctctcttctcaccattgaggagggaggtcaaggccacagctggtgacacgcatcttggtggtgaggactttgacaacagaatggtgaagcactttgttcaggagttcaagaggaagagcaagaaggacatcactggcaacccaaggcctgtcgggaggctgaggacagcttgtgagtgggcgaagaggactctctcccctccacttcccagaccacccaccattgagattgactccctgtacgagggcatcgacttctactcgaacatcacctgcgccaggttcgaggagctgaccatggatctcttcaggaagtgcatgaggggataccaagatggacaaagagcagcgtgcacgatgttcatccttgttggtggctccaccaggattcccagagtgcagcagctcctccaggacttcttcaatggcaaggagctctgcaagaacatcaaccctgatgaggccgtcgcctatggcgccgctgtccaggcccccatcttggtctggagacggccagaggagtga

SEQ ID NO: 82247 - DNA, 2421 bp, Oryza sativa
  Clone ID: PAT_MRT4530_81696C.1
ctagctctcaatgacttggctcctcgtagattccggcttcgtaggagatctagaggtctccaagtagaactcggagatatcagatccaatacgatacgccaacgacccagttctgtacgagaaggactcttcccatctgtaaccctgacagtagccccgacttttgcttaaaatgaactcgtgcaaccatttacgacttcgggtgtcgagaacgttatcattctttgggagctcattttgaagtctgccaaccttgttgaacacacaccgcctgccagcgctccttgccttctccaccgccaccagaaaccctagttcgccaacccaggcttgttttccggcgatcttggcacagcaatggatctcggcaagtcgtcttccaccggcgcgacgttgaagaaccttcaggaggacggtgcccttcccggccgtgaagacatggagagagaagtaggaggtactgatcctcagcccctcttgggtcgcatggttgcgatcgaagattacgttttctgcggttttcttcctccatcttccgagtttcttctcctgatgttgaatttctatggtctttctcttctccatttgaatcctaattccatcccctttcttagtatatttgttcatctctgtgaggccgagccttttctcgatctcttctgtttctactatgaactgcgttggatggaatccaatagggtgtctggttgcgtcgggttccaacttcgtgatggcatgaaatcgcgttatatccccttccagtgtccttcttcccgcagtaagtggcggaataagtggttctatcttgagatgaaggactcaaaccctgtcttcgttgttcccgaggatcaaccggacaagattccggcctggaccgccaagccccctttgaccccctctcttcagtcgtttatcgacatcatcgatgatctccgagaacggggcttgtcgggatatgaagtcgctgcagacttcgtcggtctgagcagcgaagctatagagcggcgcgtcggtcaagtgatgatcagcggtccaacgacggctagcgacatgcccgtgcctctttgtgaaaagggggcggcggaacgcgatgaagccatcaacgcccttcctttgattgacatcatcgggccactcgcggaccatcaggtggcgacatctctaaaggagaaggttgtcaaggaggcatctgatgcggccaccactagcggtggcaatgtctcgaccaagccgaggaaattctcgtctgtactcggacatcgtcgcaaggcagcgaccccctcggaagcgcgggcgaaggctgcccgagctaagtctgggggagcttccagcgcgtcacctgccacagcgtcgacagatgtcgtgcccgcaacccggagccgggaggcgatgcctagcggccccgtcagcgatcctgcgggaggtcgtggtctgccagctgccgtcctcacctgggaggagctccaaatcgagattgggcgcctcctcgaagctggtgctcgcggcatcggccgcgagattgcggaggcgaggtcggaggcggtgacggagaacgtgcgtgctgatcgactggtgcgcgagttggctaaagcccgtgaagacctcacaaaaatgagggagctggtggctggcaacgagcgacaacggaatgggctcgaggaccgcatgtcggaactcgagaacaacctgtccgagatccagggcttgttgcggatcacctacactggactccaccaactcgccagggagtgcggcatcaagtccacaatcccggtgaatcctgatgagttctcattgtcctcctctctcgcggaactggcaacggcgatgggggagatcccctccaagcatgcagccaggatcgcggaggagacgtcgaacgggatctacaccggggtgtgtcatgtcctcgcgtgtgtaaggttgtcgcgtcctgaactcgatctgcgcgagatcttggatcagggggtggcaagtgacatgcatctcgaggatgcccttgcaagccaagatcgtcgtatccaatactggaagacgaagtttgaagtggcggaactcgagagaaccatgctggccgtgaagaaagagcaggctgtggaaacgctccgaggtcgcgaggtgtggtttaactcgtacttgaagagttgctgtgcctccatggcgagagtatgcagggaacttcgagtagtccgcggtgatcccgaggaatcggcggccgggtacatctcgtggctgaacggagcctgtgcccaactcgatggcatcggcaagcgtatcgacgaggccttgaaacaggagtgtcgtcgagcgagccgatacgccggaggacacgtgttggcttgcctacgagtcaccgcccgcgcctggaccttgaatttcaccgcgaaggttttgctcgttctcggagaaatccggcggtga

SEQ ID NO: 82248 - DNA, 3138 bp, Oryza sativa
  Clone ID: PAT_MRT4530_81697C.1
atggagcaacctcgttttgagatgtctgctcctcggggcgaattctatgagccacctccttcatcgaagcccatttatacaactggctatgaaattcgtcctgaactaattattactcgtattactgcctttcgagtagaaattcttagtttcaagcagatcaaaaatgaatcaatcggtgcaacttggtccagattcactaatttagtacaatccggaccaaccctgtccttacccgagtatgtgcttctgcaatatttccatacgggtttggataaggaatctgcattctatctggacataaccgttggagggtcgttcatgcacaaaacgccgtcagaaggaagaacaattttggatcgcatcctagaaaatacttccttcatgacgcagcccaatgaaccccagccgaaggcatccctgtccaagatagtggaacctctaacgatcgagccactcactgaaccatccacttctgctagctcgattgatgaaaaggttcctgagcagccgtttgtcgagaatgaagaaattcaggttccggattgtgccacaattatgttcagggacggttttgacaaagactacggcaataccctgaactattttagcaaaaggaaaccacccgttcctttgtcacctcccaatcctatggaactcgggttcctacgagaaactgtccgggagttaacatccataatgagcgatgaatggctaagggagattgtacaagatgtacttgtctactttgaagaaagggaggcaatcttggatttccacgtctttgaaatccaagattttgacatcctaatcaggctacccattgagcaacttcttatcaacacacctcatttaggtagcctcaaaataacactgggagagaatgaattctcaattccattttcacgggcaaggatcaccttgaccgaccctctcccagaaattgagttagtggaagaggttaccgcagttcctcctcatgagtctcccgaggcccttctggaagatgaggtccccgatttcatcaaggaagaagcagatcccggtgagactctcgacctgccaatcatggaaccgccacctcaacctccgcttgagcttaaacctctacctctaggcctacgatatgctttcctacacaatgacagagaggcccctgttataataagtgacaagctctctaaagacgagactcaacgtcttcctaccgtattggaaaagcatcgttctgtacttggctactcacttcaagatcttagggggattaatctcgcgctttgcacccatcgtattcctattgaccccaagagtactccctccagggaacctcaacgacggctcaataatgaaatgcaagaggttgtaaagaaagaggtcttgaaactcctgcatgccgggatcaatttatcccgtaccatatactggcaaatcattcgtttttctgtttccttgatgggtattacgggtatcattaaattcctatccatctggaggaccagacttcctcctcctgtgaacatcaaaggaatctgcagtttcttaggacatgccggcttttatagaaggttcatcaaggacttttctacaatagccaggccgctgactaatttgctagccaaggatgcgccctttgagttcaatgacgcgtgcctaagatcttttaaaattctcaaaaaggcactagtctctgctccaatcattcaacctcctgattggactctgcccttcgaaattatgtgtgatgcaagtgactttgctgttggtgcggtcttaggccaaaccaaggataaaaagcatcatgcaatctgttacgctagcaaaactctaaccggagctcagttgaattatgcaactactgaaaaagagctgctcacggttgtttttgctatcgataagtttagatcttacttagtgggagccaaggtgataatttatactgatcatgccgctttgaaatacctgctcactaagaaagatgctaaaccacgcctcttaagatggattttgttgctccaagaatttgacatagaaattaaagataaaaagggagtagaaaattatgtagcagatcatttgtccagattgcacatcactaacatgcaggaacaaccgataaatgatctcttgagagatgacatgctgatgacgtgcataccaccaggggaaaatcaacgaaaactgaagtatgaaagtcaccgtcatatatgggatgagccctacctatatcgggtatgctccgatggcttactacgaagatgtgtgccaactgatgaaggacttaagattatagaacgatgccacgcctcaccctatggaggccattacggtgcattccgcacccaggccaaaatctggcaaagtggtttcttctggccgacaatgtacgaagactcaaaagaattcatcagaagatgcacaagctgccagaggcaaggaggaatcactgctcgcgatgcaatgccccttacatacaatttgcaagttgagatattcgatgtttggggtatagacttcatgggacctttccctaagtctcgtaactgcgagtacattctggtggcagtcgactatgtctccaagtgggttgaggctatgccgtgcagcgccgcggatgcgaggcacgccaagaagatgttcacagaaaccatcttcccaagatttggtacccgcagaatggtcataagcgaccgaggttttcacttcattgacaaaaccttcagagacctcctacgagaaatggaagccaaacacaacgtggccactccttaccatccacagaccagtggtcaagcagaaacatcgaacaaacaaatcaagaatattctgcaaaagacggtcaacaaaatgggaacagaatggaaggatagattgcaggacgcactgtgggcataccggacagcatacaagacacccattggaatgtccccatatcagatagtctatgggaagtcatgtcgactacccgtagaacttgagcatagagcatattgggccatcaggaattcgaacatggattttgagggagcaggagaatggagaaaaatgcagattgcagaacttgaggaatggagagaaatggcttaccacaacgcaaagatatataaagaaaggacgaagcgctggcatgacatgtcatag

SEQ ID NO: 82249 - DNA, 1167 bp, Oryza sativa
  Clone ID: PAT_MRT4530_81698C.1
atggagcaatctctttttgagctgtctgctcctcagggcgaattctatgagccaactccttcatcggagcccatttatacaactggctatgaaattcgtcccgagctaatcaccggaggtatcgtgtccaagattgaggaacctctaacgatcgagccactcgctgaaccatccacttatgctagctcgattgatgagaaggttcctgagcagccgtccgtcgagaatgaagaaattcagactccggattgtgccgcaattctgctcagggactgttttgatgaagactacggcaataccctgaactattttagcaagaggaaaccacccattcctttgtcacctcccgatcctatggaactcgggctcctacgagaaactgtccgggagttgacatccataatgagcgatgaatggctaagggaggcagagctttcatccgaattaagtggtaaggcagtgaccctgacaaacaaattttttaagcatccaaacggaaatatcattgaaggatttgggattgtacaagatgtgcctatctgctttgaagacagggaggcgatcttggatttccacatctttgaaatccaagactttgatatcctaattgggaccctctcctcgaaattaagtcagcggaagaggttaccgcagttcctcctcatgagtctcccgaagcccttctggaagatgaggtcccccgacttcatcaaggaagaagtagatcccggtgagactctcgacctggtgcttaattgggaaaagtgccatttcatggtccgtgaagggatagttcttggtcatcgggtgtccgaacgatgaatcgaagttgatcgtgctaaaattgatgttatagatcagcttcctcctcccttgaacatcaaaggaatccacagtttcttgggacatgtcggcttttatagaaggttcatcgaggacttttctacaatcacccgacctctgaccaatctgctcaccaaggatgtgccctttgagttcgatgacgctgtttacacccaaatttagcaccgcaggtatgtgggcggttagaccgtcagggtccgagtccgagtctgttttcgtcgggtctcgggttttcttgctcgggaaggcatgtttcgtgtttcctttggtttttatcccgagttggacatggagaagggccat

SEQ ID NO: 82250 - DNA, 336 bp, Oryza sativa
  Clone ID: PAT_MRT4530_81699C.1
atgacccaagaagctgtggattcctttgatgttcacaggaggaggaagctgatctataacatcgattttagcacgatcaacttcgattcctcgttcggacactcgatgcccaagaactatcccttcacggaccatgaaatagcatttttcccaattaagcaccaggtcgagagtctcaccggggtctgcttcttccttgatgaaatcggggacctcatcttccagaagggcctcaggagactcatgagggggaactgcgagaataccgacgtcgttcccttccagatggcaaggaatgattcggggagcggtatttatccgaattacttcggatga

SEQ ID NO: 82251 - DNA, 381 bp, Oryza sativa
  Clone ID: PAT_MRT4530_8169C.1
atggctccggcagcgcgcgcggacaagcctgcgaggggctggctggcagtgacggtcgaggtggacgagtcctccgctgtgtactacccccatggttggcttggcaactggtttggctgtgatgtcctctatcaaacgccattggaaagtgtgagtgaggcacatggccacatggagggcctaggcaattttctcacccacgagttgatcggggtgaggcacttactgcttccgaggggcggaggcgggttatatgtttcatccacggtgatcggcaaggcccctagcggccagggctcctacgacactgcagctggcctcaacctcatattcctctatcctaaagcgtggtggtcgacggtggctgatggctggccttga

SEQ ID NO: 82252 - DNA, 1359 bp, Oryza sativa
  Clone ID: PAT_MRT4530_816C.1
atgacgcgtcgcgctgatgatctcctggttgccggaacgctcgtcatctccatcgtcttcttcaggtgcgccgctgccgtggcagccaccgagtatgtccggcctccccccgggcgggtcatcttcactgagcacaccaagcccgcctcacatcctcaacaggttcatgtgtcgctcgtcggggcgaaccatatgagagtgtcatggatcacggaggacaagcacgtcaagtccgtggtggagtatggcaaggtctccgggaactacacggcgtcggccaccggcgagcacacatcctaccgctacttcctctactcctccggcaagatccaccacgtcaagatcggaccgctggatcccggcacggtgtactactaccggtgcggcatggccggcgacgagttcggcctcaggaccccgccggccgcgctcccagtcgagctcgccgtcgcgggggatcttgggcagaccgagtggacggcgtcgacgctgtcccacgtcggcaggtccgactacgacgtgctgctggttcccggcgacctgtcctacgccgacgcccagcagccgctgtgggactcgttcggccggttcgtgcagaagtacgcgagccggcggccatggatggtcaccgaagggaaccacgaggtggaggccgcgatggcgctcccgggctggccgcggccgttcacggcgtacgccgcgcggtggcggatgccgtacgaggagagcggctcggggaccagcctctactactccttcgacgccgccggcggcgccgtccacgtcgtcatgctcggctcgtacgccgacttcaactcgagctcggagcagtacaggtggctggcccgcgacctcgccgccgtcgaccgcggcgcgacgccctgggtcgtggtgctgctgcacgcgccctggtacaacacgaacgcggcgcacgagggggagggcgaggccatgaggaaggccatggagcgcctcctctacgaggcccgcgtcgacatcgtcttcgccggccatgtccacgcctacgaacgcttcacaagggtatataacaacgaggcgaacccgtgtggaccggtgcacatcaccataggcgacggcggcaacagggaaggcctcgcatttgactttcggaagaaccacaagctggcgccgctctcgttgatgagggaggcgagcttcgggcacgggcggctgagcgtggtgaacgcgaccgccgcgcgctggacgtggcaccgcaacgacgacgccgactccaccgtgcgcgacgagatctggctggagagcctggctgccaacggcgcgtgccagcagagtagcagcgccgccgccgccgcggactctcagaacgacgagttgtag

SEQ ID NO: 82253 - DNA, 3396 bp, Oryza sativa
  Clone ID: PAT_MRT4530_81700C.1
atggagcaacctctttttgagctatctgctcctcggggcgaattctatgagccacctccttcatcggagcccatttatacaactggctatgaaattcgtcccgaactaattagtatggagtctgcattctatctggacataaccgctggaagatcgttcatgcacaaaacgccgtcagaaggaagaacaattttggatcgcattctagaaaatacttccttcgtgacccaatccaatgaacccaagccgaaggcatccgtgtccaagatagaggaacctctaacgatcgagccactcgctgaaccatccacttatgctagctcgattgatgagaaggttcctgagcagccgtccatcgagaatgaagaaattcagactccggatcgtgctgcaatcctgtttagggacggctttgacggagactacggcaataccctgaacttttttagcaagaggaaaccactcattcctttgccacctactgatcctatggaagttaggttcctacgagaaactattcgggagttaacatccataatgagagatgaatggctaagggaggcagagctttcatccgaagtaattcggataaataccgctccccgaatcattccttgccatctggaagggaacgacgtcggtattctctacagtccaactgtcgaggataatctcgtttccgagtcttttgcattcgcttatttaagcgataaggcagtaaccccgacaaacaaattcttcaagcatccaaacggaaatatcgagggatttgagagtgtgcaagatgtgcctgcctgctttgatgacagggaggcgatctttgatttccacgtcttcgaaatccaagattttgacatcctaaacgggctgcccattgagcaacttctcatcaacacaccccgattaggtagcctcaaaataacactgggagagaatgaattttcaattccattcttgtgggttaccgcagttccccctcatgagtctcctgaggcccttctggaagatgaggtccccgatttcatcaaggaagaagcagaccccggtgagactctcgacctgccaatcatggaaccgccatctcgacccccgcttcagcttaaacctctacttctaggcctacgatatgctttcctacataatgacagagtggcccctgtcataatcagcgacaagctctctgaagacgagactcaacgtcttctcgccatgttggaaaagcatcattctgttcttggctactcgcttcaagatcttagggggattaatcccgcgctttgcacccatcgtatttctattggccccgagagtactccctctagggaagctcaacgacggctcaataatgcaatgaaacttaacaaggctacaaagaaggatcatttcccgctacccttcattgatgaaatattggaacgtctagcaaatcattcttttttctgtttccttgatgggtattccgggtatcatcaaattcctatccatccggaggaccaaaggatagttcttgggcatcgagtgtccgaacgaggaatcgaagttgatcgtgctaaaatcgatgttatagatcagcttcctcctcctgtgaacatcaaaggaatccacagcttcttgggtcatgccggcttttatagaaggttcatcaaggacttctctacaatcgccagacttctgaccaatttgctagccaaggatgcgccctttgagttcgatgacgcgtgcctaaaatctttcgaaattctcaaaaaggcactcatctctgctccaatcattcaacctcctgattggactctgcccttcgagattatgtatgatgcaagtgactttgctgttggtgcggtcttgggccaaaccaaggataaaaagcatcatgcaatctgttacgctagcaaaactctaaccggagctcagttgaattatgcaactaccgaaaaagagctacttgcggttgtttttgctatcgataagttcaggtcttacttagtaggagccaaagtgataatttatactgatcatgctgctttgaaatacctgctcactaagaaagatgctaaactacgtctcttaagatggattttgctgctccaggaatttgacttagaaattaaagataaaaagggagtagaaaattccgtagcagatcatttgtccgggctgcagatcactgacatgcaggaacaaccgataaatgatttcttgagagatgacatgctgatgacgattcacgactccaacccgtggtatgccaacatagtaaactatatggtatccaagtacataccaccaggggaaaatcaacgaaaactgaagtatgaaagtcgccgtcatatatgggatgagccatacctatatcgggtctgctccgatggcttactacaaagatactttatgggatctttccctaagtctcgcaactgcgagtacattctggtggcagtcgactatgtctccaagtgggttgaggctatgccgtgcagcgccgcagatgcgaggcatgccaggaagatgttcatagaaatcatcttcccaagatttggtacccctaggatggttataagtgacggaggttctcatttcattgacaaaaccttccgagacctcctacaagagatgggagccaaacacaatgtggccactccttaccatccacagaccagtggtcaagcagaaaaatcgaacaaacaaatcaagaatattctacagaagacgatagtctatggaaagtcatgtcgactgcatgtagaacttgagcacagagcatactgggccatcagaaactggaacatggattttgagggagcaggagaatggagaaaaatgcagattgctgaacttgaagaatggagagagaaggcctacaacaacgaaaagatatacaaagaaaggacgaagcgctggcatgacaaaagggtaaaaatcaagaaattcaagccaggagacaaagtactgatgttcaactccagggttaagctcttcagccacggaaaactgcacagcaaatgggaaggaccgttcgacgtcatcgacacctcttcgcacggggcaatcacactccgcgacgattcatgtaacatatttaagcctttgacggcatcggggaaggagggggcagcggaatcccgtagccctccacctatgaaggtgaagcgtcatttgacgcctcctccaattgtgagggctcccgaccaattccaagaagatgaggtgaaattgctggagccctcgatccataagctcgccgcgcaagtgaagaaactccgcaaggagaacatagagcttagggatcgccacgcggtgctaggggtagagcttgctgaaattagaaataatttcgatacccttagtcgcggtttgttcgctaaaatcaagcgtgcattcaaagagatggggaagtaa

SEQ ID NO: 82254 - DNA, 306 bp, Oryza sativa
  Clone ID: PAT_MRT4530_81701C.1
tcatccgagggataggtggcgtcggcaagcgggccccacctgtcgatgactcaaggtcttcggcctaccatggaccaagtccacggaggcacgggatgagtgcaccacgtggcgcacacgtggcgccgacggggcaccgacgtggcggccacgtgggcggaagcatggatggcccagatgtgccttggggcggatcggacggccaaagcggaagggggccggctcggcggccaggacgagcacgcggtggcacggcggtgacgcgacgggcccgaaggccactggcggtggtgcgggatgcgacat

SEQ ID NO: 82255 - DNA, 6021 bp, Oryza sativa
  Clone ID: PAT_MRT4530_81702C.1
agcataaaattgacgaagatgttcgatattccaagaattgtcgatggtagtaccatcttcacgcttgagtcggtaagaacctggccgagtgacttcggaaattatgaatggtccttcccacaagggagataacttgtgtcgatcccgtgtagtttttctcagaaccaggtcgccgactaaaaaggctcgtgattgaacattgcgattatgataacggcgcaacccttgcaagtaccgagccgactgaattaaagctgcttcgcgggcttcttccagtcgattgagatcatctactcagttatctccgtagcgctcttcgttgaagttacgaaaacgtaaagattcaaattccacctcattgggcaacatcgcttccgctccataaactagaaaaaacgtcgactggcccgtggcccgactgggagtggtgcacagggaccaaagtacagatggcagctgttctacccacttgccggcatagggatgcagtcggtcgaaaactcgcgcttttatcccttgaagtaccatgacattggcgcgttcaacttgtccattactcatgggatgcgctacggaggcgtaacaaatcttgatgccgaagtcttcacaaaagtctttaaatactccgccagtaaattgagtgtcgttaacagtgatgatccgattgggtaccccgaaccggtgcacaatattgatgaagaaatctctagccttgtctgccatgatagtgatgaccggtttagcttcaatccacttagaaaatttgtcaacagccacaaagaggtgagtataaccaccgactgcctttttaaatgggccgaccatgtcaagcccctaaaccgcaaatggcgaagacaacgggatggcctgcaactcttgagctggtagatgagtttgtcaggcgaaaaattgacaaccctcacatgtccgcacaattttatcggcgtcggccacagctgtgggccagaaaaaaccctgccgataagccttgccaacgatggttcgtgcggtagcgtgattaccacagatgcctgaatgtatatcttttagcaattgcctaccctcttccaaagacacacagcgttgcaggattcccgatggacttttcttgtacaacccggtctcatgaatgacatagagtctgctgtacctagagatccgctcggcttcatctttgtcttgagagagtttttgtttggtcaaaaatcttatgaggggctccctccagtcggcttcaatcatacttacgtcttgagtgtccgtggcttcaattgtttctttcctcggtacggttggttcgtaaagatgttcaacaaatacgtcggaaggagctgcttctcgttttgaaccaaaattagccagtctgttggctgcctcattattatgtcgaagaacatgggtgagttcaagtccgtcgaatttgtcttccaacttgcgtacctcctgtcggtaggcggtcatgttataatcaaggcaggaccactctttcatgacttgattaacaaccagctgagagtctccatgaactatcagacgccggattcccaaagaaatcacaatccttagtcacgttgtgagacacagaaaaatgtatccaaaatacgtagctcagtctttctccagtcggggaaattagaacaacccccgctccagtgtttgagagcctcttcgacccgttaaaatgcatggtccaatactccatcttcttctcaggcatgtcttcttggcactcagtccactcgtcgatgaagtcggctaaagcttgggacttgatcgaagttcgcggcttgaaagatatatccaaggacatcaattataaggcccactttgcgatccgcccatttgcttcgcgattatgacgtatatccccgagtggaaacgatgtgaccaccgtgaccgagtgaccttgaaagtagtgagatagtttcttgatagtaattaaaacaccatataatagcttttgaacctgaggatatcttgtcttggaattagccaaaacctcgctaacgaagtaaattagtcgttggactttttggacatggccttcttcttcacgctcaacaaccaggactgtgcttacaacctgggaagtcgccgacacatataacaacagcggctctcggatgtggtgaagctaggactggtggagtagtgagaagttgtttgaagtcttcaaaggctttttgtgcttcgggtccccactggaaattgtctgttttcttcaacagcttgaaaaagggcatcccccgctcgccgagtcgcgaaacaaaccagttgagcgccgccatgcaaccagtcagcttttgaacatctttctgggaacttggcggcttcatgttgaggatggcattgattttccccgggttggcttgtatgcctctatgagacaccataaatccaagcagcttccttgatggtactctgaagatgcacttttcagggtttagtttcatcctaaaagcgcggatgctcgcaaaggtttcttctagatacgtgatcaaatcatccttctgtttggtcttgacgactacatcatccacataagcttcaacattgcggctcatctgagttgaaaaacatctctggatcatgcattgataagttgctcctgcgttctttaatccaaagggcatggtgatgtagcagtaggccccgaagggcgtgatgaatgaagtctttaagcagtcggattctttcagtcggatctgatgatatcctgagtagcaatccaaaaaactgagtagctcgcagtcggccgttgagtcaactacctggtcaatgcgaggtaacccaaagggatctttggggcaagatttgttgaggtcggtgtaatcaacacacatgcgccattgtcccgtcttcttccgaactaagactgggttagccagccagtcgggatggagaacttccttgatgaagcctgctgctaacagcttggtcaattcctccttgatcgcatccttcctatcctgtgcgaagcggcggagtcgttgcttgattggtttagcgtcttccttaacatgtaaagagtgctcaatcacctctctaggaatactaggcatatcagattgttttcatgcaaagatatctttattattagcagtcttagtaggatcagagggatctagaggaattttcttggtcttggcgtcgctttttccactctttggcatcttggttgcaggcacttctccttcgcttgctgtggacgcagccagtcggatttcttctcgggcgatcgtgatctcgcgggtctaggccatctcacagctttccttgtcgcatgtgacggcttgtttgatgtcacttcgaagggatatgactcctcgaggaccaggcatcttcatcatcatgtaggtatagtgcgggacagccataaacttggctaacgccgggcgtctgagtatggcatgatacgctgtcttgaaatcagcaactttgaagcaaacattttctgtgcggaagttctcccgagtgccaaaagtaaccggaagagtgatctggccgagtggtgtagcggatagccctggaatgactccgtgaaagggcgcattactcggctttaattccgtgcgagggatctgcatgtcgtccagggttttggtgaaaaggatgttgagtgcactgccaccatcgatgagggatctgcgaagcttgacgttgcgaaccactaggtctagtaccagggggtaccgccccgggtagaccactcggtcaggatgatcggagcggtcaaacttcattgttgtctccgaccaccaaagaaattggggcgtatcgggctgagcagcgttgatctctcattcggtcagcttttgcttactcttagattcataagccaggggtccgccaaagatgtggttgagttccttgtgatggtcttgaaaaccagtcggggcatcatcgtcatcgtccttcttcttcgacgtgctttgatctccgtcggaggccttacgtgcgttcttggcgtattgttctgcaaactgtttgtagatgaaacaatcttttgccacatgattggaattgggatgatgcggacattgggagttcatgatcttgtcaaaagtgttgacacgcgaacgttgtcagaaggatggtgttgtagttgtcacaagttcctcgggcttacgcttgcgatccttgtgattggcacttccactcccttctgtagtcggcgtatctttctttggcttctaagtggtgcccgactgcttggacgcgataatggcatcttcggctttggcatactcgttggctttttcaaacatctgtttgaccgtcttgggaggcttgcgcccgaacttgccgactagatcttcgtgacgaattcccttggtgaaggcggcgatgataacgtcgtcggtaatgtcggagatcttgttgcgttgctcagaaaagcatcggatgtaatcccgaagggattctccagacttctgaatgacgttgtagagatcaaaatgtgtatcagggcgttcaaatgtgccctggaagttggcgatgaagtggtcacgaagctccgcccatgatccgattgtgccacggggtaacccatgaagccaggaccgggcagaattcggtagagccacaggcaagtagtttgccatggctttgttgtctcctcctgctacgtgaattgcgagaccgtagacggtgagccaggactctgggttagtggtgccgtcatacttctcgattccagtcggcttgaaaccggctggccaatccactctgggttagacagcgactccatccacatcgtcgtcgtgatccggtgaatggtgggggacgtagcctcgtgccgcgtggcactggttgattgtatcgcgaagatcgacggggcgcctgcgaggtggggagcgtggccgttcaactcggtgctccctgtgtcgttcgggaggcgagtggacagatcgcccgtcgtgacccctgctcctgcgattggatcctgcgccggcgatgctgaaggctcggctggtgatagtcttgagatcgaagatggggaactcggctgccagtcggcgtgcggacgcttgcggagttaaccgggaccgaggcaacgatcatggtcttggtcagggtcaagatgttgacgacgtgattagcttggttgagtgcgtcttccttgaggagggtgtcgaggagggtgatcgctgcaaccgcgttctattgaggggtgcgaaagaccgcagttccctcgacgtcttgctgcacgataagttctcgtgctcgtcgcccggcgtccaaggcccgttgtcgtcggtcctcagcctcctttgcagcccgttcgcgttcctgttgctcacgctgccgccgttctcgctcttgtgcttggcgctcctcttccagtcggcgtcgttcggcttcctgttgtacgcgtagctcttctgcttctcgggctttgcgctgttcccccgtctcgttgtcagccatgaagatgccgaagtagagaggcgtgtagttatcttcaaagcccttgtcgaagtcgtcgaggttgcggttgtcgtagcgatagccgaagttgtcgtactccacgatctctgttggtcgtgagtcgacgccgggggagctgaggtagccgtccagttgttccgtcgaaaccgtgccgagcggctggagtatgacgccgacttccctggagctaggccggaccggggctgaagccggatcccgcctaggcctatggggagaagacacccttgtggtgaagacagtagccaaatcatcggggagtttcatcaggattggcggataggcccaatcgtcttgatcgggtcgtgttgaagtagattggatctcgtccaagtggtttgaagccaactcggtagagttgatcttggggtagaccatggccgagttcgggatgccgaacggagcggagatctggcctcttcccgactggttcgaatccgagtcgaggagagaaatcttaccgaagtcgttggtaatgaagtcgaggctgccgaaacggaacgcctgcccgggagggaagacgaagtcgtcgatgccagaaatgaaacccat

SEQ ID NO: 82256 - DNA, 935 bp, Oryza sativa
  Clone ID: PAT_MRT4530_81703C.1
atggagccctccatctcgcgtcgacgacgtatcgacatcgctctcgtgtcgctgctgctgctcgccgccgccgccgccgccgtcgacgcggcgaccatcaccatggtgaaccgctgctcgtacacggtgtggccgggcgcgctcccgggcggcggcgcccggctcgacccggggcagtcgtggtcgatcagcgtcgccgccggcacaccggccgccaggatctggccgcgcaccggctgctccttcgacggcgccggccgcggccgctgcgccacgggcgactgcgccggcgcgctgtcctgcgccgtctccggcgagccgcccaccacgctggccgagtacacgctcggccgccccggcgccggcggcgacgacttcctcgacctgtcgctcatcgacgggttcaacgtgccggtgagcttccagccggcgaacggcggtggcgcccggtgcagcaaggggcgcgggccgagctgcgccgtggacatcacggcgaggtgcctccccgagctccgtgtccccggcggctgcgccagcgcgtgcggcaagttcggcggcgacacctactgctgccggggacggttcgagcacgtgtgcccgccgacgagctactccatgttcttcaaggggctctgccccgacgcctacagctacgccaaggacgaccagaccagcaccttcacctgccccgctggcaccaactaccgcgtcgacttctgcccgccgacgagcggcgtgacggccggtgacgaggacgacgagatcgcctctgcttaattaattaattaagcttatcggcttaattaatttcgtgtgccttgatcgatcactactagtacaataattgacatggcaacgcatgcactcgatgatctctcttcgataatttggatgaataaaattccatcgaattcccttttaaaaaaaaaaaaaaa

SEQ ID NO: 82257 - DNA, 3810 bp, Oryza sativa
  Clone ID: PAT_MRT4530_81704C.1
atggcacggggctccgctctgctcgacggtagcgtactaccgccttcccgcattgtgagtgagaggcaggctgggctgccgcgccgcttcatgccggaatccgccaccggccgggagatagtgatgctgggcgaggcgcgcccagcgccagattacccggggcggtccatcttcttcctccccttcgcaatggccgggttggttcctcctttttcttctttctttatggatgttctggagttctatgatctccagatggcgcacctcacccccaacgcagtgatgactttggccatcttcgcgcacctgtgcgagatgttcattggggtgcgcccatctcttcggctgttccggtggttcttcaccgtgcagtcggtgtcgccgccgtcggtggtcggcggctgctatttcctgccgcgggggccggtgttgaaccgctacatcccctgcgtcctccgcaaaaagtgggatgactggaagagcgactggttctacacccccctcgccgacgaagcgcatctccgacttccgagccagcccccggtgcaggcctccagctggcgggcgccggccgaggcccagtccggcggcccaggccgcccgccgcctcctctctcggggtcgccgacaggtggggcccacctgtcgggcccgtctccctcctcccgccgatcccggcgcgccgccgcgcccgcaaccgtcgccgcgcccacgtctccgccttccccggccctcgtcgaccacgcccgcgcgtgcgccgcgtcccccgcgcccacttccctctctctcccgctcgcgcccgcgcccgagatggccgggattcgaaaatcggatcccgcctctctctcctcccccactccccacgtcggccggcgattcccgccgctcccggccacgctcgccgccgtcttgcgccgtcgccgccgttcgattcgcgtggccgagatccaccccgtccacccctcctccgtcgaagttcgtcgccggagccctcatcctcttgcgcacggccgacgtacccaggcgagggtgggcgtgatggagttgggtcggccggggtgtccggttgatcggctgccggattcaccgcggcacgaaaggggggctgcccgttgcctgctggggacgggggcgaaccctaagaaattctggttcgtgaatttctgggcgcgacatctgggggatggctatgacgccgtcctcgaccgcctcgcgggcctgcgatcccaggggctcaccggggccatggtgtacggcgactacctccgtcgtcggattgcgccgctccagcggcgcgctcgggccgcctgggagtacatcgggcccgaagactatatgcggacccaccagggggtcagatgggattgggcccccgaggacttcaagatactgatccaacgggtgctaaatctcaactccgtggaggcgtccctcatccctcacggtatcctccccctctgcagcgacccagatcgcgtctccatcttgaccattatgacggcggtcggggcctcagaggagcaggctcctaagggccatggcggcgcaggtgggagccgccggggggatcaatctacccccggagggggtcgtgcttctgggccccgcgtcgggggctcggggagcaaccgccctaccgacgcccgggggaagaggaaactgggaggaatacctcccccatctcctccccgagggggcggggcggcgcgtgccagcagcaggcgcccggagggggccgcgccaacatcgcagcccgagggggagcgcaagaagaaacggctgcgcaagatgggggagacagaaccatcccagggaaacctaatttcccctccaaggtggtcatttaaccgaccccctcgcagcgatgtcccgtcgcgtccctcccgccatcccaagtccggccaatccgaggccgaagatccggcggccgcagaggaacggaggcgagaatctgaccggcgagaggccgcagatcgccttcgggaagctgaagaggccgcccgggaggccgctcgggttcggcaggcggaggataccgctcgggaggaggccgcccgggctcgccaagctgaagaagccgctcgggaggaggccgcccgggcttgtcaggctgaagaagccacccgggaggaaaccgcccgggctcgccaggcagaggcgatggcgtcttccgaggcggtttacgacaagaccgccggcgcgtcgctcgggcccactccctcgggtgacgctcaggcgacaacctccggggcggcttgcgacagggccgcgggcgcatcgcctgggcccgctccctcgggcgacgcccaggaccaaacgggtccgggggacatccccgagctcagtgcgtcttctggcgggccgagccgcgtcgcattttctccaaggcggctcttctcctcgtcttctgccaccccgctgagtgccgagccccttctgcaagccttggccgccgcaaacaccgcggtgctagatggattcagcgcccaggtggaggccttgcgagcggaacgagcggagctcgaggccgcatgggcgcgcgtcgaggaggggcggcgctcggtggacgccatggtggaggtgggccgtaaggcccaccgccgccacatctcggagcttgaagcccgcaaggcggcgctggcggagatcgcccgagaggtggaggaggagcgagaggccgccctcgtcgccaccaccgcgatgattgaggcgcaggactccctccgccttcaacacgggagctgggaggcggagctaaagaaaaagctcgacgccgcccagggggtcctcgacgccgccgctgcccgagagcagcgagcaacggaggctgaagcggcgtcccggcggcgcgaagaggcccttgaagcccgtgccatggcgctggaggatcatgccggcgccgtggagaccagcttggcggaccgcgaggccgccgccgctatccgggaggcgacgctggcggcgcacgaggccgcctgcgccgaagaggagtccgcgctccggctccgcgaggacgcgcttgctgagcgggagcgagctcttgaggagtccgaggccgcgacacaacggctggcggacagcctgtccctccgcgaggcagcgcaggaggagcaggcgcgccgcaatctggaatgcatccgcgccgagagagccgcgctggagcaacaggctgctaacctcgagacgcgagaaaaggagctggatgcgaggaagcgcagcggcggggcggctacgggcgaaagcgacttagtcgcccgcctcgcagctgccgaacacaacgtcgcggacatgcagcgcgccctggactcatccaccggggaagccgaggccctccgcttgtcgggtgagatagggcccggcatgctttgggatgcagtctcccggctggatcgcgccggtcgggaagcgggcctctggaaaggccagacaatttcgcgctccaccaatctggaaggcctcgccccgcaccttaggaggatggcctgggctgtccaacaactccccgaggagctcgagaagaccatcaagtcatcctcgagggacctcgcccaaggagcggtggaactcgtgttagcgagttaccaggccagggaccccggcttctccccatggatggcgctggaggagttccctcccgggaccgaggacgatgcgcgcgcgcgggtccgggatgccgccaaccacatcgtccaaagcttcgaggggtcggcccctcggctcgcgttcgcccccagctccgacgaggagggcgacgccagcggcgaggacgacggtggcgacgaggccagcgacccgggcgcattggaatga

SEQ ID NO: 82258 - DNA, 721 bp, Oryza sativa
  unsure (1)..(721): unsure at all n locations
  Clone ID: PAT_MRT4530_81705C.1
actggcacggggcacagatcgaggagataattagctcactccatggccgctgctcggtttcctctccttgtcctctgcctcctgccgatcatcgtctgcagcgtcgtggacgcggagctgacccatctccacttctacttccacgaggtcgacgccggcacgcccaacgccaccgtcgtcaacgtcgccagccttcaccggaactcgtcgacgttcggcgacgtgaacgtgttggacaacgcgctgcgggaggggccggacccggcgtcgcggctgatcgggagggcgcacggcctcgcggtgcacgcgtcgctggacgagacgggcggcctcacggccatcaacttcgtcttctccgactacggcgcgtacagcggcagcacgctggccacgcagggccacttcatcacgacgggcccgtcggagcggagcatcgtcggcggcacgggcaagctccggttcgcgcgcgggtacatgaccagcaagcttctcagctccacggacaccgccatcgtcgtcgtcttcgacatgtacttcaccctcgaccattgaatactactcncgtggtgtgttatatatcgtgcagtgtttgctttgggtgttcggttgaacatatgtatgcacggcgatcgtgacgaatactggggttcgggagaattcttttccgacccatcgtctcataggcccaatttcacactcctacgctgtactgacacactca

SEQ ID NO: 82259 - DNA, 3249 bp, Oryza sativa
  Clone ID: PAT_MRT4530_81706C.1
atggcacggggctccgctctgctcgatggtagcgtgctgccgccttcccgcatcgtgagcgagaggcaggctgggctgccgcgccgcttcatgccggaatctgccaccggccgggagatagtcacgctgggcgagggacgcccggcgccagactacccggggcggtccgtcttctttctcccctttgcaatggcagggctggttccgccattttcttctttcttcatggatgttctggagttctacgatctccagatggcgcacctcacccccaacgcggtgatgacattggccatcttcgcgcatctgtgcgagatgttcattggggtgcgcccatctcttcggctgttccggtggttcttcaccgtgcagtcggtgtcgccgccatcggtagttggtggctgctacttccagccacgggggccggtgctgaaccgctacatcccctgcgccctccgcaagaagtgggacgactggaagagcgactggttctacacccccctcgccgacgaagcgcgcctccgacttccgagccagcccccggcgcaggcctctagctggcgggcgccggtagatctgggggattgctatgacgccgtcctcgaccgcctggcgggcctgcgatcccaggggctcacaggggccatggtgtacggcgactacctccgtcgtcggattgcgccgctccagcggcacgctcggggcgcctgggagtacaccgggtccgaagacttcacgaggacccaccagggagtgagatgggactgggctcctgaggacttcaagatattggtccaacgggtgctgaatctcaactccgtggaggcgtccctcattccccaaggaatcctccccctctgcagcgatccagaccgcgcctccatcctgaccattatgatggcggtcggggcctcagaggagcgagctccaaagggccacaacggcgcaggcgggagccgcaggggggaacaatctaccccgggagggggtcgtgcttctgggtcccgcgacaggggcccggggagcagccgccctgccgacgcccgggggaagaggaagcagggaggaacacctcccccatctcctccccgagggggcggggcggtgcgtgccagcagcaggcgcccggagggggccgcgccgacatcgcagcccgagggggagcgcaagaagaaggggctccgcaagatgggggagacagaaccatctcggggaaatctcatttcccctccaaagtggtcgtttaaccgaccccctcgcagcgagatcccgtcgcatccctcccgccattccaagtccggccagtctgaggccgaggatccggcggccgcagaggcctgcaggcgggaatctgaccggcgagaggccgcggatcgcctacgggaagccgaggaggccgcccaggaggccgcccgggctcgccaggccgaggaaaccgctcgggaggaggccgcccgggcccgccaggccgaggaagccgctcgggaggaggccgcccgggcccgccaggccgaggaagccgttcgggaggaggccgcccgagcccgccaggccgaggaagccgctcgggagaaagccggatttcgccaggacgaggcgatggcgacttccgaggcagctcgcgacgaggccgcgggcgcgtcgcttgggcccactccctcgggcgacgctcaggcgacaacttccggggcagctggcgacgaggctgcgggcgcgtcgcttgggcccactccctcgggcgacgctcaggaccaaccgggtccgggggacatccccgagtccggcacttccatcggcggcccgagccgcgtggcatcctctccaaggcggctcttccccacgccttctatcgccccactgaacgcagagccccttctgcaggccttggccgccgcaaacaccacagtgttggatgggttaagtgcccaggtggaggccctgcaggcagagcgggcggagctcgacgccgcgtgggcgcgtgtcgaagaggggcgacgctcggtggaggccatggtggaggtgggccgtaaggctcaccgccggcacgtctcggagcttgaaacccgcaagaaggtgctggcggagatcgccaaggaagtggaggaggagcgggaggctgccctcattgccaccaccatgatgaacgaggcgcaggacaccctccgccttcaatacgggagctgggaggcggagctagggaagaagctcgacgccgcccagggggtgcttgacgctgccgctgcccgagaacagcgggcggcggagaccgaagcggcgtcccggcggcgcgaagaggcccttgaggcgcgcgccatggcgctggaagagcgcgcctgcgtcgtggagagggatctggcggaccgcgaggccgccgtcaccatccgtgaagcaacgctggcggcgcacgaggctgcctgcgccgaagaagagttcgcgctccgcctccgcgaggacgcgctcaccgagcgggagcgagctctcgagggggccgaggccgcggcgcaacagctggcggacagcctgtccctccgcgaggcagcgcaggaggagcaggcgcgccgtaatctggaaggtgcccgcgccgagagggccgcactgaaccaacgggccgctgagctcgaggcgcgggcgaaggagctagacgcgagggcgcgcagcggcggggcggccgcgggcgaaagcgacttagccgcccgcctcgcagctgccgaacgcaccatcgccgatctgcagggcgcgctagactcgtccgccggggaggtcgaagccctccgcttggcaggcgaggtagggcccggcatgctttgggacgccgtctcccgcctagattgcgccggtcggcaagtgggcctctggagagggcggaccgtaaagtacgccgccaaccagggaggcctcgcccagcgcctctcgaagatggccggggctctccaacggctccccgaggagctcgagaagacaattaagtcatccacgagggacctcgcccaaggagcggtggagctcgtcctggtgagttaccaggccagggaccccaatttctctccatggatggcgctggatgagttccctcctgggaccgaggacaacgcgcgcgcgcaggtccgggatgccgccgaccatatcgtcgacagcttcgagggctcggcccctcggctcgcgttcgcccccaactccgacgaggagggcaatgccggtggtgcagacgacagtgaccacggggccggcgacccgggcgcatcggattga

SEQ ID NO: 82260 - DNA, 3135 bp, Oryza sativa
  Clone ID: PAT_MRT4530_81707C.1
atggcacggggctccgcaccgctcgatggtagcgtgctgccgccttcccgtatcgtgagcgagaggcaggccgggctgccgcgccgattcatgccggaatctgccgccggccgggaggtggtcgcgctgggcgagggacgcccggcgccacactacccggggcggtccgtcttcttcctctctttcgcaatggcggggctggtcccgccattctctgcttttttcatggatattctggagttttacgatctccagatggcgcacctaacccccaacgcgataatgacgttagccatcttcgcacacctgtgcgagatgtttatcggggtgcgcccatctctccggctgttccggtggttcttcaccgtacagccggtgtcgccgccgacggtagttggtggctgctacttccagccgcgggggcaggtgctgaaccgctacattccctgcgttctccgcaagaagtgggacgactggaagagcgactggttctacacccccctcgccgacgaagcgcgcctccgacttccgagccagcccccgacgcaggcctccagctggcgggcgacggtagatctgggagacggctatgacaccgttcttgaccgcctggcgggtctgcgatcccaggggctcacgggggccatggtgttcggcgactaccttcgtcgccggatcgcgccgctccaacggcgctcccggggcgcctgggagtacaccgggcccgaggactacatgaggacccaccagggacgcaaatgggactgggtccctgaagacttcaagatggtggtccaacgggtgctgaatctcagctccgtggaggcatccctcatcccccaaggagtcctccccctctgctgcgatccggagcgcgccaacatcctgaccatcatgcaggcggtcggggcgtcgggggagcgggccccccgaggccacgatggcgcgggcgggagccgcaggggggaaccatctaccccgggagggggtcgtgtttctgggccccgcgacgggggcccggggggcagccgccctgccgacgcccgggggaagaggaagcaggagggtacccctcccccatctcctccccgagggggcggggcggtgcgtgccagcagcaggcgcccagagggtgccgtgccgacgctgcagcccgagggggagcggaagaagaagcggctccgcaagatgggggggaccgagccatgccgggggaatctcatctcgcccccgaggtggtcgtttagccgacctccccgcagcgagatcccgtcgcccccccccccccgccattccaagtccggccggtctgaggccgaggagacggcgaccgcggaggcccggaggcaggaagctgaccggcgagaagccgcggaccgcctccgggaagccgagaaggctgcccaggaggccgtccgggttcgccaggctgaggaggccgctcgggaggaggccagactccgccgggccggggagtccgtccgggaggcagaagcggcgcgcgcatgccaggcggcctgccaagcccccgacccgactccgcccgaggcgacgacgacttccgaggccacccacgacgaggtcgcgggcgcgccgctcgggcccgacccctcgggcgacgcttgggacgagccagcttcgggggacgcccccgagtccggcacgtcgatcggcgggccgagtcgcgcggcacccacaccgaggcggctctcccctctgccttccgctgccccagtgagcgcggagcccctcctgcaggccttggccgccgcgaacagcacggtgctggacgggttaagtgcccagatggaggtcctgcaggtagagcgggcggagctcgacgcggcatgggcgcgcgtcgaggaggggcggcgctcggtggaggccatggtggaggcgggccgcaaggcacaccgccggcacgcctcagagctcgaggcccgtcgtagggacctggcggagatcgctagggaggtggaggaggagcgggagactgccctcatcgccaccgccgtgctcgacgaggcgcgggacgacctccgcctccaatacgggagccgggcggcggagctagagaagaagctcgacgccgcccagggagtccttgacgccgccgctgcccgggaacggcgggcggcggagaacgaggcggcgtcccgacagcgcgaagaggccctcgaggctcgcgccacggcgctggaggagcgcgcccgcgccctggacgcgaaggagagagacctggcggacggtgaggccgccgtcgccacccgggaggcaacactggcggcgcacgaggccgcttgcgccgaagaggagtccgcactccgcctccgcgaggacgagctcaccgagcgggggcgagctctcgaggaggccgaggctacggcgcagcggctggcggacagcctgttcctccgcgaggcagcgcgggaggagcaggcgcgccgcaatctggaaggcgcccgcgccgagagggccgcactggatcagcgggccgctgagctcgaggcgcgggcgaaggagctggacgcgagggctcacagcggcggggcggccgcgggcgacggcgacctagccgcccgcctcacagccgccgagcacaccatcgccgggctgcatggcgcactggactcgtccgccggggaggtcgaggccctccgcttggcgagcgaggtagggcctggcatgcttcgggacgccgtctcccgtctagaccgcgccgggcggcaggcgggcctttggggcgggcggaccgcgaagtacgccgccaaccaggggggcctcgcccagcgcctctcagagatggccgggaccctccagcggctccccgaggagctcgaggagacgatcaagtcatcctcgagggacctcgcccggggggcggtggagctcgtactggcaagctaccaggccagggaccctgacttctccccgtgggcagcgctggacgagttccctcccggaaccgaggacggcgcgcgcgcgcaggtccgggacgccgccgaccacatcgtccacagcttcgagggtacggcccctcggctcgcgttcgccctcgactccgacgaggagggcggtgacgacggtgcggacgacagcgacgacgaggccggcgacccgggcgcgtcggagtga

SEQ ID NO: 82261 - DNA, 3970 bp, Oryza sativa
  Clone ID: PAT_MRT4530_81708C.1
atgagtttcgtttctggcatcaacgacttcgtcttccctcccgggcaggcgttccgattcggcagcctcgacttcaacaccaacgacttcggcaagatttctctcctcgactcggattcaaaccagtcgggaagagaccagatcttcgccccgttcggtatcccgaactcggccgaggtctaccccaagatcatatccaccgagttggcttcaaaccactcggacaagattcaatctacttcgacacgacccgatcaagacgatggggcctatccgccaatcctgataaaactccccgatgatttggctgatgtcttcaccacaagggcgtcttctccccgtaggcctaggcgggatcaggcttcagccccggcccgacctagctccagggaagtcggcgtcatattccagcctctcggcacggtttcgacggaacaactggacggctacctcagctcccccggcgtcgacttgcgaccaacggagatcgtggagtacgacaacttcggctaccgctacgactaccacaacctcgacgacttcgacgaaggctttgaagacaactacacgcctctctacttcggcattttcatggcagacaacgagacggaagaacagcgtaaagcccgagaagcagaagaactacgcgtacaacaggaagccgaacaacgccgacttgaagaggaacaccaagcacaagagcgagaacggctgcagcgtgagcaacaggaacgcgaacgggctgcaaaggaggctgaggaccggcgacaacgggccttggatgccgagcgacgagcacgagaacttatcgggcagcaagacgtcgagggaactgcggtttttcgcacccctcaacagaacgcggttgcagcgatcacccccctcaacaccctcctcaaggaaaacacactcaatcaagccaatcacgttatcaacatcatgaaccagaccaagaccatgatcgccgcctcggtcctgcgctgcgcgacaagaggctacgcccctcaccattcaccagatcgctacgacgacgacatggatggagtcgctgccttcacaagcgacctgcgtcgagtggattggccggccggcttcaagccgactggaatcgagaagtatgacggcactactaacccgaagtcttggctcaccgtctacggtctcgcaattcgcgcagcgggaggagacagcaaagccatggcaaactatttgcctatggccctagcggattctgcccggtcctggcttcacgggttaccccgtggcacaaccggatcatgggcggaacttcgcgaccacttcatcgccaacttccagggtacctttgaacgccctggtacacattttgatctctacaacgtcattcagaagtctggagaatcccttcgagattacatccgacatttttccgagcaacgcaacaagatctccgacattaccgacgacgtcaccatcgccgccttcaccaagggcattcgccacgaagacctagtcggcaagttcgggcgcaagcctcccaaaacggtcaaccagatgtttgaaaaagccaacgaggggagtggaagtaccaatcacaaggatcgcaagcgtaagcccgaggaacttgtggcaactactacaccatcctcccgacaacgttcgcgcgtcaacacttttgacaagatcatgaactcccaatgtccgcatcatcccaattccaatcacgcggccaaagattgcttcgtctacaaacagtttgcagaacaatacgccaagaacgcacacaagacctctgacggagatcaaagcacatcaaagaagaaggatgatgaagatgatgccccgactggttttcaagaccattgcaaggaactcaaccacatctttggcggacccctggcttatgaatccaagagaaagcaaaagctgaccgaacgggagatcaacgcttggtcagagacaacaattaagtttgaccgctcggatcatcctgaccgagtggtccacccggggtggtaccccctggtactagacccaatggtttgcaacgtcaagtttcgcagatccctcatcgatggtggtagtgcgctcaacatccttttcgccaagactctggacgacatgcagatccctcgcacggaattaaagccgagtaatgcgccctttcacggagtcatcccggggctatctgctacaccactcggtcagatcactcttccggttactttcggcactcaggaaaacttccgcacagaaaacgtttgtttcgaagttgctgatttcgagacagcgtatcatgccatactcggacgcccgacgttaaccaagttcatggccgtcccgcattatacctacatgatgatgaagatgccgggtcctcgaggagtcatatccctgcggagcgacatcaagcaagccgtcacatgtgacaaggaaagctgcgagatggcccagacccgtgaaatcacgctctcccgagaagaaatccaactagttgcatccacagcaagcgaaggagaagataggaaggatgcgatcaaggagaaattgaccaagctgttagcagcaggcttcatcaaggaagtccttcatcccgactggctggccaacccagtcctggttcggaagaagacggggcaatggcgcgtgtgtgtcgattataccgacctcaacaagtcttgtcctaaagatccctttgggttgcctcgcattgaccagatcggtcacaacattgaagcttatgtggatgacgtagtcgtcaagaccaagcagaataataattttattatggatctagaagagacctttgcaagcatccgtgttttcaggatgaaattaaaccctgaaaagtgcatcttcggagtaccgtcagggaagctgcttggatttattgtgtcccatagaggcatacaagccaactcggagaaaatcaatgccatcctcaacatgaaaccgccgagctcccagaaagatgttcaaaagttaaccggctgcatggcggcgctcagccggaaactatctcactacttccaaggtcactcggtcatggtggtcacatcgtttccactcggggatatacttcataatcgcgaagcgaacgggcggatcgcaaagtgggccttagagttgatgtctttgaatatatccttcaaaccgcgaacttcgatcaagtcccaagctttagccgacttcgtcgccgagtggactgagtgccaagaaaacacgcctgcagagaagatggagtattggactatgcattttgacgggtcaaaaaggctttcaggcactggagcaggagttgttctaatctccccgactggagagaggctgagctacgtattgtggatacatttttctgcgtctcacaacgtggcagaatacgaggcgcttcttcacagactaaggattgcaatctctttggggattcggcgtttgatagttcgtggagattctcagttggttgttaatcaagttatgaaagagtggtcctgccttgatgataacatgaccgcttaccgacaggaggtacgcaagttggaagacaaattcgatggacttgagctcactcatgttcttcgacacaacaatgaggcaaccgatagactggctaattttggttcaaaacgagaagcagctccttccgacgtgtttgttgaacatctctacgagccatccgtaccaaggaaagaaacaatcgaggccacggacactcaagacataagcatgattgaagtcgactggagagagcccctcataagatttttgacaaaacaagaactccctcaagataaagatgaagccgagaggatctccaggtgcagcagactttatgtcatacatgagaccgagctgtacaagaaaagtccatcaggaatcctgcaacgctgtgtgtctttagaggagggaagacaattgataaaggatatacattcaggcatctgtggcaatcacgctaccgcacgaaccatcgttggcaaggcttaccggcaag

SEQ ID NO: 82262 - DNA, 1080 bp, Oryza sativa
  Clone ID: PAT_MRT4530_81709C.1
atggtggagactagtacatcccttgtgaaattagagcaagatggcagcttgttcttgcctccaggcttcagattccatcccacagatgcggaggtaatcttgagctacctcctgcagaaattcctcaaccctagcttcacctccttgccaatcggcgaggtcgacctcaacaagtgcgagccatgggatctcccaagcaaggcgaagatgggggagaaagaatggtacttcttcagccacaaggacatgaaatacccgacggggatgcgaaccaaccgagccaccaaggagggatactggaaggccaccggcaaggacagggagatcttcaacctgcagcctaccagctatggaggcagcagcaacaacaagaataataagcagctggttgggatgaagaagacgcttgtgttctacatggggagagctcccaagggcaccaagaccaactgggtgatgcacgagttccgtctccacgccaacctccacaacgacaacccgaaccttcgtctcaacctcaaggatgagtgggttgtgtgcaaggtattccacaagaagggagacgatcgcgaagccatcaacaagcagcaggcacaggctgcagctgttgatcagtactctgccggaacacccaacaacggcagctccgtcgaagccggcgacgacgacgacgacttgttccagctcgactccatcatcgaccccagcatctacttcagcaactcatcagctgccaacatcttgtcggcgccgcccaacatgtccaattccgtcgtcgctgccaactacggtgcaagtacgacgacgactggtactgctagtgctggtagcttccagcagcagccaaactactgcagcttgatcaacaaaagcatcagcagcagcaatgtctcctcttggaataatatgcctccacctcctcctgtagctgaaggaggagtccatggaattggaagcagctacagcttgcagcaccaggcagcaatggtgaaagccctacgagatgtcattcgtctcccaaatcctcttggcatgccgcagtacaagttagatgatgcttatctatgggactcatcgtaa

SEQ ID NO: 82263 - DNA, 720 bp, Oryza sativa
  Clone ID: PAT_MRT4530_8170C.1
atggcgaaattgcccctggcgccatcttcctcccatggctcgcccatccacgacaggttcccaagagtgcctccgctggcggagtcgtcgtcctcatcatcgcggcgctggcgcctgcgcgacctcgtcggcgtcggcgtcggcggctgcaagggtgccagcaaccgttcaagtcgccggcctcgcgcgcggccacctcctgcccgtgctccgcgccgccacggccgccgccgtcgcgcgcggacacctcctgccacgcgctccgcgccgccgcggccgcggccgtcgcgggcctcgcgcgcggccgcctcttcggcgcgctccgcgccgtcgcggctgccgccgtcgcaggcctcgcgtgcggccaccatcgtcgtcgcaggcctcgcgcacagccgcctcctgcccacgctccgcgccgccgcggccgccgccatcgcaggcctcacgcgcggccgccgccatcgccagcctcgcgcgcggccgcctcctgcctcgccatcgcaggcctcgcgcgcggccgccgccgtcgccggcctcgcgcgcagccgcctcctctacgcgctccacgccgccgcggcctcctcctgcctcgccgtcgacaaccttgcgcggcggctgctcccagctaattttgtgatttcaggtggaggaagatggcgccaagggcaatctcgccatttcgaaaaattgctcacctcttttgaccaaaaattataa

SEQ ID NO: 82264 - DNA, 3054 bp, Oryza sativa
  Clone ID: PAT_MRT4530_81710C.1
atggcagggctggttccgccattttcttctttctttatggatgttctggagttctacgatctccagatggcgcaccttacccccaatgcggtgatgacattggccatcttcgcgcatctgtgcgagatgttcatcggggtgcgcccatctcttagactgttccggtggttcttcaccgtgcagtcagtgtcgccgccgtcggtggttggtggctgctacttccagccgcgggggccggtgtcaaaccgctacatcccctgcgccctccgcaagaagtgggacgactggaagagcgactggttctacacccccctcgccaacgaagcgcgcctccgacttccaagccagcccccggcgcaagcttccagctggcgggcgtcggtagatctgggggatggctatgacgccgtccttgatcgcctggcgggcctgcgatcccaggggctcactggggccatggtgtacggcgactacctccgtcgccggattgcgccgctccagcgacgcgcccggggcgcctgggagtactccgggtccgaagactacatgcggacccaccagggagccagatgggattgggctcctgaggacttcaagattgtagtccaacgggtgctgaatctcagctccgtggaagcatctctcattcctcaaggaatccttcccctctgcagcgatccagaccgcgcctccatcgtgaccattatgatgggggtcggggcctcagaggaggaggctcctcagggccacgacggcgcgggcgggagccgccggggggaacaatctaccccaggagggggtcgtgcttctgggccccgcgtcgggggctcggggagcagccgccctgccgacgcccgggggaagaggaagctgggaggaacacctcccccatctcctccccgagggggcggggcggcgcgtgccagcggcaggcgcccggagggggccgcgccaacatcgcagcccgagggggagcgcaagaagaagcggctccgcaagatgggggaaacagaaccatctcggggaaacctgatttcccctccaaggtggtcgtttaaccgaccccctcgcagcgatatcctgtcgcgttcctcctgccatcccaagtccggccagtccgaggccgaggatccggcggccgcagaggcgcggaggcgagaatctgaccggcgagaagccgcagatcgcctacgggaagctgaagaggccgcccgggaggccgctcgggctcgccaggcggaggataccgctcgggaggaggccgcccgggctcgccaagccgaagaagctgctaaggaggaggctgcccgggctcgccaggctgaggcgatggcgacttccgaggcagctctcgacaaggctgctgacgcgtcgcttgggcctactccctcgggcgacgctctggcgacggcctccgaggcggctcgcgacgaggccgcgggcgcatcacctgggcccactccctcgggcaacgctcaggcgacggcctccgaggcggctcgcgacgagtccgtgggtgcatcgcctgggcccacttccccgggcgacgcccaggaccaaacgggtccgggggacatccccgagcccagcgcgtcccccggcgggccgagccgcgtcgcattctctccaaggcggctcttctcctcgtcttctgtcgccccgctgagcgccgagccccttctgcaggccttggccgccgcaaacaccgcggtgctagatgggttcagcgcccaggtggaggccctgcaagcggaacgagcggagctcgaggccgcatgggcgcgtgtcgaggaggggcgacgctcggtggatgtcatggtggaggtgggccgtaaggctcaccgccgccacgtctcggagcttgaagcccgcaaaaaggcgctggcagagatcgcccgagaggtggaggaggagcgggaggccgccctgatcgccaccaccgtgatgatcgaggcgcaggacaccctccgccttcaacatgggagctgggaggcggagctaaagaaaaagctcgacgccgcccagggggtccttgacaccgccgccgcccgagagcgattggcaacggagatcgaagcggcgtcacggcgacgcgaggaggcccttgaggcccgtgccatggcgctggaagaacacgccggcgccgtggaaaggggcttggcggaccgcgaggctgccgctgctatccgggaggcaacgctggcggcacacgaggccgcctgcgccgaagaggagtccgccctccgcctccgcgaggacgcgctcaccgagcgggagcgagctctcgaggaggccgaggccgcggcgcaacggttggcggacagcctgtccctccgtgaggcagcgctggcggagcaggcgcgccgcaatctggaatgcgtccgcgccgagagagccgcactggagcagcgggctgctgacctcgaggcgcgggaaaaggagctggacgcgagggcgcgcatcagcggggcggctgcgggcgaaagcgacttagcagcccgcctcgcagctgccgaacacactgtcgccgacatgcagcgcgcgctagactcatccaccggggaaaccgaggccctccgcttggcgggcgagatagggcccgggatgctttgggatgcagcctcccgtctggatcgcgccggtcggcaggcgggcctctggaaaggccagacgatgaagtactccaccaacctgggaggcctcgctcagcacctctcaaagatggccggggctctccagcaactccccgaggagctcgagaagaccatcaagtcatcctcgagggacctcgcccaaggagcggtggaactcgtactagcgagttaccaggccagggaccccaacttctccccatggatggcgctggatgagttctctcccgggaccgaggacgacgcgcgcgcgcgggtccgggatgccgccgaccacatcgtccacagtttcgaggggtcggcccctcggctcgcgttcgcccccaactccgacgaggagggcgacgccagcggtgcagacgatcgtgacgacgaggccggcgacccgggcgcatcgggttga

SEQ ID NO: 82265 - DNA, 1191 bp, Oryza sativa
  Clone ID: PAT_MRT4530_81711C.1
atggtggagtctactacatcccttgtgaaattagagcaagatggaggcttgttcttgcctccaggcttcaggtttcacccgacggacgctgaggtaatcttaagctacctcctgcagaagttgctcaaccctagcttcacctccttgcccatcggcgaggtcgacctcaacaagtgcgagccatgggatcttccaagcaaggcgaagatgggggaaaaagaatggtacttcttcagccacaaggacatgaaatacccaactggcatgcgaaccaaccgggccaccaaggagggctactggaaggccaccggcaaggacagggagatcttcaggcagcctgcagctgttaatacaagcagctatggaggcagcagcaacaagaagaagcagctggttgggatgaagaagacgctggtgttctacatggggagggctcccaagggcaccaagaccaactgggtgatgcacgagttccgtctccacgccaacctccacaaccaccacccaaaccttcgtctgaatcccaaggacgaatgggttgtgtgcaaggtcttccacaagaagcagggagacgaagccatcaacaaccagcagcagcaaccacagtatgcagccgtggatcagtactctgccgaaacccccaacagcggcagctccgtcgttcaagccggcgacatcgacggcggcgatgacttctttcagctagacgacatcattgaccccagcatctacttcgtcagcaactcttccaacatcttgtcggcgccgcccaacaacaacaacgcggtttattccgtttctgcaagtacgacgacgactaatactactgccgttagcttccagcagcagccaaactactacagcttgatcaacaaaagcagcagcagcagcagcagcaactatagtgctcctctgcagcagcacgtctcttcttggaatattacgcctggagctggaggagcccatggaattggaagcagctactacaacttgcagcagcagcaggcagcaatggtgaaagccctagaaaatgtcattgctgtcccgaattttggtactctactgccgagcagcaacaagctgaagggtttatcgaagtcggcgatggctgggcttacgcagcagaatccccttggcgtgccgcagtacaagatagagaattatggggatcattacatatcacgacagtaa

SEQ ID NO: 82266 - DNA, 3216 bp, Oryza sativa
  Clone ID: PAT_MRT4530_81712C.1
atggcacggggctccgcactgcttgatggtagcgtgctgccgccttcccgcatcacgagcgagaagcaggctgggttgccgcgccgcttcatgccggagtctgccaccggccgtgagatagtcatgctgggcgagggacgcccggcgccagactacccggggcggtccgtcttctttctcccctttgcaatggctgggctggttccgccattttcttctttcttcatggatgtcctggagttctacgatctccagatggcgcaccttacccccaacgcagtgatgacattggccatcttcgcacatctgtgcgagatgttcattggggtgcgcccatctcttcggctgttccggtggttcttcaccgtgcagtcggtgtcgccgccgtcggtggttggcggctgctacttcctgccgcgggggccggtgttgaaccgctacattccctgcgtcctccgcaagaagtgggatgactggaagagcgactggttctacacccccctcgccgacgaagcgcgcctccgacttccgagtcagcccccggcgcaagcctccagctggcgggcgccggtagatttgggggatggctatgacgccgtcctcgaccgcctcgcgggcctgcgatcccaggggctcacaggggccatggtgtacggcgactacctccgtcgtcggattgcgccgctccagcggcgcgctcggggcgcctgggagtacaccgggtccgaagactacattcggacccaccagggagtcagatgggattgggctcctgaggacttcaagatattggtccaacgggtgctgaatctcaactccgtggaggcgtccctcatcccccacggaatcctccccctctgcagcgatccagaccgcgcctccatcttgaccattatggcggcggtcggggcctcagaggagcaggctcctaagggccacgacggcgcaggcgggagccgcaagggggatcaatctacccccggagggggtcgtgcttctgggccccgcgtcgggggctcggggagcaaccgccctaccgacgcccgggggaagaggaagctgggaggaacacctcccccatctcctccccgagggggcggggcggtgcgtgccagcagcaggcgcccggagggggccgcgccaacatcgcagcccgagggggagcgcaagaagaagcggctgcgcaagatgggggagacagaaccatcccggggaaacctgatttcccctccaaagtggtcatttaaccgaccccctcgcagagatatcccatcgcgttcctcccaccatcccaagtccggccagtccgaggccgaagatccggcggccgcagaggcacggaggcgggaatctgaccggcgagaggccgcagaccgcctacgggaagctgaagaggccgcccgggaggccgctcgggctcgccaggctgaggataccgctcgggaggaggccgcccgggctcgccaagccgaggataccgctcgggaggaggccgcccgagctcgccaagccgaagaagccgctcgggaggaggccgcctgggttcgccaggctgaggcgacggcgacttccgaggcagttcgcgacgaggccgcgggcgcctcgcttgggcccaccccttcgggcgatgcccaggacgaaacaggtccgggggtggctcgcgacgatgccgcgggcgcgtcgcttgggcccactccttcgggcgatgcccaggaccaaacaggtccgggggtggcccgcgatgaggccggcgcgtccattggcgggccgagccgcgcggcgtcttcttcaaggcagctcttccccacgccttccgtcgccccgctgagcgcagagccccttctgcaggccttagccgccgcaaacaccgcggtgttggatgggttaaatgcccaggtggaggccctgcaggcggagcgtgcggagctcgacgccgcatgggcgcgtgtcgaggaagggcggcactcggtggaggccatggtggaagcgggccgcaaggcacaccgccggcacgtctctgatcttgaggcccgtaagacggcgctggcggagatcgctcgagaggtggaggaggagcggggggctgccctcatcgccaccacggtgatgaacgaggcgcaggacaccctccgccttcaacacgggaactgggaggcggagctaaagaaaaagctcgacgccgcccagggggtccttgatgccgccgccgcccgagagcagcgagcaacggaggccgaagcggcgctccggcggcgtgaggaggccctcgaggcgcgcgccatggcgctggaagagcgcgcctgcgtcgcgaagaaggacctggcagaccacgaggccgccgtcgcctcccgggagacaacgctggcggcgcacgagtctgcctgcgccgaagaggagtccgcactccgcctccgcgaggacgctctttccgagcgggagcgggctctcgaagaggccgaggccgaggcgcaacggttggcggacagcctgtccctccgtgaggcggcactgacggagcaggcgcgccgcaatttggaatccgtccgcaccgagagggccgcgctggaccagcgggccgccgacctcgaggcgcgggaaaaggagctggacgcgagggcgcgcatcggcggggcggctgcgggcgaaagcgacttagccgcccgcctcgcagatgccgaacacaccgtcgccgacatgcagcgcgcgctagactcatccgccggggaagccgaggccctccgtttggcgggcgagatagggcccggcatgctctgggatgcagtctcccgtcttgatcgcgccggtcggcaggcgggcctctggaaagggcagacaataaagcctgccgccaacctgggaggccttgcccagcgcctctcgaagatggccggggctctccagcagctccccgaggaactcgagaagaccatcaagtcatcctcgagggacctcgcccaaggagcggtggagctcgtcctggcgagctatcaggccagggaccccaacttctctctgtggatggcgctggacgagttcccacctgggactgaagacagcgcgcgcgcacaagtccgggatgccgccgaccacatcgtccacagcttcgagggctcggcccctcggcttgcgttcgcccccaactccgacgaggagggcgatgccagcggtgcagacgacgtggaagacgaggccggcgacccaggcgcatcggattga

SEQ ID NO: 82267 - DNA, 441 bp, Oryza sativa
  Clone ID: PAT_MRT4530_81713C.1
atgccaaggcagtggtccgcgacgagccggggagctatggccgagagcagcgacgggcggcgacgcctctccgcccctcgcctcctctcccctgccatggggctgcgggagggctcgaccgtggcgggcggtggcagcaggcgacggcgccctcccggcaggaggggagggggcgaacaagggcggtgcccttccctccgccggatccagcgggaggggaggcggcggcagcccgtcggcgtcccagcggcggtggcgccctcccctccgttggatccagcgggaggggagccggcggcggcccggcgtacctgcgacggcggcaccctccccttcgatctagctgtgtgggaatttttggataaaatttgtgtgtatatgcttcagtttttctaaaaaaagattctatttgtctgatttccagggggatttagggagggg

SEQ ID NO: 82268 - DNA, 3036 bp, Oryza sativa
  Clone ID: PAT_MRT4530_81714C.1
atggcacggggctccgcaccgctcgacggtagcgtgctgccgccttctcgcatcgtgagcgagaggcaggccgggctgccgcgccgattcatgccggaatctgccaccggccgggaggtggtcgcgctgggtgagggacgcccggcgccacactacccggggcggtccgtattcttcctttcctttgcaatggcagggctggtcccgccattctcttctttcttcatggatgttctggaactttatgatctccagatggcgcacctcacccccaacgcggtaatgacgttggccatcttcgcgcacctgtgcgagatgttcatcggggtgcgcccatctctccggctgttccggtggttcttcaccgtacagccggtgtcgccaccgtcggtagtcggtggctgctacttccagccgcgggggccggtgctgaaccgctacattccctgcgtccttcgcaagaagtgggacgactggaagagcgactggttctacacccctctcgccgacgaagtgcgcctccgacttccgagccagccccaggcgcaggcctccagctggcgggcgccggtagatctgggagacggctacgacgccgttcttgaccgcctggctggtctgcgatcccaggggctcacgggggccatggtgtacggcgattaccttcgtcgccggatcgcgccgctccagcggcgcgcccggggcgcctgggagtacaccgggtccgaggactacatgaggacccaccagggggtcaaatgggactgggtccctgaagacttcaagatggtgatccaacgggtgctgaatctcagctccgtggaggcatccctcatcccccaaggtgtcctccccctctgcagcgatccagagcgcgccaacatcctgaccatcatgcaggcggtcggggcgtcaggggagcgggctcctcgaggccacgatggcgcgggcaggagccgcaggggggaacaatctaccccgggagggggtcgtgcttctgggccccgtgacgggggcccggggggcagccgccctgccgacgcccgggggaagaggaaacaggaggataccccctccccatctcctccccgagggggcggggcggtgcgtgccagcagcaggcgcccggagggtgctgtgccgacgtcgcagcccgagggggagcgaaaaaagaagcgggtccgcaagataggggggaccgaaccaagccggggaaacctcatctcccccccaaggtggtcgtttatccgacctcctcgcagcgagatcccgtcgcgcccttcccgccattccaaatccggccggtctgaggccgaggagacggcgatcgcggaggcccggaggcgggaagctgaccggcgagaagccgcagaccgcctccgggaagccgaagaagctgcccaggaggccgtccgggctcgccaggctgaggaagccgcttgggaggaggccagactccgccgggccgaggagtctgtccgggagacggaggcggcgcgcgcacgccgggcagcctgccaagcccccgacccgactccgcccgaggcgacaacgacttccgaggcaacccacgacgaggccgcgggcgcgccgctcgggcccgacccctctggcgacgttcgggacgagcccgcttcgggggacgcccccgagttcggcacgtcgatcggcgggctgagccgcgcggcgcccacaccgaggcggctctcccctctgccttccgctgccccactgagcgcagagcctcttctgcaggccttggccgctgcgaacaccacggtgttggacgggttaagcgcccagatggaggtcctgcaggcagagcgggcggaggtcgatgcggcgtgggcgcgcgttgaagaggggcggcgctcggtggaagccatggtggaggcgggccgcaaggcacaccgccggcacgcctcagagctcgaggcccgtcgtagggacctggcggagatcgccaggggggtggaggaggagcgggagactgccctcatcgccaccgccgtgttcaacgcggcgcgggacgacctctgcctccaatacgggagccgggcggcggagctagagaagaagctcgacgcgtcccggcagcgcgaagaggcccttgaggctcacgccacagtgctggaggagcgcgcccacgccctggacacgaaggagagggaactggcgggtcgcgaggccgccgtcgccatccgggaggcaacgctggcggcgcacgaggccgcctgcgccgaagaggagtccgcactctgcctccgcgaggacgagctcactgagcgggagcgagctctcgaggaggccgaggccgcggcgcagcggcgggaggagcaggcgcgcctcaatgtggaagacgcccgcgccgagagggccgcactagatcagcgggccgctgaattcgagacgcgggcgaaggagctggacgcgagagcgcgcagcggcagggcggccgcgggcgacggcgacctagccgcccgcctcgcagccgccgaacacaccatcgccgagctgcagggcgcgctggactcgtccgccggggaggtcgaagccctccgcttggcgggcgaggtagggcccggcatgcttcgggacgccgtctcccgtctagaccgtgccgggcggcaggcgggcctctggggcgagcggaccgcgaaatacgtcgccaaccaggggggcctcgcccagtgcctctcagagatggccgggaccctccagcggctccccgaggagcttgaggaggcgatcaagtcatcctcgagggacctcgcccggggggcggcggagctcgtactggcaagctaccaggccagggaccctgacttctccccgtgggcagcgctggaagagttccctcccagaaccgaggatggcgcacgtgcgagggtccgggacgccgccgaccacatcgtccacagcttcgagggtacggcccctcgactcgcgttcgcgctcgactccgacgaggagggcggtgacgacggcgcggacgacagcgacgacgaggccgacggcccgggggcgtcggagtga

SEQ ID NO: 82269 - DNA, 109 bp, Oryza sativa
  Clone ID: PAT_MRT4530_81715C.1
agtgataaatgatcgccaccgatactggttaaagcaatagccactgtatgggcgcttcttacggccgctaagacaggggttgagaatgtataggaacgattaaagactg

SEQ ID NO: 82270 - DNA, 3132 bp, Oryza sativa
  Clone ID: PAT_MRT4530_81716C.1
atggcacggggctctgctctgctcgacggcagtgtactgccgccttcccgcatcgtgaacgagaggcacgccggactgccgcgccgcttcatgccggagtccgccaccggtcgggagatagtgatgctgggcgaggggcgcccggcaccagactacccggggcggtccatcttcttcctccccttcgcaatggctgggctggtcccgccattttcccatttcttcatggatgtcctggagttctacgatctccagatggcgcacctcacccccaatgcggtgatgaccttggccatcttcgcacacttgtgcgagatgttcattggggtgcgcccctctcttcagctattccggtggttcttcaccgtgcagtcggtgtcaccgccgtcggtggttggcggctgctacttccagccgcgggggccggtgctgaaccgctacatcccctgcgtcctccgcaagaagtgggacgactggaagagcgactggttctacacccccctcgccgacgaagtgcgcctccgccttccaagccagcccccggcgcaggtctccagctggcgggcgccggtagatctgggggaggagtacgacgccgtcctcgaccgcctggcgggcctgcgatcccaggggctcaccggggccatggtgtacggtgattacctccgtcgccggattgcgccgctccaacggcgtgcccggagcgcctgggagtataccgggcctgaagactacatgcggacccaccaaggagccagatgggattgggctcctgaggacttcaagatcgtagtccaaagggtgctgaatcttagctccgcggaggcgtctcgtcttcctctggagatcctccccctctgcatagatcccgaccgcgtctccattctaaccattatgttgggggtcggggcctcagaggagagagcccctaagggccacgacggcgcgggcgagcgccgccggggggatcaacctgccccaggagggggtcgtgcttctgggccccgcgtcgggggctcggggagcagccgccctgccgacgcccaggggaagaggaagctgggaagtacacctcccccatctcctccccgagggggcggggcggcgcgtgccagcagtcggcgcccggagggggccgcgccgacgtcgcagcccgagggggtgcgcaagaagaagcggctccgcaagatgggggagacggaaccagcccggggaaacctaatttcccccccaaggtggtcattcaaccgaccccctcgcagcgatgtcccgtcgcattcctcccgccaccccaagtccggccagtccgaggccgaagatccagcggccgcagaggagcggaggcgagagtctgaccggcgtgaagccgcagcccgccttcgggaagctgaagaggccgcccgggaggccgcccgggttcgccaagcggaggaagctgctcgggaggaggccgcccgggcccgccaagccgaagaagctgcccgagaggaggccgcccgggctcgccaggctgaggcgacagcgtcacttggggccactccctcgggcggccctcaggcgacatcctccgaggcggctcgcgacgaggccgcgggcgcatcgcctgggcctacctcaccgggcgacgcccaggaccaatcgggcccgggggacatccctgagcccagcgcatcctccggggggccaagccgcgtcgccttttctccaaggcggcttttctcctcctcttccgtcgccccggtgagcgccgagcccattatgcaggccttggccgccgcaaacaccgcggtgctagatggattcagcgcccaggtggaggccttgcgagcggaacgagcggagctcgaggccgcatgggcgcgcgtcgaggaggggcggcgctcggtggacgccatggtggaggtgggccgtaaggcccaccgccgccacatctcggagctcgaagcccgcaaggcggcgctggcggagatcgcccgagaggtggaggaggagcgagaggccgccctcgtcgccaccaccgcgatggtcgaggcgcaagacaccctccgtcttcagcacgcaagctgggaggcggagctgaagagcaaactcgacgccgcccaaggggttctcgactccgccgctgcccgagagcggcgggcaacggaagccgaagcggcgtcccggcggcgcgaggaggcccttgaggcccgtgccatggcgctggaagaacatgccggcgccgtggagaggggcttgacggaccgcgaggccgccactgctctccgggaggcgacgctggcggcgcacgaggccgcctgcgccgaggaggagtccgcgctccgccttcgcgaggatgcactcgctgagcgggagcgagttctcgaggaggccgaggccacgacgcaacggctggcggacagcctctccctccgcgaggcggcgcaagaggagcaggcgcgccgcaaccttgaatgcgtccgtgccgagagagccgcgctggagcagcgggctgccaacctcgaggcacgggagaaagagctggccgtgagggcgcgcatcggtggggcggcttcgggcgaaagcgacttagccgcccgcctcgcggctgccgaacacaccgtcgctgacatgcagcgcgcactggattcttccatcggggaggccgaggccctccgcttggcgggcgagatggggcccgacatgctttgggactcggtctcccgcatggatcgcgccggtcggcaagcgggcctctggaaaggccagacgaggacgcgccctagcaacctggaaggcctcgctccgcacctcaacaggatggcctgggtcctcgaacgactccccgaggagctcgagaagaccatcaaggcatcctcgagggacctcgcccggggggcggtcgaactcgtgctggcgagttaccaggcccgggaccccaacttctctccatggatggcgctggaggagttccctcccgggaccgaggatgacgcgcgcgcgcgggtcggggatgctgccgaccacatcgtcaacggcttcgagggctcggcccctcggctcgcgttcgcccccagctccgacgaggagggcgacgccagcggcgaggacgacggtggcgatgaggccagcgacccgggtgcatttgaatga

SEQ ID NO: 82271 - DNA, 5920 bp, Oryza sativa
  Clone ID: PAT_MRT4530_81717C.1
atgggtttcgtttccggcatcgacgacttcatcttccctcctgggcaggcgtttcgtttcggcagcctcgacttcatcaccaacgacttcggcaagatttctctcctcaactcggattcgaaccagtcgggaagaggccagatctccgctccgttcggtatcccgaactcgcccgagatctaccccaagatcatctctaccgagttgacttcaaaccacttggacgagatccaatctacttcaaaatgacccgatcaagacaatggggcctatccgccaatcctgatgaaactccccgatgatttggctgctgtcttcaccacaagggcgtcttctccccgtaggcctaggcgggatccggcttcagccccggttcggcctagctccagggaagtcggcgtcatactccagccactcggcacggtttcgacgaaacaactggacggctacctcagctcccccggcgtcgactcgcgaccaacggagatcgtggagtacgacgacttcggctaccgctatgactaccgcaacctcaacgacttcgacgaaggctttgaagacaactacacgcctctctacttcggcatcttcatggctgacaacgagatggaagaatagcgcaaagcccgagaaacagaagagctacgcgtacaacaggaagccgaacgacaccgactagaagaggagcgccaagcacaagagcgagaacggctgcagcgtgaacaacaggaacgcgaacgggctgcaaaggaggctgaggaccgacgacaacgggccttggacgccgggcgacgagcacgagagcttatcgggcagcaagacgtcgagggaactgcggtttttcgcacccctcaacagaacgcggttgcagcgatcaccctcctcgacaccctcctcaaggaagacacactcaatcaagctaatcacgtcgtcaacatcttgaaccagaccaagaccatgatcgccgcctcggtcccggttaactctgcaagcgtctgcacgctgactggcagccgagttcctcatcttcgatctcaagactatcaccaaccgagcctcagcgtcgccggcacgggatccagtcgcaggagcaggggtcacgacgagcgatctgtccattcacctcccgaacggcacagggagcaccgagttgaacggcgacgctacccacctcgcaggcgccccgtcgatcttcacgatactatcaaccagcgtcgcgcggcacaaggctacgcaccattcaccaaatcgctacgacgacgacgtggatggagtcggtgcctttacaagtgacctgtgtcgagtggattggccagccggcttcaagccgactagaatcgagaagtatgacggcaccactaatccagagtcttggctcaccgtctacggtctcgcaattcgcgcagcaggaggagacaacaaagccatggcaaactacttgcctgtggctctagcggattctgcccagtcctggcttcatgggttaccccgtggcacaatcggatcatgggcggaacttcgtgaccacttcatcgccaacttccaaggcacctttgaacgccctggtacacattttgatctctacaacgtcattcagaagtctggagaatcccttcgagattacatccgacgcttttctgagcaacgtaacaagatctccgacattaccgacgacgtcatcatcgctgccttcaccaagggaattcgtcacgaagacctagtcagcaagttcgggcgcaagcctcccaagacggtcaagcagatgttcgaaaaagccaatgagtatgccaaagccgaagatgccattatcgcgtccaagcagtcgggcaccacttggaagtcgaagaaagatacgccgactacaggagggagtggaagtgctaatcacaaggatcgcaagcgtaagcccgaggaacttgtggcaactacaacactatcctcccgacaacgttcgcgcgtcaacacttttgacaagatcatcaactcccaatgtccgcatcatcccaattctaatcacgcggccaaagattgcttcgtctacaaacagtttgcagaacaatacaccaagaacgcacgtaaggcctccgacggagatcaaagcatgtcaaagaagaaggatgatgacgatgatgtcccgactggttttcaagaccatcgcaaggaactcaaccacatctttggcagacccctagcttatgaatctaagagaaagcaaaagctgaccgaacgggagattaacactgttcagcccgatacgccccaatatcttcggtggtcggagacaacaattaagtttgaccactcggatcatcctgaccgagtggtccacccggggcggtaccccctggtattagacccagtggttcgcaacgtcgagctttgcagatccctcatcgatggtggcagtgcactcaacatccttttcgccaaaaccctagacgacatgcagatccctcgcacggaattaatgccgagtaatgcgccctttcacggagtcattccagggctatctgccacaccactcggccagatcactcttctggttactttcggcactcgggagaacttccacacagaaaacgtctgcttcgaagttgctgatttcgagacagcgtatcatgccatactcggacgcccggcgttagccaagtttattgccgtcccgcgctatacctacatgatgatgaagttgcctggtcctcgaggagttatatccctgcggagcgacatcaagcaagccgtcacatgcgacaaggaaagctgcgagatggcccagacccgcgagatcacgctcgcccgagaagaaattcgactggctgcgtccacagcaagcgcgctcatcacctttcttcaaaataataaagatatctttgcgtggaaaccatccgatatgcctggtattcctagagaggtgattgagcactttttacatgttaaggaagacgctaaaccaatcaagcaacaactccgccgttttgcgcaggataggaaggatgcgatcaaggaggaactggccaagctgttagcagcaggcttcatcaaggaagtccttcatcccgactggctggccaacccagtcctagttcagaagaagacgggacaatggcgcatgtgtgttgattacaccgacctcaacaagtcatgccccaaagatccctttgggttgcctcgcattgactagatccgactaaaggaatctaactgcttaaagacttcattcatcacacccttcggggcctactgctacatcaccatgccttttggattaaagaacgcaggagcaacctatcaacgcatgatccagagatgtttttcaactcagatcggccgcaacgttgaagcttatgtggatgatgtagtagtcaagaccaagcagaaggatgatttgattatggatctagaagagacctttccgagcatccgcgctttcaggatgaaactaaaccctgaaaagtgcatcttcggagtactatcatggaagctgcttggatttatggtgtcccatagaggcatacaagccaacctggagaaaatcactgccatcctcaacatgaaactgccgagctcccagaaagacgttcaaaagctgactggttgcatggcagtgctcagccggtttgtttcgcgactcggtgagccggggatgcccttttctaagctgttgaagaaaacagacaatttccagtggggacccaaagcacaaaaagcctttgaagacttcaaaaaacttctcactactccaccagtcctagcttcaccacatccacaagagccgctgttgttatacgtgtcggcaactttacaggttgtaagcacagtcctgattgttgagcgtgaagaagaaggacatgttcaaaaagtccaacgaccaatctacttcgtttgcgaggttttggctgactccaagacaagatatcctcaggttcaaaagctattatatgatgttttaattatcgtcaggaaactatctcactacttccaaggtcactcggccacagtggtcacatcgtttccactcggggatatacttcataatcgcgaagcaaatgggcggatcgcaaagtgggccttagaattgatgtccttggatatatctttcaagccgcgaacttcgatcaagtcccaagctttagccgacttcgtcgctgagtggactgagtgccaagaagacatgcccaaggagaagatagagtattggactatgcattttgacgggtcgaagaggctcttaggcactggagcgggggttgttctaatttccctgaatggagaaagactgagctacgtattgtggatatatttttttgcatctcacaacatggcagaatacgaggcgcttcttcacggactaaggattgcgatctctttaggaatccgacgcctgatagttcgtggagattctcagttggttgttaatcaagtcatgaaagagtggtcctgccttgatgataacatgaccgcttaccggcaggaggtacgcaagttggaagacaaattcgatggacttgagctcatccatgttcttcgacataataatgaggcagacgacagactggctaattttggttcaaaatgagaaacagctccttccgacgtatttgttgaacatctttacgaaccaaccgtaccaaggaaataaacaattaaagccatggacactcaagacgtaagcatgattgaagccgactggagagagcccctcataagatttttgaccaaacaagaactccctcaagacaaggatgaagccgagcggatctccaggcgcagtagactctatgtcattcatgagaccgagttgtacaagaaaagtccatcaggaatcttgcaacgctgcatgtctttggaggagggaaggcaattgttaaaagatatacattcaggcatctgtggtaatcacgctgctgcacgaaccatcgttggcaaggcttatcggtagggttttttctagcccacagctgtgtccgacgttgacaaaattgtgcgaacatgtgaggattgtcaatttttcgcccgacaaactcatctaccagctcaggagttgcaaaccatcccgttgtcttggccgtttgcggtttgggggcttgacatggtcggcccgtttaaaaaggcagtcggtggttatactcacctctttgtggctgttgacaaattttccaagtggattgaagctaaaccggtcattacaatcacggcagacaaggctagagatttcttcatcaacattgtgcatcggttcggggtacccaatcggatcatcactgataacggcactcaattcacaggcggagtatttaaagatttatgtgaggacttcggcatcaaaatttattatgcctccgtagcgcaccccatgagcaatggacaagtcgaacgtgccaatggtatggtacttcaaggaataaaagcacgggttttcgaccgactgcatccctatgccggcaagtgggtagaacagctgccatctgtactttggtccctacgcaccactcccagtcgggccacgggccagtcgccgtttttcctagtttatggagcggaagcaatattgcccagtgaggtggaatttgaatccctacgtttttgcaacttcagcgaggagcgctacggagaagaccgagtagatgatctcaaccgactggaagaagcccgtgaagcagctttaattcagtcggctcagtacttgcaaggcatgcgccgttatcataatcgtaatgttcaatcacgagcttttttagtcggcgacctggttctgagaaaaattcagactacacgggatcggcacaagttatctcccttataggaaggaccattcataatttccgaagtcactcggccaggttcttaccgactcaagcgtgaagatggtactcatattgacaactcttggaatattgaacatcttcgtcatttttatgct

SEQ ID NO: 82272 - DNA, 435 bp, Oryza sativa
  Clone ID: PAT_MRT4530_81718C.1
atggaatctggttcaggtctccaaaagtcgaagtaccttcgcaatcaatcatgcaggtcaattcgtagccgggaagaaaatgacgaggattcccgatactgcttgtcccgttgcagaagccacaggactgacgccgacgtccgtgccgtagttagaccgtgccaccacgtccctttcggcttatcggcccattccggtgcccgtccctgtcgctgcgtatctaccagaactccagagccgcccgggtcccccttccttcccggggatggcgccgcgccgcgcgacgccggcattttccgttttgtttatgctatctggactggagcatcaagtacggccaaacattcagcattgtactatcgtgttatagacattcaatatttgtcaaaatggacggaagaaataagtggagctcgaaacagttttgggaattta

SEQ ID NO: 82273 - DNA, 613 bp, Oryza sativa
  unsure (1)..(613): unsure at all n locations
  Clone ID: PAT_MRT4530_81719C.1
acgcgcgtgaacaagggtcacccaggaggagctctatcaacgattgtcatccgagcgtacgacgccatnggcgtcgacaccgagcagccaccgacaccctcctncgcctntgccatccgangacctctntggattcagctgaagcccaaggagagcgattgcgtgatccggcagaggttcgggctggacgggaagaggcggaaccggacgctgagtcgagactgcgcccggtaacctcaacatctcgaagtggagatggtgcgcaaagtatcgaagctcaaggcgctcattgacangctcaagcaccccaacgcgaagtggaataccctgacgcagatatcatgtgcacacccaccatgcaatcgtctcgtctctctgctgtgcataaaaacgtagtaagtaccaatacatgtattcctagcaattcttatctacacttccccaaccctgcataagcattatgcccataccccacccaccaacatgngtattcattctacttcatgcatattctactgtatataatttntnccactcgatcccctntgcattncagattaccagataccaaatacactgagatgattccntgttataaaaaaaaaaaaaaaaa

SEQ ID NO: 82274 - DNA, 225 bp, Oryza sativa
  unsure (1)..(225): unsure at all n locations
  Clone ID: PAT_MRT4530_8171C.1
ttccgcactngcnacaangggcgccacnnccatcatcggtggtggtgactccnttgctgcggtcgnganngctgggctggcccacaanatcancnncatctccnccggcggtggtnctagcncggantttcatgaanggtagatnatcctncgtnttctcaaccngtncccnttttttttnnncccnatcaaatcctntntctcactcntcnctatnntcactta

SEQ ID NO: 82275 - DNA, 318 bp, Oryza sativa
  Clone ID: PAT_MRT4530_81720C.1
atgtcagtcctcttcctcctccctatctcccttctctctctttctctccccttcttcccattcggccgacaggcaggagggcggcgagagcgagcgggcggcatcggggcgcatcagaaccgaactgggggcagcggtcggcggctaggacggcggcggctcggcggcggcgacggcgaggggaacggcggcggcgactcgcggcagtgggagggcgaggggaacggcggcggcgactcgcggcagtgggagggcgagcggaacggcggcagcccacactgccgctcgtcatcctcgtccttgcggttaccggcgtga

SEQ ID NO: 82276 - DNA, 558 bp, Oryza sativa
  Clone ID: PAT_MRT4530_81721C.1
atgaactcgagggatcagatccccttcctagtatacccaagacatgagattgtgcgagctcgtcttgcgaaggaggacggtgggcaccaagagcaacagacagtcttcgaagtgaagggtgatgggcatgatagcaaaaaaaacaccttgccatccgcctccccttctgcagcaaccgcaccctcggccttagcttctaccatcgtagcatccgagtcgctcccagaagagttggagcaaaaccacgccctcctccctaccgtcaaggctcagccgattcttagtgccccaaaaattctgagcagcagtgaccttacctcctccaccgtcaccacgaccggcacggcggcgaacagcgaggggaagacggcaatggtggccgccacggtgtgcagcatgaaaggctcgctggagaaaggccccactaatccccgcgtcactagggagcatgttgtcgggagtagaggcttgtgtcgccttactgtgtcacaagagggggtgggggagggggtgttggaaggaagggggtcttgccagataacggttccgtgccactga

SEQ ID NO: 82277 - DNA, 831 bp, Oryza sativa
  Clone ID: PAT_MRT4530_81722C.1
atgcccgcctttgcacttgagctcattccaccatcgctcgacgagacgctgccgtcctgcgtgttgggacttaatgacttgttggatcgatcagctgccgtggctggagccgtgcctggcgatggagggccagagactggtgcagatggcgtcaccacaggagtaccagagcctggtgctgatggcgtcgccagaggcgacgaagggttattgggtgtagggatgattggatctccagcaattggtgatggactagctggagaaggcttggtaggacttccagaaggcgacggcgccatcggtggagcccatggcgttctcggcgatctccggtgcggcggtggaggtgactgcactaccggcggcgtgtctgagcgagccggcggattaggcggcggcaaatcagccggagacgatggaggtggtgatgcagccactgggggttgctgcacaggcgacggctttggaggggtagtagcaggtgtaggtggcaccggcactgaagccggtggcgacggcggcggcaatgtggctgacggggttggtggtggagacgcaacgggtacaggcggcggtggcacggtggccggcggtggcactgcgaccggaggagctggtggcggagagggcggcggggaatcgggctgtgggggtggcgtggcggcggagggaaggggaggggacgcggccgggggagtgatggaggggtcggccggcgtggcattgggctgcgtcgcgggtgttggggtcgcggtggaaggcgcggcggcggcggtggcgggagttgcggtgcccggggagggagacggtgaggacgccattggaggctag

SEQ ID NO: 82278 - DNA, 178 bp, Oryza sativa
  Clone ID: PAT_MRT4530_81723C.1
atggagggcggcgggggtggtggcgtggcctgccagaacttactaggggagggggagcccatgctgcggctcaggggaggggcggactgcggccaagagacggcggaaatgggcgcccaaacctgcgaccggcggagaagcgtgggcaccgtcggttggagcaccggcggcggcggtg

SEQ ID NO: 82279 - DNA, 2610 bp, Oryza sativa
  Clone ID: PAT_MRT4530_81724C.1
acaacagctattgtgggtgctaccacgggggtgatgaagcccctcctgtccaagctcaccaagctgctgggcgaagagtatgccaagctcaaaggcgtgcgcaagcagatcaagttcttgatagatgagttgagcaccatgagtgctgcactcgagatgctcgcggattcggaccagcagctcaacccagaaatgagggattggagggacaagctacgcgagctggcctatgacctggaagattgcatcgatgattttatgtctcgtgttgaccatgatggggaaaagatgggcttcaggaaattcttccgtaagttgaagaaactgaaggcgcgccatgagattgccaatgagatcgaagagctcaagatccgtgcgatcgaggcaagcgaaaggcacaagaggtataattttgaccaattagcacacaactctagcacttttggcattgatcctaggctgtcggcgttctatgaggaggttgataaacttgtgggcattgatggtcctaagaagcgtatcattgagctgctagctatggagatgaaagggtctctaaaagtggtctctattgttggttgtggaggtcttggtaagactactcttacaaaccaagtttatgacacaattcgaagccaattttcttgtgcagcttttgtgtcagtttcacaaaggcctgatataaagaagattctaaacgatattgctgaaggagtagggatctcttctcgtactccggttggtaatgatgaaaagaaactcattaatatactccgagagcatctcaagaataaaagataccttgttgtgattgatgatttatgggatgcaaaagcatggaaaactatcgagcttgcattattaaacagtaactgtggcagcagagtaatcacgacaacacgaagcgttgcagtcgcatcatgctgctcttctcaagatggttatatttatgagatgaagcctcttagtttcgatgactccaaatggttatttttgaaaagagcatttggttatgaaaaatcacattatcctcatctggaagatgttctggataagatactaggaaaatgtggtggcctaccattggcaatcattactatatctagcttgttatcatatcagcatgctattgatgaatggcatagggtacttaatgatattggttatggacttgcaagggatccttatgcagagacaatgtcaaatatattatcgctgagtttcttcaatctccctcaccatctaaaaacttgcttcatgtacctaagtgtatttccagaagattataatattgacaaacgacgtttggttagtaaatggattgctgaaggattcattcaggatgaacaagggcgaagtgcatatagaactggtgagttgtattttaatgagctcatcaatagaagcctgattgaacctgttgatgtaaagtatggtcaggcaaaggcatgtcgagttcatgacatcattcttgactacatcaaatgcaaggctactgaagagaactttgtcacctcattaggatctacagtgcctggatgcactacagagtataaggttcggaggctgtcagtcatcaacagcaatgaagaagatgtcaacataccgacaagcctagatctgtctcaagtacgatcacttactatatttggaaatcgcatgcaaacttctgtatttgatttcaagtttcttcgtgtgttggacctagtatatagggacagaatgggtgacctttttgcaaatattgaaaaattgtttcatctgaagtacatgtgtatctcctcatatggagtggattatctcccagaaaaaattggagaactgaaatatttagaaacgctggacataagacaaaccaatgtggagatattgccatcaactatcacaaaccttcaacgactagctcgtctatttatcaatcaggacacgagattttcagatgaaacgactattggacaattgaagagcctggaagagctaaaagaatttgtagtgtctcagtctgaacaagtgacggccctccaggaagtcagtaagctaaccaagctaaggacattaaaattaacactgcagtcaccattgtcacttgatgattaccatagttgtgtgggaacattattgcaatctttatgcaacctttatgatttgtgcatcatggaccaatcttatgaaaattattgtcttacgttggattcatggcacattgcttctccttgtagccttcgtaagcttgtaatcaaactagtactcaccaaggtgccaaattggatgggtgtgcttggaaatattggagtactagttctaggtatcctgtgtatagcaccagatgatattgagatacttggagcaatacccagcttgctttttctcgagctacaaacttacggaggcaccaatggaaggatcatcatccatggaaacaacagattcataagtttgaaatatttctccttggttattcatgcttgtgggactgcattggagtttgaagcaggatcaatgccaaaggttgagcacctcaagcttcagtttcatctgcatgaattggaatgcctgaatggttcttctgactcaggcatccaacacctctctgctctcggcaaggttgag

SEQ ID NO: 82280 - DNA, 2764 bp, Oryza sativa
  Clone ID: PAT_MRT4530_81725C.1
ttctactcctcgtaccaaccatccaaatggacacaagaatatagagtgccatggctcgttagcgagcgttgcgagctaattaaccgtacgtgcgattgccgggagagaagccagccgctggccttcgctgcggcgcgcgcggtgtggcaacgacgagcatgcaagggggcaggtcatggctttgtccttgaactgagaagaaggtgcatgataacgcgccacacgtgaaactatattcatgagggatgactgaaatggaggattccttaagatcctgcacagagcagctactccgtgttagagaagagaaagaacgccttatcatcgaagcagctgataagatctctttggagcagaagaaagtgtggagtctgcagcagaagttagaagatgcaaataagcggtttgcaaaggtcaccactgaaaactacaatcttcgcaatattgtcaactccaaggataaggtgatcactgagctgagtgagtctgcagcactcctgaaccaaaagttaattgatgccacagccagacttgaattcacacacaaacagtgtggctctcttcagtatgaggtgcgcatccttcagaaggaactcgagattcggaacaaagagcgggagtttgacctcaaatcaattgatgctgcccagaagcatcagcaggaaagcaccaagaagattactgcattggaaactgaatgccagaggctgcggaccatggtccagaagcgtcttcctgggcctgcggctttggcgaaaatgaaagatgaggttgagcgacggggcagtaattgtgttgagaacagaaggagaaagccacgttcatctgcacagtcatcaccgcaggtggtgactccaaggcatcctgtttctgaaggttaccttgtcaagatgcaggaattggatgatgaaaacagacacctcaggcaattgttggccaagaaggagaatgacctccagtttgtgcagttgcagtatgcagatgaagcatcgaagctgtcagtagtgcaagggcagctcaaggagttggttggtagccatgaactggatgacgacaaccgtcctgaaccatgggcaaatagttctttagtttccaaaggagagcattttagagttgggaagcaacatgcatctcacagtaggggaagaagaatagcaggatctgacatgcagttgcttgtagatatatcggagatagagaagcttgaaatgatttcaaggccttcaagtgcgccacatcaatgcgtgccagatgcttctgatacagagtccaaaactgccctgacagaaacagtttgccaagatcgaatccttgaagatggtctatctgacaagtatcccgagtggattcaagatgttttggaacttatcataaagaagcatcaagtccttaaaataagcgtcgatatcattattgatgaaataagatctgcattgaggactgagatttcagacaaaggaaatgatgctgcaaatgtgacatatgaccaggcagtaatagacagcatggtggctactcttgttgaaagagtgagttgcatgatcgaaagatcttctggaaacaatgttctgagttctcaatcatttttgcatgagaaatctgaactcacttgtcatcttgagcaccttatctgtgtatgtagtgatgtactggatggaaaggccaatcttcgaaagttcatcgaagaagtttgcttaaccctcgagtggacagtgaaccaatatatttattgtgtcgatgctctcgaaactgtggattgcatcacaaatgatttcgatggaaatgtatctcttagatcattaaacatgcaggaaaaacaacaaatgcaaagcacaaatccgaaagtggctgtaggagttcaacaagaggtacagaaagaaccgtttctgatccctggtgaccccgtagaaaatcattctcaggttcagtttgtcacttgtaagcttgataaggaactgctggctgttaggcaagatcatggtgataattgtcaagaaaagcagtcagtacattataaagaagaaagtgctacggctgatgggagcatgcaattgttaccagaagaagaggggaaacaactaacaaattcggcaatatccgcagcagctgataaacttgcagagtgccaagaaacaattacaagcctaagcaagaaactgcaggcgctaaaatgtccagcaaatgcggatgctgtagacaaaagaaagtctgataacttgcacctgttagttgcaaatcagaattttagttctcccccatccatagaagcagcatgcaagaaagagaacgatgaacgtgttacaactgaaaagaaccttctacaggagcaagatgttggcactggccataaagttgataacaatggttcaacacaaatcgctcctcgtcccgtgatccccaagtcgccactaaccactgtttctgttgatatgaagaagaggaagaaaaagaagcagggtgggagcttgctgagtagactcatctttgggaagaaggcataaaacagctccttggctgctagcctgctacgctcctctgattaagttgttagtgcatccagcacgtgctggagcttgttcttctaagttattccgatcccatgtccaataagagggggcaatgctacgtagctaaaatataatttatcggttatgtcatatgtgttgcgacgtgatcaacactatatgtttgtaaaatcctgttccagacatatgcatatggtcttatgattggtggatttcgtttaaaaaaaaaaaaaaaaaaa

SEQ ID NO: 82281 - DNA, 549 bp, Oryza sativa
  Clone ID: PAT_MRT4530_81726C.1
gggaggtcaatgttcaaagcgggcttccagccacaaggagcactgagaggttagagttgcttgatgataacgaacatatcctcaaagtcaagtttattgggggcgatcatatgttgaaggtcatcgatggccaacttggaacattggtggtcgaatcatttgtagtggatattccagatgggaacaccaaagacgacatatgctatttcatcgagaacgttctcaggtgcaaccttatgacccttgctgatgtgtcagaggagcgccttgccaatccttgatctcactctgctttcttggttgattgatgatcagaataatccatatataaaattggtggaccttattgaaactctcagaaaacatcagagcttcttgatcgacattgcatactaaagcttgttctatagaatttacaccaattaaggcactcacttcagtttactacaaacatatgtgcaactttgttacttcgctcgtgcaaaaaaatgtcgaactgaaatgaaacaacgttactttgatggattgtattcagatttcttgtgcatt

SEQ ID NO: 82282 - DNA, 1539 bp, Oryza sativa
  Clone ID: PAT_MRT4530_81727C.1
atggtggccctcgctgactcagcagcggctaggaagctcctcctgcatggcgccgccaccgacgccgccgccgtcggcatgagcttcggcctcgacggcctgtggcagctcatcgccggactcttctccggcctcgtccacctcctcctcctcccgttccaggccatcgcccacggcttccaggccctgggccacgccatccaggcgctcttcgctgggctcgggaccgtggcgcacctgctcgtccaggcggccgtcgccggcattggccatggattcgacggcatgtggcatgccatacagggcttcttcgccagcatcgtcgccgcgctcgccggcgcggcccatgggctcgtcctgccgttcgaggcgttctggcggtggctgcagacggcggcgggcggcaccggctctggtttccaaggattgtggcagaacgtgttggccttcttcgccacgctcgccggcgccgctcacgacctcgtccacccgttcgaggcgttctggaagtggctcaggaccgcggccgccgacgccgccgccgacatcagcttcaggctcgacggcctgtggcccctcgtcaagcgcctctacgccagcctcctcgccacgctcgcgagcgccgcccacgggctcgtcccgctcctcgagtcgctctggcgggggctccgcgccgcggccgccgcggcgctcccctacgtgctagtgatcgccgccgtcctatgcgtcgtcgcgcttgtctggctcgcctggccgttcctgttccccgccgcggcggtgatcgggctggcgctcgtcggcgtcgcgggctgctgcgcgttcttactgctcgccgccgccgtcctgatcgggcgggcgctcgtctacgccgtctgcttcggcgttgtcctcttattcgtcgccgccaaggtggtcggcaaggtgctcgaccgggtcctccccgcctgcgcgcggtgctgctacgacgaccgcgtcaccaccaccgccaccaccatgagcgctccggacgccgccggcatggacatctcgcgagcagcgtacgagtcactcccggagctctacgcccagatactgcgctccgccggccccgtcgtggccgcagccgtcttctgctcgcatcccgtcgcgtgggcgtgcgcggcgccggtcgccgccctcttcctcttccgcgccctggataaacgcctccctccaagcgaaccctgcgtcctccctgcggctgcataccctgacactgtcactgacgtgtcggactcacgttccattggccagcatgtcagcgaagatgatgacatgtccgactcatgttccatagtagacccataccacggcgagcacccttgtctccttacttcattctcagcgaaggagcggatgggagcgagcattggaggaggacgccgagcaaccggcagcggtggcgggcggcggcatgcgcggcggggaggggaggaggggatgcgtgcgcggtggcgcggagggccgcacggcgctggctggcacggcggcggctggccgacgtggaggggaggcgggtag

SEQ ID NO: 82283 - DNA, 980 bp, Oryza sativa
  Clone ID: PAT_MRT4530_81728C.1
attccatcccatcaatttgttcgcgattcaagagtagtcagcctcactctcttcctccaaatcattggtgctgctgctactgtgtaccggagatgaacggcgctggtggtgcgggaggagcagcggcagggaagttgccaatggtgagccaccgacgggtgcagtgcagactagcggacaagcggtgtgagctccgggaggaagagatggagtatatccggcagttccaccgccacgagcccagcagcaaccagtgcacctcgttcgtcgccaagcatatcaaggcgcccctccaaaccgtttggtcactagtgaggaggtttgatcagccacaacttttcaaaccttttgtgagaaagtgcgtaatgcgagaaaacattattgtgaccggatgtgttagggaggtcaatgttcaaagcgggcttccagccacaaggagcactgagaggttagagttgcttgatgataacgaacatatcctcaaagtcaagtttattgggggcgatcatatgttgaagaattactcatccatcctaaccatccactctgaggtcatcgatggccaacttggaacattggtggtcgaatcatttgtagtggatattccagatgggaacaccaaagacgacatatgctatttcatcgagaacgttctcaggtgcaaccttatgacccttgctgatgtgtcagaggagcgccttgccaatccttgatctcactctgctttcttggttgattgatgatcagaataatccatatataaaattggtggaccttattgacactctcaggtgccacctgggcgtcttcttcgccgtgcatactatggcgtgctctattgaatcctggcctctaggcgctcatttgagtgtttctacaacaatatgtgcaacttacttatcttgctcatggaaaaaaatgtcaaactcaaatgaaacaacgatacttttctttttatatttctactccttttcttgtcc

SEQ ID NO: 82284 - DNA, 593 bp, Oryza sativa
  Clone ID: PAT_MRT4530_81729C.1
actagcaattaggagaaaaaaacaggggggatcaaaagcccacaaaccattacaagttaaaactgaacggggccatttaaaaaaggggcttgctcacatacacacagaagacatcaaaaaacaaaatcggcaaatcgggggcccggggggtcccccgggaaatcggggccggagaccggggggggaacaagtttccctaaagggggggggtataaaagcggggggaaaaaagggaaaaaggggtcccgggggaaaaatggtaacccgtcaaaaatccaaaaaaaaaaaaaggcgggaagaaaaaggggaaagcccgggggggccaaagggggggccaacccaaaataaggggggggggcccaacggccggttttcaagggggaaaaccgggggggccagtggaaaaaaaaaaccggccacccccgggggggggggggttgggttttgggccccaagggggtttttttttttaacaggggagaggggaaaaagtggttggccttccccccccggcccctagaagaggccaaaaagggggcccacccgggttggcccaaaaaggaaaaaaccctgttgggggggggaaaaggggg

SEQ ID NO: 82285 - DNA, 258 bp, Oryza sativa
  Clone ID: PAT_MRT4530_8172C.1
atgtatccccctgatccgtccaagtccggcgagtcgtcggcggcggcgccggagccggtgaccgggatccccgtcggcatgttctaccctgctccgccgatggagcgtgtggtgtcgtgccgcatggcgccggcggctggaggggcgtggaccaccgccctctgcgactgcgccgacgactgcaacacctgtaagcttgatcgggaaacctgtcgtgccagctgcattaatgaatcggccaacgcgcggggagaggcg

SEQ ID NO: 82286 - DNA, 171 bp, Oryza sativa
  Clone ID: PAT_MRT4530_81730C.1
atggcgggaagctatccttgggatcacaatggatggtggacagaaccgtcgttctttgatatgaacactgaggtcgaagatgaagcttcggaggatccctacgcttactaccaagagggtgatgaagacgatggcgctcagagtcagccgaggcacacaataacaaattga

SEQ ID NO: 82287 - DNA, 2265 bp, Oryza sativa
  Clone ID: PAT_MRT4530_81731C.1
atgacgatgaccggagggcaccaccatgacgcgcaccacgaggacttccagctgaaggacacgaacccgctgctgggggagcaatggccgaagggcgcggcggggccggcgcggccggccgtcggcggcggcatcgccggttggctggggttggagaagccgtcgagcacctacgacctcgtcgagcagatgttcttcctgtacgtgcgcgtcgtcaaggcgaaggacctcccgcccaaccccatcaccgggtcccccatggatccgtacgtcgaggtcaagctcgggaactacaagggcacgacgaagcactacgaccggcgagccaacccggagtgggaccaggtgttcgccttctccaagtcgagggtgcagtccaacgtcctcgaggtgtacctcaaggacaaggagatgctcggccgcgacgactatgtcggccgcgtggtgttcgacctcgccgaggtgcccaccagggtgccccccgacagccccctcgcgccgcagtggtaccgcctcgaggagcggcgcgccgacgaggcgttcccggaggcgtggcacttcgacgccgccaccgtacgctgcgagggcgtggcgagcgtgcggtccaaggcgtacgtgtcgcccaagctgtggtacctccgcgtcaacgtgatcgaggcgcatgacgtgcatccgcaggcgcgcgggcgcgcgccggaggtgttcgtcaaggcgcaggtcgggaaccagatccttaagacgtcggtggtggcggcgccgacgctgaacccgcggtggaacgaggacctggtgttcgtcgtcgccgagccgttcgaggagcagctgttgctgacggtggaggaccgggtgacgccgcgcaaggacgacctcctcggccgcgccgcgctgccgctcgcgctgttcgagaagcggctggaccaccggccgttcgtccagtcgcggtggttcgacctcgagaagttcgggatcggcggcgccatcgagggggagacgcggcgggagctccggttcgcgagccgcgtgcacgtcagggcgtgcctggagggcgcctaccacgtcatggacgagtccaccatgtacattagcgacacccgccccacggcgaggcagctctggaagccgcccgtcggcgtgctcgaggtcggcatcctcggcgccgccggcctccagccgatgaagaatcgcgacggccgtggcaccaccgacgcctactgcgtcgccaagtacggccagaagtgggtccgcacgcgcaccatgctcggcaccttcagcccgacctggaacgagcagtacacctgggagatccgcatccgcctctcgacgctggagaccgaccgcgtgtacacgcacgcgtacccgctgatcgtgctgcagccgtcgggggtgaagaagatgggcgagctccgcctcgccgtgcggttcacctgtctgtcgctgatgaacatggtgcacctgtacacgcagccactgctgccgcggatgcactacctccacccgttcacggtgacgcagctggacgcgctccggtaccaggcgatggggatcgtggcggcgaggctggggcgcgcggagccgccgctgcggcgcgaggtggtggagtacatgctcgacgtggagtcccacatgtggagcatgcggcggagcaaggccaacttcttccgcgccgtctcgctcttctcgggggccgccgcggcggcgcggtggttcgccgacgtgtgccactggaagaacgttgcgacgacggcgctggtgcacgtcctcctcctcatcctcgtgtggtacccggagctgatcctccccacggtgttcctctacatgttcatgatcgggctgtggaactaccgggggcgggcgcgccacccgccgcacatggacacgaagatgtcgtgggcggaggcggtgcaccccgacgagctggacgaggagttcgacacgttcccgacgtcgaggcagcaggacgtggtgtacatgaggtacgaccggctgaggagcgtcgccgggaggatacagacggtggtcggcgacatggcgacgcagggggagaggctgcagtcgctgctggggtggcgggacccgagggcgacgtgcctcttcgtcgtcttctgcctcgtcgccgccgtcgtgctctacgtgacgccgttcagggtggtggcgctcgtcgccggcctctacctgctccgccacccgcggttccgcagccgcctgccggcggtgcccagcaacttcttccgccgcctgccgtcgcgggcggacagcatgctctga

SEQ ID NO: 82288 - DNA, 1066 bp, Oryza sativa
  Clone ID: PAT_MRT4530_81732C.1
ggtcattctattgttgatgaatcaaagcgagatcagattgctcttgatgacgagggttgaagaggctttctattgatccacctactttcaactgaacagtagttagttaaggagtgccgggtttgcttgataagggattcttgttttgactgctacattaagggcaacgcaactacctctcctgctttcaattgctaaggcagtatagatctgtttaagcgagtgctatgatggttgtccaactctagaccttacgacaaagaaagagccagaaaccatgttttctcgacttctaatgagcgctttctagcagaactatctatcaaggcgggagaacgtagtatctgccatttctgtagcgccctgaccttacctcgaaaccagctacctcttatagctacctaacctaatccctggcacaccatctatctctgcatccgggctcgcctccactcttgttccgggttgatgaatccaactcaagaaaccatacctacttcctgctttcgaaagtgcttgctttcccttcgagggtggcctccactcgggctagacctcgttccggtcttaccctccctcgagtccgatctcgggagggcgcttgggcagggcctattcccaggtgcttgatgacctataccactaatcacaactactttacttattcgtcaaaaacctattccccaccaaccaagattattattcacgcacctacgatccctttcttaaagaaaagaattattactaccttcacatggagtgaaagggacgcagttcagaaagcaggcaagaaacgccttcctacatctgcgccccgctgaaagctatcgcaccaggtagaacagagacactcgacaaaagacgagcagcagcccgtgactgctgcctctgttccctctcgtactcgatcttctggcgttctccctggatccagggatgacgggatcgatggaacccggggtgggttcaaaatggcagggacttgcactgcaggagcaaggggtgcatccgcgggttgagcctgatcccctgctggatttggtaaaacattctctccgtcatctaa

SEQ ID NO: 82289 - DNA, 2475 bp, Oryza sativa
  Clone ID: PAT_MRT4530_81733C.1
atgacgatgaccggagggcaccaccatgacgcgcaccacgaggacttccagctgaaggacacgaacccgctgctgggggagcaatggccgaagggcgcggcggggccggcgcggccggccgtcggcggcggcatcgccggttggctggggttggagaagccgtcgagcacctacgacctcgtcgagcagatgttcttcctgtacgtgcgcgtcgtcaaggcgaaggacctcccgcccaaccccatcaccgggtcccccatggatccgtacgtcgaggtcaagctcgggaactacaagggcacgacgaagcactacgaccggcgagccaacccggagtgggaccaggtgttcgccttctccaagtcgagggtgcagtccaacgtcctcgaggtgtacctcaaggacaaggagatgctcggccgcgacgactatgtcggccgcgtggtgttcgacctcgccgaggtgcccaccagggtgccccccgacagccccctcgcgccgcagtggtaccgcctcgaggagcggcgcgttggcggcggcggcgacggcggcgggttgaaggtgaggggggagctgatgctcgccgtgtggattggtacccaggccgacgaggcgttcccggaggcgtggcactccgacgccgccaccgtccgcggcgagggcgtggcgagcgtgcggtccaaggcgtacgtgtcgcccaagctgtggtacctccgcgtcaacgtgatcgaggcgcaggacgtgcagccgcaggcgcgcgggcgcgcgccggaggtgttcgtcaaggcgcaggtcgggaaccagatcctcaagacgtcggtggtggcggcgccgacgctgaacccgcggtggaacgaggacctggtgttcgtcgtcgccgagccgttcgaggagcagctgttgctgacggtggaggaccgggtgacgccgcgcaaggacgacctcctcggccgcgccgcgctgccgctcgcgctgttcgagaagcggctggaccaccggccgttcgtccagtcgcggtggttcgacctcgagaagttcgggatcggcggcgccatcgagggggagacgcggcgggagctccggttcgcgagccgcgtgcacgtcagggcgtgcctggagggcgcctaccacgtcatggacgagtccaccatgtacattagcgacacccgccccacggcgaggcagctctggaagccgcccgtcggcgtgctcgaggtcggcatcctcggcgccgccggcctccagccgatgaagaatcgcgacggccgtggcaccaccgacgcctactgcgtcgccaagtacggccagaagtgggtccgcacgcgcaccatgctcggcaccttcagcccgacctggaacgagcagtacacctgggaggtgttcgacccgtgcaccgtcatcaccatcggcgtcttcgacaacaaccacctcggcaacggcaacggcaacggcaacaacgccggcggcggcggaggaggaagcccgccggcgagggacgcccgcgtcggcaagatccgcatccgcctctcgacgctggagaccgaccgcgtgtacacgcacgcgtacccgctgatcgtgctgcagccgtcgggggtgaagaagatgggcgagctccgcctcgccgtgcggttcacctgtctgtcgctgatgaacatggtgcacctgtacacgcagccactgctgccgcggatgcactacctccacccgttcacggtgacgcagctggacgcgctccggtaccaggcgatggggatcgtggcggcgaggctggggcgcgcggagccgccgctgcggcgcgaggtggtggagtacatgctcgacgtggagtcccacatgtggagcatgcggcggagcaaggccaacttcttccgcgccgtctcgctcttctcgggggccgccgcggcggcgcggtggttcgccgacgtgtgccactggaagaacgttgcgacgacggcgctggtgcacgtcctcctcctcatcctcgtgtggtacccggagctgatcctccccacggtgttcctctacatgttcatgatcgggctgtggaactaccggcggcggccgcgccacccgccgcacatggacacgaagatgtcgtgggcggaggcggtgcaccccgacgagctggacgaggagttcgacacgttcccgacgtcgaggcagcaggacgtggtgtacatgaggtacgaccggctgaggagcgtcgccgggaggatacagacggtggtcggcgacatggcgacgcagggggagaggctgcagtcgctgctggggtggcgggacccgagggcgacgtgcctcttcgtcgtcttctgcctcgtcgccgccgtcgtgctctacgtgacgccgttcagggtggtggcgctcgtcgccggcctctacctgctccgccacccgcggttccgcagccgcctgccggcggtgcccagcaacttcttccgccgcctgccgtcgcgggcggacagcatgctctga

SEQ ID NO: 82290 - DNA, 1425 bp, Oryza sativa
  Clone ID: PAT_MRT4530_81734C.1
atggccatggtggagaagacggtgctgctctacccttgccctgcggtgggccatctcaaccccatggtgcagctcgccgaggccctcgtccgccgcggtgtctccgtcaccctcgccgtcgccgacccgcctgacaagggcgctgtgctggccggcgcgatcgcccgcatcgccgccgtgtgcccctccatcggtgtccgcctccttcccatcccgtcctgcgagggcaagacgtactcccaccccgtcatgtggatcgtcgacgcgctccgcctcgccaaccccgtgctccgggagctcctgcgctcgttccctgctgccgtcgacgctctcgtggtcgacatgttctgcatcgacgcgctcgacgtcgccgccgagctcgccgtcccggcctacatgttctacccgtctgcggccagcgacctagcgatctacctccaggttccgcatgtcgcccgctcggctccatcctctttcaaggacatggccgacacggtgctgagcttctccggcgtgccgacgattcgcgcgctggacatgccggacaccatgcaagacagggagagcgacgtgggcacgacccggattcaccactgctcccggatggctgaagcgagaggcattctggtgaacagcttcgattggttggagacgagggccctgaaagcgatccgcggcggcctctgcctgccgtccggccgctcggtgcccgcgatctactgcgttgggccgctggtcgatgggggcaagctcaaggagaacgacgcgcggcacgagtgcctcgagtggctggaccgccaaccgaagcagagcgtggtgttcctctgcttcgggagcaggggcactttctcggtgtcgcagctgagcgagatggctcgggggatagagaactccggacacagattcctgtgggctgtgcgtagcaacctcggcgaggtggacttggaggcgttgtttccggaagggttcttggagaggacccaaggcaggggattcgtcgtgaagaactgggcgccgcagtcggcggtgctgcagcacggcgccgtcggcgcgttcgtgacgcactgcgggtggaactcgtcgctggaggcgatcatgtccggcgtgccgatgatctgctggccgctgtacgcggagcagaggctgaacaaagcgcacctggtggaggagatgaagcttggggtgttggtggagggctacgacggcgagcttgttaaggccgacgagctggagaccaaggttcggctggtgatggagtcggaggaagggaagaggcttagggagaggtcggcgatggccaaggagatggctgctgatgccgtcaaagatgggggttcgtctgacatggcgttcgccgaattcctgaacaatttggggacgaacaacgtgaaaagcggcccgagagatacacccgtgcatgactga

SEQ ID NO: 82291 - DNA, 2809 bp, Oryza sativa
  Clone ID: PAT_MRT4530_81735C.1
gtcttgagaaattaatcgggctaatttttcacaagaaaaggaaaaaaaatctgaagaaatggttttctcttgccatactgctcaataagaaaataatgatgtttgggttattaatagtggttgtacaaaccacatggctgctgatccaaatttatttcgagaaatggattcatcttatcatgcaaagattcacatgggtaatggctctatagtgcaaagtgaaggctaagatttttcttgcaaaatattggaccgtaaaaataatcatttggttgccaaaataaatatggagaagaataggaattttctattaaggatgaaccatccaactcaaatggctctcaaaagtgaagtcgatatttctaatctatggcacaagagaatgggtcatctcaattacaaagcactaaagctactcagggcaaaaggcatggttcaaggccttccatttattactctaaaatccaacccatgtgaaggttgtgtgtttggaaaacaaatacaagcttctttcccacgcagtggagcttggagagcaagtgcaccgttggaactagtgcgcacttatatagttggtaaagtgccaacaatctcagaaggaggaaattggtactttatcacatttattgatgattatacagaatgatctgggtatattttctaaaagaaaaatcagcagccctggatattcaaaaaattcaaggctatggtggaaaattagagtaatcgaaaaattaaagtattacgcaacgatcaaggaggagaatatatctcaaaagaatttgagaaatattgtgaaaatgttggcattcgaagataattaacgacaggctatagtgctcaacaaaatggagttgctaaaaggaaaaatcgaacaattaatggcatggcaaactctatgctccaagacaaagctatgcctaaatctttctgggctgaagcagttaacactgcagtttatattttaaatagtagtcctacaaaggcagtaccaaaccgttcatcttttgaagcttagtatggtaaaaagcctatcattggacatatgagagtatttggttgcatttgctatgctcaagtgctagcacaaaagaaagtaaaatctgataataaaagtgattggtccatatttgttggctatgctgatggtatcaaacgctatagactttataatttggagaaaaagaacattatcatcagcagagatgtgatttttgatgaaagtgctatttggaactggaagtctccagaagcctccggtactccattattgccaaccactacaatcacactaggccaaccacatatgtatggcaatcatgaagtggaagatcaaactccaagtcaagatgcatcaagtccaaggtcaaggtcaagcttcagttcggattcaagcccgagtagtgaagagcaaatttctacaccggaattagctccaagatgtgtaagaagtatggttaaattattataatctacttctcaacaaagagggacaaaacaatatgaattttccaattattctgttgttgagtcactgttttcaagaagcaaaaaaaacataaaaattgggttaaagccatggaagatgagattcgtatgattgagaagaataatacctaggagttggttgatcgatctaaagatggagaagttattggagttgaaatgggtttataagacagctaaatccagatggctcaattcagaaatataaagcaagacttgtggcaaaaggctttatgcaaaagcctgatattgactactatgagaaatatgctcctgttgcaaggctagagacaattcgtacaataattactctagcagctcaaaacaagtggaagatatatcaacttgttgtgaaatcggctttcttaaatggctatcttgatgaagaaatttatgttaaacaacttgaagggtttttagttcaagggggagaaaacaaagtattctgacttaagaagacattatacagattaaagcaaacacctagagcatggtacagtcaaattgataagtactttattcaaaaaggatttgccaagagcataagtgaggattgtctcacactctcactatatgttgatgacgatatataccagtaatagtgagaagatgatgcaatattttaaaaaggacatgatgaatacatatgagatgagtgatatgggcttgttgcactatttcctaggaatggaagtgcatcatagtactgaagggatatttatatcacaaagaaaatatgcagaaaatattctgaagaaaattaagatggataactgcaagtcagttacaaccccttgttgccaaatgaaaagcaaaaggcaagagatggtgctgataaagcagatccaacaatttacagaagcttggttggaagtttattatatttgaccgcaacacgaccggatattatgttattatgtttgcggcaagtttattatcaagatatatgtttagcccaagtcagttaaattttactactgcgaagagagttttgcggtatatcaaagggaccacaggttatgttatatggtacaagccagttaagaattaaaattaattggctacacggatagtgattgggctggatgtcttgatgatatgaagagcacatccggatatgccttctcacttagctcagccgaagcagaatatgtagcaacatcaaaagccgtgtcacaagctgtttggttaagaagaattatggaagacatagacgagaggcttacacaaatttattgtgacgagtggtgcggtggatggcgatggcgggtcatcatcaacagagtcaaagctgtgattaacc

SEQ ID NO: 82292 - DNA, 363 bp, Oryza sativa
  Clone ID: PAT_MRT4530_81736C.1
attgggtgttgcctttttcaatttaaattaatgggtatttttttgattgatatattttatattttgtgtggaaagtattatgttaaataaaataattataagagggggttttaaccagacacaaaagtaaattggtgaaaagttttaggtaactgaaaggaagcaggggtagtttggtcatacagaatagaaaagattaaatgttaggaaaaaaaatttgggggaataggcatgaggaagatttatttgaaagcgttggggaaggagattatgtaggcaaaagaaaagcttgaagaagacagtgagggacaaaattattttgggggaaatgggtattaaaaaaaatttggggaggagcttgtt

SEQ ID NO: 82293 - DNA, 3012 bp, Oryza sativa
  Clone ID: PAT_MRT4530_81737C.1
atggcacggggctccgcaccgctcgacggtagcgtgctgccgccttcccgcatcgtgagcgagaggcaggccgggctgccgcgccgattcatgccggaatctgccaccggccgggaggtggtcacgctgggcgagggacgcccggcgccacactacccggggcggtccgtcttcttcctctctttcgcaatggcggggctggtcccgccattctctatttttttcatggatattctggagttttatgatctccagatggcgcacctcacccccaacgcgataatgacgttggccatcttcgcgcacctgtgcgagatgtttatcggggtgagcccatctctccggttgttccggtggttcttcaccgtacagccggtgtcgccgccgacggtagtcggtggctgctacttccagccgcgggggcaggtgttgaaccgctacattccctgcgtcctccgcaaaaagtgggacgactggaagagtgattggttctacacccccctcgtcgacgaagcgcgcctccgacttccgagccagcctccggcgcaggcctccagctggcaggcggcggtagatctgggagacggctacgacgccgttcttgaccgcctggtgggtctgcgatcccaggggctcacgggggccatggtgttcggtgactaccttcgccgccggatcgcgccgctccagcggcgtgcccggggcgcctgggagtacactgggcccgaggactacatgaggacccaccaggggcgcaaatgggactgggaccctgaggacttcaggatggtggtccaacgggtgctgaatctcagctccgtggaggcatccctcatcccccaaggggtcctccccctctgctgcgatccagagcgcgccaacatcctgaccatcatgcaggaggtcggggcgtcgggggagcgggccccccgaggccacgttggcgcgggcgggagccgcaggggagaacaatctaccccgggggggggtcgtgcttctgggccccgcgacggggacccgggggggagccgccctgccgacgcccgggggaagaggaagcaggagggtacccctcccccatctcctccccgagggggcggggcggtgcgtgccagcagcaggcgcccggagggtgccgtgccgacgccgcagcccgagggggagcgaaagaagaaacggctccgcaagatgggggggaccgagccatgccgggtgaacctcatctcgcccccgaggtggtcgtttagccgacctccccgcagcgagatcccatcgcaccccccccccccccgccattccatgtccggccggtctgaagccgaggagacggcgaccgcggaagcccggaggcgggaagctgaccggcgagaagccgcggaccgcctccgggaagccgaggaggctgcccaggaggccgtccgggttcgccaggctgaggaggccgctcgggaggaggccagactccgccgggccggggagtccgtccgggaggcagaggcggcacgcgcacgccaggcggcctgccaagcccccgacccgactccacccgaggcgacgatgacttccgaggccacccacgacgaggccgcggacgcgccgctcgggcccgacccctcgggcgatgcttgggacgagccagcttcgggggacgcccccgggtccggcacgtcgatcggcgggccgagccgcgcggcacccacaccgaggcggctctcccctctgccttccgctgccccactgagcgcggagcccctcctgcaggccttagccgccgcgaacaccacggtgctggacgggttaagtgcccagatggaggtcctgcaggcagagagggcggagctcgacgcggcgtgggcgcgcgtagaggaggggcggcgctcggtggaggccatggtggaggcgggccgcaaggcacaccgccggcacgcctccgagctcgaggcccgtcgtagggacctggcggagatcgccagggaggtggaggaggagcgggagactgccctcatcgccaccgccgtgctcgacgaggtgcggaacgacctccgcctccaatacgggagccaggcggcggagctagagaagaagctcgacaccgcccggggagtccttgacgccgccgctgcccgggaacggcgggcggcggagatcgaggcggcgtcccggcagcgcgaagaggcccttgaggctcgcgccacggcgctggaggagcgcgcccgcgccctggacgcgaaggagaaggacctggcggaccgcgaggccgccgtcgccacccgggaggcaacactggcggcgcacgaggccgcctgcgccgaagaggagtccgcactccgcctccgcgaggacgcgctcaccgagcgggagcgagctcttgaggaggccgaggccgcggcgcagcggctagcggacagcctgttcctccgcgaagcagcgcgggaggagcaggcgcgccacaatctggaaggcgcccccgccgaacacaccatcgccgggctgcagggcgcactggactcgttcgccggggaggtcaaggccctccgtttggcgagcgaggtaggacccggcatgcttcgggacgccgtctcccgtctagaccgcgccgggcggcaggcgggcctctggggcgggcggaccgcgaagtacgccgccaaccaggggggcctcgcccagcgcctctcagagatggccgggaccctccagcgactccccgaggagctcgaggagacgatcaagtcatcctcgagggacctcgcccggggggcggtggagctcgtactggcaagctaccaggccagggaccctgacttctccccgtgggcagcgctggacgagttccctcccggaaccgaggacggcgcgcgtgcgcaggtccgggacgccgccgaccacatcgtccacagcttcgagggtacggcccctcggctcgcgttcgccctcgactccgacgaggagggcggtgacgacggtgcggacgacagcgacgacgaggccggcgacccgggcgcgtcggagtga

SEQ ID NO: 82294 - DNA, 2715 bp, Oryza sativa
  Clone ID: PAT_MRT4530_81738C.1
atggcacggggctccgcaccgctcgacggtagcgtgctgccgccttctcgcatcgtgagcgagaggcaggctgggctgccgcgccgattcatgccggaatctgccaccagccgggaggtggtcgcgctgggtgagggacacccggcgccacactacccggggcggtccgtcttcttcctttccttcgcaatggcagggctggtcccgccattctcttctttcttcatggatgttctggagctttatgatctccagatggcgcacctcacccccaacgcggtaatgacgttggccatcttcgcgcacctgtgcgagatgttcatcggggtgcgcccatctctccggctgttccggtggttcttcaccgtacagccggtgtcgccaccgtcggtagtcggtggctgctacttccagccgcaggggccggtgctgaaccgctacattccctgcgtccttcgcaagaagtgggacgactggaagagcgactggttctacacccctctcgccgacgaagcgcgcctccgacttccgagccagcccccggcgcaggcctccagctggcgggcgccggtagatctgggagacggctacgacgccgttcttgaccgcctggctggtctgcgattccaggggctcacgggggccatggtgtacggcgattaccttcgtcgccggatcgcgccgctccagcggcgcgcccggggcgcctgggagtacaccgggtccaaggactacacgaggacccaccagggggtcaaatgggactgggtccctgaagacttcaagatggtgatccaacgggtgctgaatctcagctccgtggaggcatccctcatcccccaaggtgtcctccccctctgcagcgatccagagcgcgccaacatcctgaccatcatgcaggcggtcggggcgttaggggagcgggctcctcgaggccacgatggcgcgggcgggagccacaggggggaacaatctaccccgggagggggtcgtgcttctgggccccgtgacgggggcccggggggcagccgccctgccgacgcccgggggaagaggaaacaggaggataccccctccccatctcctccccgagggggcggggcggctgaggaagccgcttgggaggaggccaaactctgccgggccgaggagtccgtccgggagacggaggcggcgcgcgcacgccgggcggcctgccaagcccccgacccgactccgtccgaggcgacaacgacttccgaggccacccacgacgaggccgcgggcgcgccgctcggacccgacccctcgggcgacgttcgggacgagcccgcttcgggggacgcccccgagttcggcacgtcgatcggcgggccgagccgcgcggcgcccacaccgaggcgggtctcccctctgccttccgctgccccactgagcgcagagcccctcctgcaggccttggccgctgcgaacaccacggtgttggacgggttaagcgcccagatggaggtcctgcaggcagagcgggcgaaggtcgatgcggcgtgggcgcgcgtcgaagaggggcggcgctcagtggaagccatggtggaggcgggccgcaaggcacaccgccggcacgcctcagagctcgaggcccgtcgtagggacctggcggagatcgccagggaggtggaggaggagcgggagactgccctcatcgccaccgccgtgttcaacgcggcgcgggacgacctctgtctccaatacgggagccgggcggcggagctagagaagaagctcgacgcgtcccggcagctcgaagaggcccttgaggctcgcgccacggtgctggaggagcgcgcccgcgccctggacacgaaggagagggaactggcgggtcgcgaggccgccgtcgccatccgggaggcaacgctggcggcgcacgaggccgcctgcgccgaagaggagtccgcactccgcctccgcgaggacgagctcactgagcgggagcgagctctcgaggaggccgaggccgcggcgcagcggcgggaggagcaggcgcacctcaatctggaaggcgcccgcgccgagagggccgcactggatcagcgggccgctgaattcgaggcgcgggcgaaggagctggacgcgagagcgcgcagcgacggggcggccgcgggcgacggcgacctagccgcccgcctcgcagccgccgaacacaccatcgccgagctgcagggcacgctggactcgtccgccggggaggtcgaagccctccgcttggcgggcgaggtagggcccgacatgctccgggacgccgtctcccgtctagaccgtgccgggcggcaggcgggcctctggggcgggcggaccgcgaaatacgccgccaaccaggagggcctcgcccagcgcctctcagagatggccgggaccctccagcggctccccgaggagctcgaggagacgatcaagtcatcctcgagggacctcgcccggggggcggtggagctcgtactggcaagctaccaggccagggaccctgacttctcctcgtgggcagcgctggacgagttccctcctggaaccgaggatggcgcgcgcgcgcaggtccgggactccgccgaccacatcgtccacagcttcgagggtacggcccctcggctcgcgttcgccctcgactccgacgaggagggcggtaacggtggtgcggacgacagcgacgacgaggccggcgacctgggcgcgtcggcgtga

SEQ ID NO: 82295 - DNA, 3174 bp, Oryza sativa
  Clone ID: PAT_MRT4530_81739C.1
atggcacggggctccgctccgcttgacggtagcgtgctgccgccttcccgcatcgtgaacgagagacaggccgggctgccgcgccgcttcatgccggaatctgccaccggccgggagatagtctcgctgggcgagggatgcccggcgccacgctacccggggcggtccgtcttcttcctcccttttgctatggcagggctggttccgccattttcttctttcttcatggatgttctggagttttacgatctccagatggcgcacctcacccccaacgcggtaatgacattggccatcttcgcgcacctgtgcgagatgttcatcggggtgcgcccatcccttcggctgttccggtggttcttcaccgtacagccggtgtcgccgccgtcggtggttggtggttgctacttccagccgcgggggccggtgctgaaccgctatattccctgcgtcctccgcaagaagtgggatgactggaagagcgactggttctacacccccctcgccgacgaagcgcgcctccgacttccgagccagcctccagcgcaggcctccaactggcgggtgccggtagatctgggagatggctacgacgccgtcctcgaccgcctggcgggcctgcgatcccaggggctcacaggggccatggtgttcggcgactatcttcgtcgccggatcgcgccactccaacggcgcgcccggggcgcctgggagtacaccgggtccgaggactgtatgaggacccaccagggggtcagatgggactgggctcctgaggacttcaagatagtggtccaacgggtgctgaatctcagctccgtggaggcatccctcattcctcaaggagtcctccccctctgcagcgatccagaccgcgcctccatcctgaccatcatgcagacggtcggggcgtcggaggagcgggctcctcgaggccacgatggcgcgggcgggagccgcggggggggggggggaacaatctaccccgggagggggtcgtgcttctgggccccgcgtcgggggcccggggagcggccgccctgccgacgcccgggggaagaggaagcaggaaggaacccctcccccatctcctccccgagggggcggggcggcgcgtgccagcagcaggcgcccggagggggccacgccgacgtcgcagcccgagggggagcggaagaagaaacggccccgcaagatgggggggacagaaccatcccggggaaaccttatttcccctccaagatcccgtcgcgtccctcccgccattccaagtccggccagtctgaggccgaggacccggcgaccacagaggcccggaggcgggaatctgaccggcgagaagccgtggatcgccttcgggaagccgaggaggccgctcgggaggccgctcgggctcgccagaccaaggaagccgttcgggaggaggccggaccccgccaggccgaggcaacgacatcctccgaggcgacccgtgaaactgaccggcaagaggccgcggatcgccttcgagaagccgaggaagctgcccaggtggccgtccgagctcgtcaagctgaagaagccgctcgggaggaggccagacttcgccaggccgaggcgacgacgacttccgaaacagctcgcgatgaggccgcgagcgcatcgcttgggcccactccctcgtgcgacgctcaggacaaaccaggtccgggggacatccccgagcccggcacgtccatcggcgggccaagccgcgcggcatcctcttcgaggcggctcttccccacgccttccgttgctccactgagcgcagaacctcttctgcaggccttggccgtcgctaacaccacagtgttggacgggttaagtgcccaggtggaggccctgcaagcaaagcgggtggagctcgacgccgcatgggcgcgtgtcgaagaggggcgacgctcggtggaggccatggtggaggtgggccgcaaggcacaccgccggcacgtctcagagctcgaagcccgtcggaaggtgctgggggagatcgccaaggaggtggaggaggagcggggggctgccctcatcgccaccaccgtgatgaacgaggcgcaggacaccctccgccttcaatacgggagctgggaggcggagctagggaagaagctcgacgccgcccggggggtccttgacgctgccgctgcccgagaacggcgggcggcggagaccgaggtggtatcccggcggcgcgaagaagcccttgaggcccgtgccatggcgctggaagagcgtgcctgcgccatggagagggacctggcggatcgcgaggccgccgttgctattcgggaggtcacactggcggtgcacgaagccgcctgtgccgaagaagagtccgcgctccgcctccgcgaggacgcgctcaccgagcgggagcgagctctcgaggaggccgaggccgcggcgcaacggctggcggacagcctgtccctccgcgaggctgcgcaagaggaagaagcgcgccgtaatctggaaggtgcccgcgccgagagggccgcgctgaaccagcgggccgctgagttcgaggcgcgggagaaggagctggacgcgagggcgcgcagcggcggggcggccgcgggcgaaagcgacttaaccacccgcctcgcagctgccgaacacaccatcgccgatttgcagggcgcgctagactcgtccgccggggaggtcgaggccctccgcttggcaggcgaggtagggcccggcatgcttcgggacgccgtctcccgtctagaccgcgccggtcggcaggtgggcctctggggcgggcggactgcgaagtacgccgccaaccaggggggcctcgcccagcgcctctcggagatagccgggactctccaacggctccccgaggagctcgagaggacgattaagtcatcctcgagggacctcgcccgaggagcggtggagctcgtactggcgagttaccaagccagggatcccgacttctccccatggacggcgctggacgagttccctcccgggaccgaggatggcgcgcgcgcgcaggtccgggacaccgccgaccatatcgtccacagcttcgagggttcggcccctcggctcgcattcgccctcaactccgacgaggaggacgatgacggcagagtgggcgacagtggcgacgaggctggcgacccgggtgcatcggagtga

SEQ ID NO: 82296 - DNA, 468 bp, Oryza sativa
  Clone ID: PAT_MRT4530_8173C.1
atggcgccgcgaccgcgagcagcagtagcactcctcgtcatcatccccgtcctcctcctgctggtgctcctcccgcggccacctacgacctcccccagctccgtcgtcggcttcgccgccaccagacggctcagcggcggcgccaacagtggtccgccggcccacgcgccgtcggcggcaccctccccgtcccccggccgaggccgcctccaccccaccaccaccaccagcgccgcgcctcgtccgccgcccccgcggggctacggaggggagaggaagcggcggctcaagctcaacctcggcgagagggtcgggatcgcgctcgccgccgtcgccgcggcattgcaggtggccctcgtcggcgcgtgtctggcgttgctcgctcgccagctccggcggggcaagccccgcgacagcgaggatgcggcggcggcggcgtcctcctcttccgcgccaccgccggcgtga

SEQ ID NO: 82297 - DNA, 387 bp, Oryza sativa
  Clone ID: PAT_MRT4530_81740C.1
atgctacgtcatctctctcccttcctcctcctctctctctctctcctctcctctcctgtcctctcctcttctcttctcctctcctcttctgtgggcaagccggccggcggctggggaggaggccgccggggcgaggcgggagaggagggcggcggcggcagccttcgcagtgggggaagctgccgccggcggacgcgtcgaggtattgctgcagcggaggaggacgacgaggaggagatggggctcgtgaggtcgagctcggtctccgcgacggcagtggaggaaaaagcggcggccgtgacggcgaaggcgtggtggggttggcacttcccgagcccgctcaaggcgttccggcaccggagatcatcggcgagcatgccggagtga

SEQ ID NO: 82298 - DNA, 3892 bp, Oryza sativa
  Clone ID: PAT_MRT4530_81741C.1
atggcacggggctccgctccgcttgacggtagcgtgctgccgccttcccgcatcgtgagcgagagacaggccgggctgccgcgccgcttcatgccggaatctgccaccggccgggagatagtctggctgggcgagggatgcccggcgccacgctacccggggcggtccgtcttcttcctcccttttgctatggcagggctggttccgccattttcttctttcttcatggatgttctggagttttacgatctccagatggcgcacctcacccccaacgcggtaatgacattggccatcttcgcgcacctgtgcgagatgttcatcggggcctccaactggcgggcgccggtagatctgggagatggctacgacgccgtcctcgaccgcctggcgggcctgcgatcccaggggctcacaggggccatggtgttcggcgactatcttcgtcgccggatcgcgccactccagcggcgcgcccggggcgcctgggagtacaccgggtccgaggactgtatgaggacccaccagggggtcagatgggactgggctcctgaggacttcaagatagtggtccaacgggtgctgaatctcagctccgtggaggcatccctcattcctcaaggagtcctccccctctgcagtgatccagaccgcgcctccatcctgaccatcatgcaggcggtcggggcgtcggaggagcgggctcctcgaggccacgatggcgcgggcgggagccgcaggggggaacaatctaccccgggaggggggtcgtgcttctgggccccgtgacgggggcccggggagcggtcgccctgccgacgcccgggggaagaggaagcaggaaggaacccctcccccatctcctccccgagggggcggggcggcgcgtgccagcagcaggcgcccggagggggccacgccgacgtcgcagcccgagggggagcggaagaagaaacggctccgcaagatgggggggacagaaccatcccggggaaacctcatttcccctccaagcgagatcccgtcgcgttcctcccgccattccaagtccggccagtctgaggccgaggacccggcgaccacagaggctcggaggcgggaatctgaccggcgagaagccgcggatcgcctacgggaagccggggaggccgcccaggtggccgtccgagctcgccaagctgaagaagccgctcgggaggaggccagacttcgccaggccgaggcggcgacgacttccgaggcagctcgcgacgaggccgcgggcgcatcgcttgggcccactccctcgggcgacgctcaggacaagccaggtccgggggacatccctgagtccggcacgtccatcggcgggccgagccgcgcggcatcctcaccgaggcggctcttccccacgccttccgttgctccactgagcgcagaaccccttctgcaggccttggccgtcgcaaacaccacggtgttggacgggttaagtgcccaggtggaggccctgcaagcagagcgggcggagcttgacgccgcatgggcgcgtgtcgaagaggggcgaagctcggtggaggccatggtggaggtgggccgcaaggcacaccgccggcacgtctcagagctcgaagcccgtcggaaggtgctgggggagatcgccaaggaggtggaggaggagcggggggctgccctcatcgccaccaccatgatgaacgaggcgcaggacaccctccgtcttcaatacgggagctgggaggcggagctagggaaaaagctcgacgccgcccggggggtccttgacgctgccgctgcccgagaacggcgggcggcggagaccgaggtggcatcccggcggcgcgaagaagcccttgaggcccgtgccatggcgctggaagagcgtgcctgcgccgtggagagggacctggcggatcgcgaggccgccgttgctattcgggaggtcacactggcggtgcacgaagccgcctgtgccgaagaagagtccgcgctccgcctccgcgaggacgcgctcaccgagcgggagcgagctctcgaggaggccgaggccgcggcgcaatggctggcggacagcctgtccctccgcgaggctgcgcaagaggaacaagcgcgtcgcaatctggaaagtgcccgcgccgagagggccgcactgaaccagcgggccgctgaactcgaggcgcaggcaagggagctggatgcaagggcgcgtagcggcggggcggccgcgggcgaaagcgacttaaccgcccgcctcgcagctgccgaacacaccatcgccgatctgcagggcgcgctagactcgtccgccggggaggtcgaggccctccgcttggcaggcgaggtagggcccggcatgcttcgggacgccgtctcccgtctagaccgcgccggccggcaggcgggcctctggggcgggcggactgcgaagtacgccgccaaccaggggggcctcgcccagcgcctctcggagatagccgggactctccaacggctccccgaggagctcgagaggacgattaagtcatcctcgagggacctcgcccgaggagcggtggagctcgtactggcgagttaccaagccagggatcccgacttctccccatggacggcgctggacgagttccctcccgggaccgaggatggcgcgcgcgcgcaggtccgggacgccgccgaccatatcgtccacagcttcgagggttcggcccctcggctcgcgttcgccctcaactccgacgaggaggacgatgacggcggagtgggaccggtggtcccacccgtcagctcctcctcctacctctcgccggccgaccccaaccgccatagccgtccacgtcgccgcaaaatccggcgccctcccgcacccgagctcgcatccaacgacgtgggcacgatcccctccacccgccgcgccctccctcgctctccccgcgccgagcccaagcaccgccgctctccggcgaactccagcagcgccgcgccgccgctcccgtccaccccgcactgcgccgtcgccctccccggcaccgcagtcgccgtgcgcaccccgtccaccgctcctcttcgccaatccaccgccgcaacgccgcttccaccgtgcatcccgagccacctccaccatacgccgcctccagccgtgtgccaccgtcgccttagccgccgccgcgtcgctccgtcttcacctctcgcctcgcagcgccgtgcagcacctcggtcaccgttgttcatcgccggaaacccaccggaacgtggtatctctcggtcgccggtgagccccaccattcctctcctctctggcgtggtattctcgccgctccggtcgcctatttccctccctaaccgctccaataatttccctaggtcttgccggccctcggccgcggctccgccatggtcgggcgtcgtcggaccgccgttcccgtcgcctcccgtgtcggccgccgccatcctttccgccgccggtcgcctccccatggtcgtcccgtcgccggcgctcctcggtgaggacccccttcatctcctttccctttcccctcttttcgtcgcctcccgtgcgtgccgtcgcgccggtggtcgtcgccggcgaccatcgggccgtgcgccgtcgctcccggccggccgaccggtgagctggctcccgctcgcccgtggccgcccgatcctccttcggggcgatctgggccgtccacgtggccttcccgtgccgcccgcgtcggtgcctctgtggcgccacgtcggcgccacctccgctagccgtccgtcgtggccgccacgtgtctgccacgtggtgcgcccgcggaccagcgcgtgcgtggactcggtccacggtgcgcccgccacccgtgagtcaccgtcaggtggggcccgcttgccggcgccacctctccccgtcggatga

SEQ ID NO: 82299 - DNA, 1475 bp, Oryza sativa
  Clone ID: PAT_MRT4530_81742C.1
ccgcttgcctccgtcgccgtcgtctggtgtctccgcctacacggctagcctgttatgccgccttcgttgggcgtctacgacttcaccgccggctcgcctccgtcgccgccgactggtgtcaccgcctgcacggctggcctgttatgccgccgtcgttgggcgtctatgacttcaccgccggcttgcctccgtagccgtcgactggtgtcaccgcctgcacggctggcctattgtgccgctgttgttgggcgtctacgacctcaccgaccggcctgcctccgtcgccgccgactagtgtcatcgcctatacggttggttggtcacaccaccgttcatgggcatccacgtcttcaccgaccggcttgccttcgtcactgccgactggtgtctccgcctacacggctggcctattatgccgctgttgttgggcgtcgacgacttcaccaccggcctgcctccgtcgccgctgactggtgttcccgcctgcatggctggcctattatgccgccgttgttgggcgtctacgtcttcaccgaccggccgcctcatccgccgctgactggtgtttccgcctgcacggctggcctattatgccgccgttgttgggcgtctacgtcttcaccgaccggccgcctcatccgccgccgactggtgtttccgcctgcacggctggcctattatgccgatgttgttgggtgtctacgttttcaccgaccggccgcctcgtccaccgccgactgttgtttccgcctgcacggctggcctgttatgacgccaactgatgctatcttcttcacggccggctaccctctacgtttggtttataccgctaccactactgatggacatcattgtcttccgtcgccgactggttatgccgccgccaactggtgcttttatcttcacaactgcgcgtcttcactaccggtttgcttctgttgccaccgactcgtgttcactttatcacggcaaggcaactttgtcatcatggtagagcgacttcatctttattatcttcggcaccgacaaactctattgctgctacttcgcaagttttgctacttcaccagccacgacgtctacaagagcttcgacatctcggcatgcgtcaccaaatatgatgccgtattattttactacaacaagtggtgttcaaatctttaatattttttctcggacatctgcaacatgcatcttcacttttgattgcaatggctactcgacgacaagaagctacagttctcgactctatgttcagttgtttcctaactaatcaaagagtcgggggctacacaaatacaaggctcctcggtttagacgagttggacaacagcatcaactctcctccaagtgaagcatctgttgccgctaatcatcattaccgtcggatgcgtttgccatcgctgactattttcttcatcttcatgattggtggatttcgctatcaccgttgatgcgcgtctacatcttcaccg

SEQ ID NO: 82300 - DNA, 180 bp, Oryza sativa
  Clone ID: PAT_MRT4530_81743C.1
atgaccgacgccggggaaggaactgatggagaagagccggagtcggaggagagggccgccgctcgcgaccggagtgacgacgagagcagcgccgcgccgcgcctcgcctcgccgccgccagagctagggaatcgggaccggtctcccggcagcgacgcggacctccctggtagaccttaa

SEQ ID NO: 82301 - DNA, 247 bp, Oryza sativa
  unsure (1)..(247): unsure at all n locations
  Clone ID: PAT_MRT4530_81744C.1
cttctctctccctctctgctctgctcttcctgagctccgcggcaaggaagcttctggaaggttctgcgggatgacgacgagcagctggggtggtggtggtggtggcggcnncnncnncccncggctgcngcgctgcggcctcctcctgacgctcctttcaggcggtggccggtggcgcatgcgccatccctcaaaggcccccggtctacatgacctctacccgatttcgctcccatcctcataactg

SEQ ID NO: 82302 - DNA, 420 bp, Oryza sativa
  Clone ID: PAT_MRT4530_81745C.1
atgtggctctccagcctggccctccccccgcgcctcgcgagtctcagaagcagccagggggcctcggggtgccacgtcacgcccctcgggccctcgcgctgccttgccctgaggccctcgcccaactgccatgtggcggggggagcgagcggggaggagacccaggctgaaccgccatcaatgcgcgcggcgccccaactgtccctcaccgcatttaatacgctaagggcagacgtgcggtgccgtccgactgacccacgtcaatcgggcggccgcgcccccacgtccgtctctgtctccggcggagtggaggcagggttgtcccccgtgtcaagcggggggtggcgctgggtcccgctcaaggacagactgctgcttagcttccgggcgaaggcacggatcgtggcccggtcgaggtaa

SEQ ID NO: 82303 - DNA, 4776 bp, Oryza sativa
  Clone ID: PAT_MRT4530_81746C.1
atgggttccgtctccggcatcgacaacttcgtcttccctcccgggcaggcgtttcggttcggcagcctcaacttcatcaccaacgacttcggtaagatctctctcctcgactcagatccaaaccagtcgggaaagaaccaggtctcagccccgttcggtattccgaactcggccaagatctactccaagcttatctcgctcgagtcggcttcaaaccacttggacgagatcccatctactccgacaccaccagatcaagatgatggggcctacccgccaatcatgatgaaactccccgacgatttggctgcagtcttcactacaagggcgtcttctccccgtaggcctaggcggaagttggcttcaacaccgatcatgcctagctccagggaagtcggcatcatactccagccactcggcacgatttcgacggatcaactggaaggctacctcagctcccccggcatcgactcacgaccaacagagatcgtggagtacgacgaattcggctaccgctacgacagctgcgacctcgacgacttcgacgaaagctttgaagacaattacacccctctctacttcggcgtcttcatggccgacaacgagacggaagaacaatgccaagcccgagaaacagaggcacgacgccaagacgtcgaggggacagcggtctttcgcacccctcaacagaacgctgtcgctgcgatcacccttctcgacaccctcctcaaggaagacgcactcaatcaagctgatcacgtcgtcaacatcttgaaccagaccaagaccatgatcgccgcttcggtcccggttaacttcggaagcatccgcacgccgactggcagccgggctccccatctccgatctcatgattaccaccagccaagcctcagcatcgccggcataggatccaatcgcaggagcaggggccacgacgagcgatctgttcactcacctcctgagcgacacagggagcgccgagttgaacggccttgctccccaccttgccagtgtcctgtcgatcttcgcgataagattaaccagcgccgtgcagcacgaggtcaccgccattcaccagatcgctacgacgacgacatggatggagtagctgcctttactaatgacctgcgtcgagtggattggccagccggcttcaagccgactggaatcgagaagtatgacggcaccactaatctggagtcttggcttaccgtctacggtctcgcaatccgtgcagcaggaggagacagcaagaccatggcaaactacttacctgtggccctagctgattctgcccggtcctggctccatggattaccccgtggcatgattggatcatggacagaacttcatgaccacttcatcgccaacttccaggtcacctttgaacgccccggcacacagtttgatctctacaacgtcattcataagtttggagaatcccttcgagattacatccgacgcttctctgaacagcgcaacaagatctccaacattaccgacgacgtcatcatcgccgctttcaccaaaggaattcgccacgaagatctagtcggcaagttcgggcgcaagcctcccaagacagtcaaacagatgtttgaaaaaaccaacgagtatgccaaagccgaagacgccattatcgcatccaagcagtcgggtcctacttggaagccaaagaaagacgcgccgactacgggagggggtggaagtaacaatcacaaggaccgcaagcagcaatatgccaagaatgcacggaagacccctgacggagaacaaagcacgtcgaaaaagaaggatgatgatgatgacgccccgacagattttcaagatcaccgcaaggagctcaaccatatctttggcggccctctagcttacgaatctaaaagaaagcaaaatctgactgaaagggagatcaatgctgttcagcccgatatgccccaatatcttcggtggtcggagataacaatcaagtttgaccactcggatcatcctgaccgagtggtccacccggggcggtaccccctggtactagacccagtggttcgcaacgtcaagcttcgcagatctctcatcgatggtggcagcgcactcaatatcctcttcgccaaaaccctggatgacatgcagatcccgcgcaccgagttaaagccgagtaatgcacccttccacggagtcatcccagggctatcggcaacaccactcggccagatcactcttccggtcacttttggtactcgggagaacttccgcacagagaacatctgcttcgaagtcgctgatttcgagacagcgtatcacgccatactcggacgcccggcgttagccaaattcatggccgtcccgcactacacctacatgatgatgaagatgcctggtcctcggggagtcatatccctacggagcgacatcaagcaagccgtcacatgtgacaaggaaagttgcgagatggctcaaacccgcgagatcgcgattgctcgagaagacatccgactggctgcaaccacgacaagcgaaggagaagaaagcgcgctcatcacctttcttcaaaacaataaagatatctttgcgtggaaaccatctgatatgcctggtattcctagagaggtgattgagcactctttgcacgttaaggaagacgctaaacccatcaaacaacgactccgtcgctttgcacaagacaggaaggacgtaatcaaggaggaattgaccaagctgttagcagtaggcttcatcaaagaagtccttcatcccgactggctggctaaccccgtcctagttcggaaaaagactgggcaatggtgcatgtgtttcgattacaccgacctcaacaagtcctgccccaaagatcctttcgggctgcctcgcattgaccaggtagtcgactcgaccgccggctgcgagctgctcagttttttggattgctactcgggatatcatcagatccgattgaaggaatccgactgcttgaagacttcgttcatcacgccctttggagcctattgctatatcaccatgcctatcggattgaagaacgcgggagcaacttatcaacgcatgatccagagatgtttctcgactcaaattggtcgcaatgttgaagcctatgtggatgatgtggtcgtcaagaccaagcagaaggatgatttgattacggatctggaagaaacctttgcgagcatccgcgctttcaggatgaaactaaaccctaaaaaatgcaccttcggagtaccgtcagggaatctgcttggatttatggtgtctcacagaggcatacaggccaacccggagaaagtcaacgccatcctcaacatgaagccgccgagttcccaaaaagacattcaaaaactgaccggatgcatggcggcgctcagccggtttgtttcacgactcggcgagcgggggatgcccttcttcaaactgttaaagaaaacagacaatttccagtggggacccgaagcacagaaagcctttgaagatttcaagaaacttctcactactctaccagttttggcctcaccacacccacaagagccgttattactatacgtatcggctacctctcaggttgtgagcgtggtcctggttgtcgagcgtgaggaagaaggccatgttcagaaagtccagcgaccgatctacttcgttagcgaggttttggccgactccaagacgagatatcctcaagttcagaagctgttgtacgaagaagggagacaattgctgaaggacatacattctggtatctgtggcaaccatgctgctgcacgcaccatcgtcggcaaggcttatcagcaaggttttttctggcccactgctgtgtccgatgccaacaagatcgtgcggacatgtgaaggttgtcaatttttcaccagacaaactcatctgccggcccaagagttgcaaaccatcccgctgtcctggccgtttgcggtttgggggcttgacatggtcggcccgttcaaaaaggcagtcggcggttacgcacatctctttgtggctatcgacaaattctccaagtggattgaagctaaaccggtcatcacgatcacgacagacaaagctagagattttttcatcaatattgtgcatcggtttggagtacctaatcggattattactgataatggcactcaattcactggcggagtatttaaagatttttgtgaagacttcggcatcaaaatttgctatgcctctgtagcgcatattatgagcaatgggcaagttgaacgagccaacggcatggtcctccaaggaataaaggcacgagtttttgaccgactgaatccttatgccggcaaatgggtggaacaactgccatctgtactttggtccttgcgcaccacccccagtcgggctacgggccagtcgccattcttcctagtttatggagcagaagcaatgttgcctagtgaagtagaatttgaatcattgcgttttcgcaattttcgcgaagagcgctacggggaagaccgagtggatgacctacaccgactggaagaggccggtgaagcagccttaattcagtcggctcgatacttgcaagggttgcgtcgctatcacaatcgtaacgtccgaatgcgtgctttcttactctgcgacctggttttgaggaaaattcaaactacacgggatcggcacaagttatcccctttatgggaagggccatttataatctctgaagtcactcggccaggttcctatcgactcaagtgtgaagacggtacacctatcgacaattcttggaatatcgaacatcttcatcgtttttatgcttaa

SEQ ID NO: 82304 - DNA, 2097 bp, Oryza sativa
  Clone ID: PAT_MRT4530_81747C.1
tatcactagtgtttccgcttgcatggccggcctatcatgccgccgttgttgggcgtctacatcctcaccgaacggccgcctcgtccaccgccgactggtgtttccgcttgcacagcaggcctattatgccgccgttgttgggcgtctccgtcttcaccgaccggccgccttccccgccgccactggtgtcctcgcctgcacgactggcctattatgtcgtcgttgctgggcgtctacgtcatcatcgatcggccgcctcgtctgccgccgactggtgtcctcgcctgcacgaccggcctattatgccgccgttggtgggcgtctccgtcttcaccgaccggccgccttcgccgcagccgactggtgtcctcgcctgcacgacaggcctattatgccgtcgttgctgggcgtctatgtcttcaccgaccggccgcctcgtctgccgccgactggtgtctccgcctgcacggctggcctattatgccgccgttgttgggcgtctacgtcttgaccgaccggccgcctcgtctgccgccgactagtgtctccgcctgcacggctggcctattatgccgccgttgttgcgcgtctacgtcttcaccgaccggccgcctcgtccgccgccgactggtgtttccgcctgcacggctggcctattatgccgccgttgttggccgtctacgtcttcaccgaccggccgcctcgtctgcggccgactggtgtcttcgcctgcatggctggcctattatgccgccgttgttaggcgtctacgtcttcaccgaccggccgcctcgtccgccgccgactgatgtttctgcctgcacggctagcctattatgctgccattgttgggcatctacgtcttcaccgaccggccgcctcgtccgctgccgactggtgtttgcgcctgcacggctggcctattatgccactgttgttgggcgtctatgtcttcaccgaccggccgcttggtctgccgccgactggtgtctccgcctgcacggctggcctattatgccgccgttgttgggcgtctacgtcttcaccgaccggccgcctcgtccgccgccgactggtgtgtccgcctacacggctggcctattatgccgccgttgttgggcgtctacgtcttcaccgaccggccgcctcatccgccgccgactggtgtcaccacctgcacggctggcctgttatgacgccaactgatgctatcttcttcacggctggctacatcgccgtcaccgctaataggcgtcagcatcttcaacacaagctgcctacgtctgctgaccgactggtttcttcacttccatggctgcatgattctctactggttatgccgctgccgactggtgcttttatcttcacaactgcacgtcttcactaccggtttgcttctgttgccaccgactcgtgttcacttcatcacggcaatgcaactttgtcatcatggtagagtgacttcatctttattatcttcggcaccggcaaactctattgctgctacttcgcaagttttgctactgcaccaaccacgacatctttgtgaacctcgacatctcgtgatgcagcaacgggggcgatgccgtgttattttactacaacaagtggctctccaatattcaggatttctacttggacatcttcaacgcatatcttcaatcaagcaatgactactcgatgacaagaagttacagttctcgactctatgttcagttgtttcccaactaaccaaagagtcgggggctacacaaatacaagactctcaaaattcgacaagctgaagtaatcaattaatcagccaacgagtcaattccaggagtcattatcttcgtcttcgttttagagcagagttatcaaccaatcagctcagtttcgacgagttggacaacatcatctattttcctccaagtgaagcatctgcaacagctataccaccaatttgatggattattgtcactgacatcatcaccagcacctctgcttcatcggccctgacatctctgctgttgctaatggatgattatgttttcgccgacttattatttcaccttcacggttgacctggctgtagccgactggtttcttcgcctccat

SEQ ID NO: 82305 - DNA, 5364 bp, Oryza sativa
  Clone ID: PAT_MRT4530_81748C.1
ttaaagtatcatgccgttagcgcgctcgacttgtccgttactcatagggtgtgccacggaggcgtaacaaattttaatgccgaagtcttcacaaaagtctttaaatgctccgccagtgaattgagtgccattatcagtgatgatccgattaggtaccccaaaccgatgcacaatgttgatgaaaaaatctctagctttatctgctgtgattgtgatgaccggtttagcctcaatccacttggagaatttgtcgatagccacaaagagatgcgtgtaaccgccgactgcccttttaaacgggccgaccatgtcaagcccccagaccgcaaacggccaggacaacgggatggtttgcaactcttgggctggcaaatgagtttgcctggcaaaaaattgacaaccttcgcatgtccgcacaatcttgtccgcatcggacacagctgtaggccagaaaaaaccttgccggtaagctttgccgacaatagtccgtgcagcagcatgattaccacaaataccagaatgtatatccttcaacaactgtctcccttcttccaaagacacacagcgctgcagtattcctgatggacttttcttgtacagctcagtctcatgaataatgtaaagtctgttgcgcctggaaatccgctcggcttcatttttgtcttgagggagttcttgtttgctcagaaattttgtaaatggttctctccagtcagcttcgatcatgcttacgccttgaatatccatggctttgactgtctcttttctgggtacggtcggttcgtaaagatgttcgacgaacacatctgaaggagctgcttcccgttttgaaccaaaattggccagtctgtcggctgcctcattgttatgtcggagaacatgggtgagctcgagtccatcgaatttattttccaacttgcgtacctcttgtcgataagcggtcatattatcatctagacatgaccactctttcatgacttgattaacaaccaactgagagtctccaaggacgattaatcggcgaatgcctaaagagattgcaatccttaatccatggagtagtgcctcgtattccgccacgtcatgggacgcagaaaaaggtatccacaatacgtagcccaatctttctccagtcggggagattaaaacaaccccagctccagtgcctgtaagcctcttcgacccatcaaaatgcatagtccaatattccatcttttcctctggcatgtcttcttggcactcggtccactcggcaaggaaatcagctaaagcttgtgacttgatcgaagttcgtggcttgaacgatatgtccgaagacatcaattctaaagcccatttcgcgatccatccgtttgcttcgcggttataaagtatatccctgagtggaaacgatgtgactaccgtgaccgggtgactttgaaagtagtgagataatttcctgacggtaattaagacaccatatagtaacttttgaacctgaggatatcttgtcttggagtgggctaaaacctcgctaacgaaataaattggacgttggactttttgaatatggccttcctcttcacgctcgacaaccaggaccgtactcacaacctgggaggtcgccgacacatataacagtagcggctcttgcggatgtggcgaggccaaaactggtggagtggtgagaagtttcttgaagtcttcaaaggctttctgtgcttcgggtccccactggaaattgttagtcttcttcagcaacttgaagaagggcatcccctgctcaccgagtcgtgagacgaaccggctgagcgccgccatgcaaccagtcagcttttggacgtcttttcgggagcttggcggtttcatgttgaggatggcgttgattttctccgggttggcctgtatgcctctttgagaaaccataaatccgagcaatctccctgacggtactccgaagatgcacttttccgggtttagtttcatcttgaaagcatgaatgcttgtaaaagtttcttctaaatccgcaatcaggtcatccttctgcttggtcttgacgactacatcatcaacataagcttcaacattgcgaccgatctgagttgaaaagcatctttgaatcatgcgttgataggtcgctcctgcattcttcaatccaaagggcatggtgatgtagcagtaggccccaaagggtgtaataaacgaggtcttcaagcagtcggattcttttagtcggatctgatgatatcccgagtaacagtccaagaagctgagtaactcgcagccggccgttgaatcaaccacctggtcaatgcgaggtaacccaaaagggtctttgggacaagatttgttgaggtcggtataatcgacacacatgcgccattgccctgtctttttccgaaccaagactgggttagctagccagtcaggatgaaggacttccttaatgaagcctgctgctaacagcttggttaattcctccttgatcgcatccttcctatcctgtgcaaaacggcggagtcgttgcttgatgggtttggcgtcttccttaacatgtaaagagtgctcaatcacctctctggggataccatgcatatcggatggtttccacgcaaaaatatctttattattagcagtcttatcaagatcagagggatctaagggaatcttttttgtcttggcatcactttcttcggtcttcgtcagcttggttgcaggcacttctccctcgcttgccgtggtcgcagtcagccggatctcttcgcgggcaagagtagtctcgtgggtttgggccatctcgcaactttctttgtcacatgtgagggcctgcttgatgtcgctccgtagtgatatgactcctcgaggaccaggcatcttcatcgtcatgtaggtgtagtgtgggacggccataaatttagctaaagccggtcgtccaagtatagcatgatatgctgtctcgaaatcagcaacttcgaaacaaacattttctgtgcgaaaattctcccgagtgccgaaggtaactggaagagtgatctggccgagtggtgtagctgacaatcctgggataacaccgtggaagggtgcattactcggctttaattccgtgcgaggaatctgcatatcgtccagggtcttagcgaaaaggatgttgagtgcattgccaccgtcgataaaagtccgtcggagcttgacattgcgaaccactgggtctagtaccagggggtaccggaccactcggtcgggatgatctgagcggtcgaacttaattgctatctctgaccaccgaagatattggggcgtattaggctgaaccgcattgatctcccgttctgttagcttctgttttctcttagactcataagctaggggtccgccgaagatgtgattaagttctttgcgatgatcttgaaaaccaggcggggcatcgtcttcatcatctttcttctttgatgtgccttgatctccgtctgagggtttacgtgcgttcttaacgtattgctccgcgaactgtttgtagacgaagcaatctttggccacgtggttggagttgggatgatgcggacattgggagttcattatcttgtcgaaggtgttgacgcgggaacgttgtcgggaagatggagaggtggtcgccacaagttcttcgggcttacgcttgcgatccttgtggttgttacttccactccctcctgcggtcggcgtatccttctttggcttccaagtggtgcccgactgcttggacgccgtgatagcatcttcggctttggcatactcattggctttttcaaacatctgtgtgaccgtcttgggaggtttgcgtccgaacttgccgactaggtcctcgtggcgaatgcctttagtaaaggcagcgatgatgacgtcgtcggtgatgtcggagatcttgttgcgttgctcagagaagcgtcgaatgtaatctcgaagagattctccagacttctgaacgatgttgtagagatcaaagtgtgtaccgggccgttcaaaagtgccttggaagttggcgatgaagtgatcgcgtagctctgcccatgatccgatcgtgccgcggggtagcccgtgaagccatgaccgggcagaatccgctaaggccacaagtagatagttcgccatggctttgctgtctcctcctgctgcgcggattgcgagaccatagacggtgagccaagactcagggttggtggtgccgtcatatttctcgattccagtcggcttaaagccggctggccaatccactcgacacaggtcgcttgtgaaggcagcaactccgtccacgtcgtcgtcgtagcgatctggtgaatgatggcctcttgctgcacagcgctgattgatggtatcgcgaagatcgatggggcgccttcgatgtggggagtgtggtcgttcaactcggcgctccctatatcgctcgggaggcgagcgaacggaccgttcatcatgtcccctgctcctgcgactagattcgacgccggcaatgctgaggcttggctggtgatagtcttgagatcgaagatgagggactcggctaccagtcagggtgcgggtgcttgcggagttggctggaaccgaggcagcgatcatggtcttcgtctggttcaagatgttgactacatgatcagcttggttgagtgcgtcttccttgaggagggtgtcgaggagagtgatcgctgcaaccgcgttctgctggggggtgcgaaaaaccgctgtcccatcgacgtcttgttgcccaatgagctctctcgctcgccgcccagattccaaggcatgttgtcgtcgatcttcagcctcgccgaagaagaggggcgtgtagttatcctcatagctgtcgtcgaagttgtcgaggtcaccgtggtcgtagtggtagccgaagtcgtcgtagtcgaggatctcggttggtcgagaactgacgccgggggagctgaggtagccatccaactcttccgtcgagactgtcccaagaggttggagtataacgccaacctccctggatctagatcggatcggggctaaagccggagctcgcctagatcttcgagtgggagatgtcttgactgtgaagacagcggccaaatcatcaggaagtttcatcaggattgagggataggacccgtcgtcttgatctggtcgtggaaaaatagattggatctcgtccgagtggtttgaagccgactcgggagagatgatcttggcgtaggctttggccgagttcggaataccgaacggcatggggacctggtctctccccgactggtttgaatccgagtcaaggagagagatcttgccgaagtttttggtgatgaagttgaggctgccgaaccggaacgcctgcccgggagggaaggcgaagtcgttggtgacagaaacggaacccat

SEQ ID NO: 82306 - DNA, 454 bp, Oryza sativa
  Clone ID: PAT_MRT4530_81749C.1
ctcacctgtccgtgaataaaagtgtgtggcttaaaaaaaaaaaaaaaaaaaaaaaaaaaaaataaaaaacaaaacgggctaggggttccaatctttcgtccgctttcttgcgcctctcctaactcttcttttttttcaccttattttaatataattgtccgtcgttttacattcgttttaactggcataaactttgcccccccaccaacttattttatctttcggcacttccccttttttccttttgtcgtcattacccattttcccttttggatcccttcttcccttccctttctcatcttgtttggctaattattccttccctctttttgctatttaatctcgcctccctccctggttactctccccatttttctttgctctctccaccatttataggccaccccccctttccctttctttctttcctttttctccaggttttttccctttt

SEQ ID NO: 82307 - DNA, 504 bp, Oryza sativa
  Clone ID: PAT_MRT4530_8174C.1
atggcgagagagaaatccaagaaggaggaggagggatccagtgcgacgaggaatccggcggccgagctcaccgaagacctcatcgtcgacatcctctcccgcctccccgtcaagtcggtctgccgatgcaagtgcgtgtccaggcggtggcgcggcctcatctccgaccccgaccaccgcaagaagctcccccaaaccctcgccggcttcttctacagcagcgagaacgaatcgagcttccccgatgaagaaacatttccaattgtcatttgtgaaacattggttgcacttgggcggttgagcctgaagcagagcaacaacaatgcattctcagaaggaaccgaagaacacttggctgcagtcagacatcttctcaggaaggagaaagtggtgaatctatcatctgtgaggatgaatatttcgctgcagcttgatatggtcatatggcttcttgctgaactgaaggatgtggaggcaggcaggttgtgctcgacgagctggtaa

SEQ ID NO: 82308 - DNA, 5822 bp, Oryza sativa
  Clone ID: PAT_MRT4530_81750C.1
cttctgacgggacagcccatacctacctccacttccgccggaagcaggcgcgacgtgggagatggctgtcggaaccaacgtgtcatctccaggagctaacacgccggctccggctagggacgagtgcttggagactctcgtcctgactggacggggcgaggcgtgcgtcagaccgcctgtcgccacctgacccacgatctgaccggtcaaacccatacacgcggcgcaaaatccacaaggggtcggggcgccccagccctcggggccaaggcgggagcggtccgaccccctcggggagacaaagaggagggcgaacacaccaccctcgggcccgacgccccccccccccgagggtgccaggccacgtgggcgattgtgtcctcctcgagggaagcggtcgggcgtgacgccacttcctaaggcctggtgacaggtgggaccggtttccacagttgggcagaaacccaacagtcgcaaatcacgcacatcggcaatggttactcggcttcgccacacgcgctcgctctcaaacatctcttcttccggcgtcatggcacggggctccgctccgcttgacggtagcgtgctgccgccttcccgcatcgtgagcgagagacaggccgggctgctgcgccgcttcatgccggaatctgcgaccggccgggagatagtctcgctgggcgaaggatgcccggcgccacgctacccggggcggtccgtcttcttcctcccttttgctatggcagggctggttccgccattttcttctttcttcgtggatgttctggagttttacgatctccagatggcgcacctcacccccaacgcggtaatgacattggccatcttcgcgcacttgtgcgagatgttcatcggggtgcgcccatcccttcggctgttccggtggttcttcaccgtacagccggtttcgccgccgtcggtggttggtggttgctacttccagccgcgggggccggtgctgaaccgctacattccctgcgtcctccgcaagaagtgggatgactggaagagcgactggttctacacccccctcgccgacgaatcgcgcctccgactcccaagccagcctccagcgcaggcctccaactggcgggcgccggtagatctgggagatggctacgacgccgtcctcgaccgcctggcgggcctgcgatctcaggggctcacaggggccatggtgttcggcgactatcttcgtcgccggatcgcgccactccagcggcgcgcccggggcgcctgggagtacaccgggtccgaggactgtatgaggacccaccagggggtccgatgggactgggctcctgaggacttcaagatagtggtccaacgggtgctgaatctcagctccgtggaggcatccctcgttcctcaaggagtcctccccctctgcagtgatccagaccgtgcctccatcttgaccatcatgcaggcggtcggggcatcggaggagcgggctcctcgaggccacgatggcgcggtcgggagccgcaggggggaacgatctaccccgggagggggtcgtgcttctgggcctcgcgacgggggcccggggagcggccaccctgccgacgcccgggggaagaggaagcaggaaggaacccctccctcatctcctccccgagggggcggggcggcgcgtgccagcagcaggcgcccggagggggccacgccgacgtcgcagcccgagggggagcggaagaagaaacggccccgcaagatgagggggacagaaccatcccggggaaaccttatttcccctccaaggtggtcgtttaaccgaccccctcgcagcgagatcccgtcgcgtccctcccgccattccaagtccggccagtctgagtccgaggacccggcgtccacagaggcccggaggcgggaatctgaccggcgagaagccgcagaccgccttcgggaagccgaggaggccgctcgggaggccgccctggctcgccagaccgaggaagccgttcgggaggaggccggactccgccaggccgaagcgacgacatcctctgaggcgacccgtgaaactgaccggcaagaggccgcggatcgccttcgagaagccgaggaagctgttcaggtggccgtccaagctcgcctagctgaagaagccgctcgggaagaggtcagacttcaccaggccgaggcggcgacgacttccgaggcagcttgcgacgaggccgcgggcgcatcgcttgggcccaattcctcgggcgacgcccaggataagctaggtccgggggatatccctgagtccggcacgtccattggcgggccgagccgcgcggcatcctcaccgagacggctcttccccacgccttctgctgctccactgagcgcagaaccccttctgcgggccttggccgtcgcaaacacgacggtgttggacgggttaagtgcccaagtggaggccctgcaagcagagcgggcggagctcgacgccgcatgggtgcgtgtcgaagaggggcgacgctcggtggaggccatggtggaagtgggtcgcaaggcacaccgtcggcacgtctcagagctcgaagcccgtcggaaggtgctggaggagatcgccaaggaggtggaggaggagcggggggctgccctcatcgccaccactgtgatgaacgaggcgcaggactccctccgccttcaatacgggagctgggaggcggagctagagaaaaaactcgatgccgcccagggggtccttgacgctgccgctgcccgagaacggcgggcggcggagaccgaggtggcatcccggcggcgcgacgaagcccttgaggcccgtgccatggcgctggaagagcgtgcctgcgccgtggagagggacctggcggatcgcgaggccgccgttgctattcgggaggtcacactagcggtgcacgaagccgcctgtgccgaagaagagtccgcactccgcctccgcgaggacgcgctcaccgagcgggagcgagctctcgaggaggccgaggccgcggcgcaacggctggcggacagcctgtccctccgcgaggcttcgcaagaggaacaggcgcgccgtaatctggaagatgcccgcgccgagaggaccgcgctgaaccagcgggccgctgagctcgaggcgcgggagaaggagctggacgcgagggcacggatcggcggggcggccgcgggcgaaagcgacttaaccgctcgcctcgcaactgccgaacacaccatcgccgatctgcagggcgcgctagactcgtccgccggggaggtcgaggccctccgcttggcaggcgaggtagggcccggcatgcttcgggatgccgtctcccgtctagaccgcgccggccggcaggtgggcctctggggcgggcagactgcgaagtacgccgccacccaagggggcctcgcccagcgcctctcggagatagccgggactctccaacggctccccgaggagctcgagaggacgattaagtcatcctcgagggacctcgcccgaggagcggtggagctcgtactggcgagttaccaagccagggatcccgacttctccccatggacggcgctggacgagttccctcccggaaccgaggacggcgcacgcgcgcaagtccgggacgccgccgaccatatcgtccacagcttcgagggttcggcccctcggctcgcgttcgccctcaactccgacggggaggatgatacggcggagtgggcaatagtggcgacgaggccggcgatccgggatgtctgtgccgcggttctcttgtgtcttggcttgaacaagggctcgtgcccaggtcctagtcctcaaatggctcgggtcggggctagtgcctggggagatccacatgtcgagactggccaggccgggagcgtggtgaccgagggttatgggtgacccgattgtgggcctttgccgattcccccccggagttcaccacgccccggggcacggctcggttctgggccccttttggcgattttagccggcccgggccaccgagggcaggatcgagcacgagcgtgtaggggtagaagcgacgaaggtgttcgatgttccacgagttaggcagctctgtgccgtcgcccgtggccagccgaactgagcccggccgggggacgccgatcactcgatacggaccctcccacattggtgagagcttgctcaatccagcacgcgtttggacgcggcgtaggacgaggtcgtcgacgcagagtgatcgggcccggacgtggcgctgatggtagcgccgcaggctctgctggtagcgcgcggctcggagggccgcgcgccgccttcgctcttccaagtagtcgaggtcatctctgcgaagctgatcttgatcagcctcgcaatacatggtggcccgaggggacctcagggtgagctcagatgggagaaccgcctccgcgccgtagacgaggaagaaaggcgtttccccagttgctcggcttggcgtggttcggtttgcccagagcaccgctggcaactcctcgatccacgagtcgtcgtgcttcttgaggatgttgaaggtcttggttttgaggcccttaaggatttccgcgttggcgcgttccacttggccgttgcttctgggatgggcgggtgaggcgaagcagagattgatgcccatgtcttcgcagtagtcaccgaagagttcactagtgaactgggtgccgttatccgtaatgatacggttaggcaccccaaaccgagcagtgatgcccctgatgaatttaagcgcggagtgcttatcgatcttgatgaccggataagcctcgggccacttagtgaatttgtcgacagcgacatacagatactcgaacccgcccggggcccgcctaaacggacccaagatatcgagcccccagacagcaaatggccacgaaagaggtatgatctgcagggcctgggccggctgatgggtttgcctggcgtggaactggcacgtcctgcaccgccgaaccaagtcgaccgcatcgttgagagccgttggccaatagaaaccctggcgaaaggccttcccaaccaaggtgcgtgaggcggagtgggctccgcactcgccttcatggatatcggcaagaagctcgacgccttgttcccgaggaatgcacttcaggaggactccgttagccgcgcgctgatagagggtcccttctaccagcacatagcgcttggagatgcgctggaagcgttcactcccttcgcggtcctcgggtagagtcttatctatgaggtacacctggatctcagtgatccaagcaatcgatctaagggagctgggagcgctcccttcaggtcccgaggcctggactccgacgggcctcgggggccgttcaggctcgtccgtctcccctagggggtcgggtcgcgccgacggctgggcaagcctttcttcaaaggcgcccggtggggtctgggctcgcgaggaagcgagccttgagagctcgtcggcgaccgcgttatcccgtctgggcacgtgccgaagctctatcccgtcgaaatggcgctccatacgccgcacctggcgcacgtaagcgtccatctgcgggtcagagcaccggtactccttacagacctggttaacgaccagttgggagtcgcctaacaccaggaggcggcggatccccagtccagctgccaccctgagtcccgcaaggagtccctcgtactctgccatattgttggtcgcccgaaagtcgaggcggaccaggtatctgaggacgtctccgctcggcgaggtcaatgtgacccccgcaccggcaccctgaagagacagggacccgtcgaactgcatcacccagaaggcgggggatcctctagagtcgac

SEQ ID NO: 82309 - DNA, 588 bp, Oryza sativa
  unsure (1)..(588): unsure at all n locations
  Clone ID: PAT_MRT4530_81751C.1
tagagttgagtgatgcgcgtagtagctggatctctaagggcgatctcgggtagcttgggcgagggtacggatctggttctcgtatngctcggttcctcttctccttgtaccggatcaccttcgcctcccggtccatcgccgggtcgccgcgccgcgctcaggcgcgttggnaacgacgcgcgcgccgcgtgatctttcgggatggagctcacgggtcagtgaacgtgctcccacagaaggacatgattgtgctgtcgacgtcgccgggttcctgccgccgggccggcgccgccgaggccgaggcgtggcctcgagcaccgcggggcggctcgcctcgtggtgatgcggcactgtcgaacgtgagcccgtgccccggcgtggtactggcgtacgcgtcgaacgcctgccgctgctgctgccgccgccgcgccgttgccgacctgcatgggcgcggtttggctggtgaagctggtggtccgtcccgccgggcggcgccgggtcgttgaaagagccacgcgacgctgtcgtggtcgtcgtggcgaacgaactggaactcctggagccggcgcggtggggtctcccggagcg

SEQ ID NO: 82310 - DNA, 264 bp, Oryza sativa
  Clone ID: PAT_MRT4530_81752C.1
atggcggcggcgcggctaagctcgctggccggatccaaactggacgtctctacctctctcgttgcaacttgctgccaccatcctgccccatcccaactgttccctttccagtcccgatccagacctgtccgccaacgacttcagggcgctagacctagctcagggtcgcgactggaacggcaagatcttgacttcttgagcacgtgggagagagctcgttacgagctcgacgaagaagcagcgacggcgacaagcttagcgtga

SEQ ID NO: 82311 - DNA, 342 bp, Oryza sativa
  Clone ID: PAT_MRT4530_81753C.1
acatgggcgctcctcttcagccagcaatgtgtggcatgcgcagctacacaagggcatagatggccctgcagtgcccacctggtgggcacccacgttgcgcctacgatgatgcacgagcactgcaaccacagtgtgatgtgtggtgctgggatctcgggcagcagcagatggatgaagatgggcgatgcagatggccactgacatggtggcaacatgggcccctgtgcaactgccaactgctgcttgcctagtgggttgtgtgttggatgcacaccgttgggtgtaacatggtacctgtctgagtgaatgaagggtggttggcatgactgatgcgtggtggcc

SEQ ID NO: 82312 - DNA, 1408 bp, Oryza sativa
  Clone ID: PAT_MRT4530_81754C.1
tttggtgctgcggccgcggcggcggcgccgttagggaaacgggggggcaggaggtgtcggaggaggagaggggggcgggggcgggggtggggggagagggagaacaacaagcggagggagcggcggcgtcgcgcgatcgccgccaagatcttcgccggcctccgcgcccacgggggctacaagctccccaagcactgcgacaacaacgaggtcctcaaggccctctgcaacgaggccggctgggtcgtcgagcccgacggcaccacctaccgcaagggatacaagcctcctgaacgcatggaagtgatctgggtgctccgtcatcaccaaagccaccgtgttcctcgtatcaaccaagcccgcggagcatcatacagatgcgagtcctacttcctcctcattccctagcggcgcatcctcccccttccttcctcaccctaacaacatggccaatggtgttgatggtcaagacctatcctcccatggcttaaaacactgtccaattctccatcatcaaagaaacatccacagcttcccccactattgattcacggtggttccattagtgcccctgtaactcctccattgagttcaccaactgcctcgcactcctcgcatgaagacagattgggatgaatcaaatgtccagcctacgtggactggttcgaacagtccctgcgtggtgaactccacgccgcccagccccggacgcacaatgcttccggacccagcatggttagctggtatccaaatatcatcaacaagtccatcatcaccgacatttagtcttgtgtcatcaaatccatttagtgtctttaaagacgcgattctggtgggcaacaattcatcgaggatgtgcacgccagggcaaagcggcacatgctcccctgcgattcctggcatggcaccacacccagatattcatatgatggatgcggtttctgatgagtttgcatttggaagcagcacaaacggtggccatcaggcggctggtctggtgagggcgtgggaaggcgagaggatccacgaggactcgggatcggacgacctagagctgactcttggaagctctaggacaagagctgctgcttaacaaaaaaaaaactaacctggaggcattcttgtctgtagcttatttgttcgtgttcattagtttctgaaagagagaccaatcgtgtggttccttcagatagcttcagttgtgatgataattgtgttatttatgtgagacacgagctagagagaaagggggctttaattcggccaaacccagctgtgatatggtaatctcagctggctgtaattttaaagccccccctttgttgtgacaaatgtaaattgatgtgagaaatcatgccaaattcatggagcgaagcaaaaaaaaaaaaaaaaaaaaaactcgaggggg

SEQ ID NO: 82313 - DNA, 3243 bp, Oryza sativa
  Clone ID: PAT_MRT4530_81755C.1
atggcacggggctccgcaccgctcgagggtagcgtgctgccgccttcccgcatcgtgagcgagaggcaggccgggctgccgcgccgattcatgccggaatctgccaccggccgggaggtggtcgcgctgggcgagggacgcccggcgccgcactacccggggcggtccgtcttcttcctctctttcgcaatggcggggctggtcccgccattctctatttttttcatggatattctggagttttatgatctccagatggcgcacctcacccccaacgcgataatgacgttggccatcttcgcgcacctgtgcgagatgtttgtcggggtgcgcccatctctccggctgttccagtggttcttcaccgtacagccggtgtcgccgctgacggtagtcggtggctgctacttccagccgcgggggcaggtgctgaaccgctacattccctgcgtcctccgcaaaaagtgggacgactggaagagtgattggttctacacccccctcgcctacgaagcgcgcctccgacttccgagccagcccccggcgcaggcctccagctggcgggcgacggtagatctgggagacggctacgacgccgttctcgaccgcctggcgggtctgcgatcccaggggctcacgggggccatggtgttcggcgactaccttcatcgccggatcgcgccgctccagcggcgcgcccggggcgcctgggagtacaccgggcccgaggacatcatgaggacccaccaggggcgtaaatgggactgggaccctgaggatttcaggatggtggtccaacgggtgctgaatctcagctccgtggaggcatccctcatcccccaaggggtcctccccctctgctgcgatccagagcgcgccaacatcctgaccatcatgcaggaggtcggggcgtcgggggagcgggccccccgaggccacgatggcgcgggcgggagccgcaggggggaacaacctaccccagcagggggtcgtgcttctgggccccgcgacgggggcccggggggcagccgccctgccgacgcccgggggaagaggaagcaggagggaacccctcccccatctcctccccgagggggcggggcggtgcgtgccagcagcaggcgcccggagggtgccgcgccgacgccgcagcccgagggggagcgaaagaggaaacggctccgcaagatgggggggatcgcgccatgccgggggaacctcatctcgcccccaaggtggtcgtttagccgacctccccgcaggttcgtccccgcgcccatcgcggctatattcattctcccatctcccaaggcaagttttcactcacccgtttctttttgtcttctggtttttcttccgcctcagcgagatcccgtcgccccccccccccccccccgcccttccaagtccggccggtctgaggccgaggagacggcgaccgcggaggcccggaggcgggaagctgaccggcgagaagccgcggaccgcctccgggaagccgaggaggctgcccaggaggccgctcgggttcgccaggctgaggagaccgctcgggaggaggccagactccgccgggctggggagtccgtccgggaggcagaggcggcgcgcgcacgccaggcggcctgccaaacctccgacccgactccacccgaggggacgacaacttccgaggccacccacgacgaggccgcgggcgcgcggctcgggcccgacccctcgggcgacacttgggacgagccagcctcgagggacgcccccgagtccggaacgtcgatcggcgggccgagccgcgcggcgcccacaccgaggcggctctcccctctgtcttccgctgccccactgagcgcggagcccttcctgcaagccttggccgccgcaaacaacacggtgctggacgggttaagtgcccagatggaggccctgcaggcggagcgggcggagctcgacacggcgtgggcgcgcgtcgaggaggggcggcgctcggtggaggccatggtggaggcgggccgcaaggcgcaccgccggcacacctcacagctcgaggcccatcgtagggagctggcggagatcgctagggaggtggaggaggagcgggagactgccctcatcgccaccgccgtgctcgacgaggcgcgggacgacctccgcctccaatacgggagccgggcggcggagctagaggagaagctcgacgccgcccggggagtccttgatgccgccgccgcccgggaacggcgggcggcggagaaagaggcggcgtcccgccagcgcgaagaggccctcgacgttcgcgccacggcgctggaggagcgtgcccgcgccctgcacgcgaaggagagagacctggcggaccgcgaggccgccgtcgctacccgggaggcaacactggcggtgcatgaggccgcctgcgccgaagaggagtccgcactccgcttccgcgaggacgcgctcaccgaacgggagcgagctctcgaggaggccgaggccgcggcgcagcggctggcggacagcctgttcctccgcgaggcagcgcgggaggagcaggcgcgccgcgatctggaaggcgcccgcgccgagagggccacactggatcagcgggccgctgagctcgaggcgcgggcgaaggagctagacgcgagggcgcacagcggcggggcggccgcgggccacgacgacctagccgcccacctcgcagccgccgaacacaccatcgccgagctgcagggcgcgctggactcgtccgccggggaggtcgaggccctccgtttggcgagcgaagtagggcccggcatgcttcgggacgccgtctcctgtctagaccgcgccgggcggcaggcgggcctctggggcgggcggcacgcgaagtacgccgccaaccaggggggcctcgcccagcgcctctcagagatgaccggggccctcgagcgactccccgaggagctcgaggagacgatcaagtcatcctcgagggacctcgcccggggggcggtggagctcgtactggcaagctaccaggccagggaccctgacttctccccgtgggcagcgctggaagagttccctcccgggaccgaggacggcgcgcgcgcgaaggtccgggacgccaccgaccatatcgtccacagcttcgagggtacggcccctcggctcgcgttcgcgctcgacttcgatgaggagggcagtgacgacggtgcggacgacagcgacgacgaggccgacgtcccgggcgcgtcggagtga

SEQ ID NO: 82314 - DNA, 1413 bp, Oryza sativa
  Clone ID: PAT_MRT4530_81756C.1
atgtcggcggcgtcgggcgccgcgtgcggggtgtgtgggggaggggtgggggagtgcgggtgcctgctgcatcagcggcgtgggggaggcggtggtggtggaggtggaggggtgaggtgcgggatcgcggcggacctgaaccgggggtttccggcgatctttcagggggtgggggtggaggagacggcggtggaaggggatggaggagcccagccggcggccgggctgcaggagttccagttcttcggccacgacgaccacgacagcgtcgcgtggctcttcaacgacccggcgccgcccggcgggacggaccaccagcttcaccgccaaaccgcgcccatggcggtcggcaacggcgcggcggcggcgcagcagcggcaggcgttcgacgcgtacgcgcagtaccagccggggcacgggctcacgttcgacgtgccgctcacccgaggcgaggccgccgccgcggtgctcgaggccagcctcggcctcggcggcgccggcgccggcggcaggaacccggcgacgtcgagcagcacaatctttcaagtattcaacggtgtgtcaactgtcaactacctgcagatgtccttctgtgggagcacgttcactgacgccgtgagctccatcccgaaagatcacgcggcggcggcggcggtcgttgccaacggcggcctgagcggcggcggcggcgacccggcgatggaccgggaggcgaaggtgatgcggtacaaggagaagaggaagcggaggcgatacgagaagcagatccggtacgcctcgcgcaaggcctacgccgagatgcggccgcgcgtgaagggccgcttcgccaaggtgcccgacggcgagctggacggcgcgacaccgccgccgccgtcctccgccgccggcggcggctacgagcccggccggctcgacctcggatggttccgttcgtagctagcagcctagcactataatagcagatcattatttctctctttgtatacgtactctacgtacataggccaagcatgcattgactagctaggctattggttgaaaagtttaaggtttaattaaggtagatatatatggcaacaagtatatatatgtgatttacttgtcttactgaagaactagcatggtgacccgcgcagattgctcggctagcatcattatattttctctcatataatagcatatatgttttctcataatattaaaaaaaaaaaaaaaaataaaaacataattttaaattttgcaataactttacgaaactacaaatgagtaatattcatattgtattttatatacgtgttggttaagaattaattttaaatatcaaatttttagttattttggaaattatattatattcctatatggactctaaaatcggccttttaatattttctttttttaaattccgaaatt

SEQ ID NO: 82315 - DNA, 3312 bp, Oryza sativa
  Clone ID: PAT_MRT4530_81757C.1
atggcacggggctccgctccgcttgacggtagcgtgctgccgccttcccgcatcgtgagcgagagacaggccgggctgccgcgccgcttcatgccggaatctgccaccggccgggagatagtctcgctgggcgagggatgcccggcgccacactacccggggcggtccgtcttcttcctcccttttgctatggcatggctggttccgccattttcttttttcttcatggatgttctggagttttacgatctccagatggcgcacctcacccccaacgcggtaatgacattggccatcttcgcgcacctgtgcgagatgttcatcggggtacagccggtgtcgccgccgtcggtggttggtggttgctacttccagctgcgggggccggtgctgaaccgctacattccctgcgtcctccgcaagaagtgggatgattggaagagcgactggttctacacccccctcgccgacgaagcgcgcctccgacttccgagccagcctctagcgcaggcctacagctggcgggtgccggtagatctgggagatggctatgacgccgtcctcgaccgcctggcgggcctgcgatcccaggggctcacaggggccatggagtacaccgggtccgaggactgtatgaggacccaccagggggtcagatgggactgggctcctgaggacttcaagatagtggtccaacgggtgctgaatctcagttccatggagacatccctcattcctcaaggagtcctccccctctgcagcgatccagaccgcgcctccatcctgaccatcatgcaggcggtcggggcgtcggaggagcgggctcctcgaggccacgatggagcgggcgggagccgcaggggggaacaatctaccccgggagggggtcgtgcttctgggccccgcgacgggggcccggggagcggccgccctgccgacacccgggggaagaggaagcaggaaggaacccctcccccatctcctccccgagggggcggggcggcgcgtgccagcagcaggcgcccggaggtggccacgccgacgtcgcagcccgagggggagcggaagaagaaacggctccgcaagatgggggggacagaaccatcccggggaaacctcatttcccctccaaggtggtcgtttaaccgaccccctcgcagcgagatcccgtcgcgtccctcccgccattccaagtccggccagtctaaggccgaggacccggcgaccacagaggctcggaggcgggaatctgaccggcgagaagccgcggatcgcctacgggaagccgaggaggccgcccagcagctggttgacaaagcaattcgacttgaagacaagaagaacaggatggataaccgtaaaaggaaaataattgtattccaggaggcacaggatagtagccagaggcagcgtatcaagccactccaaattggtgaatctttttctgcaggtcaagaacagtcacaacagttgggcatgaatggtgagatcaactcagagactaatgcaagcaatgaagacaatgatgagcaagctactcaatcagtgtcatttcagcaggatcagtctcgagaagataacagtaatggaagggagcagcgggtgtgtttcaattgttataagccaggtcactttgtaagagagtgtccgaagccgaagcatcagcagccgcaagtcaacaacattgtcgtcacaggagccaatgcagtgccagttgcgtcttcaagagttgcgtcttcaagtgttacagctcagctaccagtttcaaagcagcatgaatttccgggcgtgacagcgacgacttccgaggcagctcgcgacgaggccgcgggcgcatcgcttgggcccactccctcgggcgacgctcaggacaagccaggtccgggggacatccctgagtccggcacgtccatcggcgggccgagccgcgcggcatcctcaccgaggcggctcttccccacgccttccgttgctccactgagcgcagagccccttctgcaggccttggccgtcgcaaacaccacggtgttggacgggttaagtgcccaggtggaggccctgcaagcagagcgggcggagctcgacgccgcatgggcgcgtgtcgaagaggggcgacgctcggtggaggccatggtggaggtgggccgcaaggcacaccgccggcacgtctcaaagctcgaagcccgtcggaaggtgctgggggagatcgccaaggaggtggaggaggagcggggggctgccctcatcgccaccaccgtgatgaacgaggcgcaggacaccctccgccttcaatacgggagctgggaggcggagctagggaagaagctcgacgccgcccggggggtccttgacgctgccgctacccgagaacggcgggcggcggagaccgaggtggcatcccggcggcgcgaagaagcccttgaggcccgtgccatggcgctggaagagcgtgcttgcgccgtggagagggacctggcggatcgcgaggccgccgttgccatccgggaggcaacgctgactgcgcacgaggccgcctgcgccaaagaggagtccgcgctctgcctccgcgaggacgcgctcaccgagcgggagcgagctctcgaggaggccgaggccgtggcgcaacggctggcggacagcctgtcccttcgcgaggctgcgcaagaggaacaagcgcgtcgcaatctggaaagtgcccgcgccgagagggccgcactgaaccagcgggccgctgaactcgaggcgcaggcaagggagctggatgcaagggcgcgtagcggcggggcggccacgggcgatagcgacttagccgcccgcctcgcagctgccgaacacaccatcgcggatctgcagggcgcgctggattcgtccaccggggaggtcgaggccctttgcctggcaggcgagatagggcccagcatgcttcgcgacgccgtgtcccgtttagaccgcgccgggcggcaggcgggtctctggggcgggcggactgtgaagtacgccgccaaccaggggggcctcgcccagcgcctctcggagatggccgggactctccagcggctccccgaggagctcgaggggacgattaaggcatcctcgagggacctcgcccgaggagcggtggagctcgtactggcgagttaccaagccagggatcccgacttctccccatggacggcgctggacgagttccctcccgggaccgaggatggcgcgcgcgcaggtccgggacgccgccgaccatatcgtccacagcttcgaggattcggcccctcggctcgtgttcgccctcaactccgacgaggaggacgatga

SEQ ID NO: 82316 - DNA, 3132 bp, Oryza sativa
  Clone ID: PAT_MRT4530_81758C.1
atggcacggggctccgcaccgctcgacggtagcgtgctgccgccttcccgcatcgtgagcgagaggcaggccgggctgccgcgccgattcatgccggaatctgccaccggccgggaggtggtcgcgctgggcgagggacgcccggtgccacactacccggggcggtccgtcttcttcctctctttcgcaatggcggggctggtcccgccattctctatttttttcatggatattctggagttttatgatctccagatggcgcacctcacccccaacgcgataatgacgttggccatcttcgcgcacctgtgcgagatgtttatcggggtgcgcccatctctccggctgttccggtggttcttcaccgtacagccggtgtcgccgccgacggtagtcggtggctgctacttccagccgcgggggcaggtgctgaaccgctacattccctgcgtcctccgcaaaaagtgggacgactggaagagcgattggttctacacccccctcgccgacgaagcgcgcctccgtcttccgagccagcccccggcgcaggcctccagctggcgggcggcggtagatctgggagacggctacgacgccgttcttgaccgcctggcgggtctgcgatcccaggggctcacgggggccatggtgttcggcgactaccttcgtcgccggatcgcgccgctccagcggcgcgcccggggcgcttgggagtacaccgggcccgaggactacatgaggacccaccaggggcgcaaatgggactgggaccctgaggacttcaggatggtggtccaacgggtgctgaatctcagctccgtggaggcatccctcatcccccaaggggtcctccccctctgctgcgatccagagcgcgccaagatcctgaccatcatgcaggtggtcggggcatcgggggagcgggccccccgaggccacgatggcgcgggcgggagtcgcaggggggaacaatctaccccgggagggggtcgtgcttctgggccccgcgacgggggcccggggggcaaccgccctgccgacgcctgggggaagaggaagcaggagggtacccctcctccatctcctccccgagggggcggggcggtgcgtgccagcagcaggcgcctggagggtgccgtgccgacgccgcagcccgagggggagcgaaagaagaaacggccccgcaagatgggggggatcgtgccatgccgggggaacctcatctcgcccccgaggtggtcgtttagccgacctccccgcagcgagatcccgtcgcgccccccccgccattccaagtccggccgggctgaggccgaggagacggcgaccgcggaggcccggaggcgggaagctaaccggcgagaagccgcggaccgcctccgggaagccgaggaggctgcccaggaggccgtccgggttcgccaggctgaggaggccgctcgggaggaggccagactccgccgggccggggagtccgtccgggaggcagaggcggcgcgcgcacgccaggcggcctgccaaacccccgacccgactccgcccgaggcgacgacgacttccgaggccacccacgacgaggccgcgggcgcgccgctcgggcctgacccctcgggcgacgcttgggacgagccagcttcgggggacgcccccgagtccggcacgtcgatcggcgggccgagccgcgcggcacccaccccgaggcggctctcccctctgtcttccgctgccccactgagcgtggagcccctcctgcaggccttggccgccgcgaacagcacggtgctggacgggttaagtgcccagatggaggccctgcaggcggagcgggcggagctcgacgcggcgtgggcgcgcgtcgaggaggggcggcgctcggtggaggccatggtggaggcgggccgtagggcacaccgccggcacgcctcacagctcgaggcccgtcgtagggacctggcggagatcgccagggaggtggaggaggagcaggagactgccctcatcgccaccgccgtgctcgacgaggcgcgggacgacctccgcctccaatacgggagccgggcggcggagctagaggagaagctcgacgccgcccagggagtccttgacgccgccgttgcccgggaacggcgggcggcggagaacgaggcggcgtcccggcagcgcgaagaggcccttgaggctcgcgccacggcgctggaggagcgcgcccgcgccctggacgcgaaggagagagacctggcggaccgcgaggccgccgtcgccacctgggaggcaacactggcggcgcacgaggccgcctgcgccgaagaggagtccgcactccgcctccgcgaggacgcgctcaccgagcgggggcaagctctcgaggaggccgaggccgcggcgcagcggctggcggacagcctgttccttcgcgaggcagcgcgggaggagcaggcgcgccgcaatctggaaggcacccgcgccgagagggccgtactggatcagcgggccgctgagctcgaggcacgggcgaaggagctggacgcgagagcgcacagcagcggggcggccgcgggccacggcgacctagccgcccgcctcgcagccgccgaacacaccatcgccgagctgcagggcgcgctggactcgtccgccggggaggtcgaggccctccgcttggcgagcgaggtagggcccggcatgcttcgggacgccgtctcccgtctagaatgcgccgggcggcaggcaggcctctggggcgggcggtacacgaagtacgccgccaatcaggggggcctcgcccagcgcctctcagagatggccggggccctcgagcggctccccgaggagctcgaggagacgatcaggtcatcctcgagggacctcgcccggggggcggtggagctcgtactggcaagctaccaggccagggaccctgacttctccccgtgggcagcgctggaagagttccctcccggaaccgaggacggcgcgcgtgcgcaggtccgggacgccgccgaccacatcgtccacagcttcgagggtacggcccctcggctcgcgttcgcgctcgactccgatgaggagggcggtgacgacggtgcggacgacagcgacgacgaggccggcgacccgggcgcgtcggagtga

SEQ ID NO: 82317 - DNA, 177 bp, Oryza sativa
  Clone ID: PAT_MRT4530_81759C.1
ctggaataattccatatatatggtctaattccagtgttccaagccgccaatcgctacttaaattcaatgtacttgtttctgactactttgtctctgatatacatattcattgtctctcctgctcttccctcttaatggaacaaatattaacatgttcttactaaaaaaaaaaaaaaa

SEQ ID NO: 82318 - DNA, 499 bp, Oryza sativa
  Clone ID: PAT_MRT4530_8175C.1
acaagatcttccttaattgccatgaatggcaagcggtgaaatcacttgtacaatgctattgtgtttgcattccacgtgctgccagatggcacttggtacatcacagagcactttgtgctacatctgtgtgaaggtgtttgtatgagggtcttgtgacatggcattgtcgcaaacgaacaattgtgccaagtcaaggctttggagcgtgttttgggcagctggatatgctggaacaaattcaatctagtggccaggttgtacatatgtatgatgaacatgatatacaaccctaccaacacctgagtgtggggtgcctgtgaaggaaaaaactgcactttgtgggaggctagtaccaagattggttcgacttttcgtgggcactataagtgcttatattttgtttggttttacaaacatttactgtctgtccataggtacccgtttggttctgagatgggtctagtaaattgatatggctttgtcaaaaaaaaaaaaaaaa

SEQ ID NO: 82319 - DNA, 167 bp, Oryza sativa
  Clone ID: PAT_MRT4530_81760C.1
gacaacaaatttgcgtttaaagacacaagaagcgcttaaagacccccgagttaacatgaaaagcccaggctaacaacaaaaggacaattttcccactaaacaaccataggcccctcaaacaaataaaaattcctctcttccgtcggaagcaaaaggaacagccggaa

SEQ ID NO: 82320 - DNA, 713 bp, Oryza sativa
  Clone ID: PAT_MRT4530_81761C.1
gctgcaggaatcggcacgagggtgtgaactaaacataccctacataagttttgccttgtagttgaaataataactgcagttattccacatactgtgttacataaagggagtatgaactgttaaatgttactagaaggtctgatgctgggtatgacttgagggttgttttctgcaccattttccatatcgctaatacttctgtagcttggagttggggcatgttgtccagcataagaatgatatccccttaattagaaatgtgtggtaatgaaaattcttgtagtgtcaactgaaaccaaaacatcagttcagttctgaacttctaaattctaaaagcaaacatgctactactttatttaatttgttttttctgctgatgtattcttttggtgatcttttatctagtaacatttgttatgattaaaagccaagctgatatgtttacttattaggctcttgctgtgctactgctcatctgaatcttgatttttgcggacagttggtgatctgaaccacttgattagtgccaccatgagcggtgtcacctgctgcctgcgcttcccagggcagctgaactccgacctccgcaagctcgccgtcaacctgatccccttcccgcggctccacttcttcatggtgggcttcgcgccgctcacctcacgcggctcgcagcagtaccgcgccctcactgtccctgagctcacccagcagat

SEQ ID NO: 82321 - DNA, 3461 bp, Oryza sativa
  Clone ID: PAT_MRT4530_81762C.1
atggcgctgaacatgaagacgctgacgcaggcgctggcgaaggcgtcggcggtgatcgagaagacggtgacgacgacggtgcaggaggtgacggggccgcggccgctgcaggacttcgagctgctcgagcaggccgggtcggggggccccggcctcgcatggcggatctacacggcgcggccgcgggagggggcgccgtccgcgccctacccggtggtctccgtctgggtgctcgacaagcgggcgctcgccgaggcgcgggcgcgggcggggctcaccaaggccgccgaggacgccttcctcgacctcgcccgcgccgacgccgcgcggctcgtgcgcctccggcaccccggggtgctccacgtcgtccaggcgctggacgagaccaaggccgccatggccatggccaccgagccggtgttcgcgtccgtcgccaacgcgctcggctgcctcgacaacgtcggcaaggtgcccaaggagctcaagggcatggaaatggggctactggaggttaaacacgggttgctacaagtctcagagacactagactttcttcataacaatgcccatcttgcccatcgagctatatcacccgagacggtctttataactttgaatggatcttggaaacttggtgggtttggttttgctctttctgttgaccaagccacaggcagtttgacatcaacacagcaattccactattcggactatgatgttgaggatacagctttacctcttcaaccatctctgaattatactgcaccagaattggtccgaagtggagattctaaagttggctcggcttgtgacatatttagttttggatgtctagcttatcacctggttgctcgtagaccacttctggattgccataacaatgtgaaaatgtatatgaattccttgacgtatttaacaagtgaagccttttctaatattcctgctgatttagtggtggatttgcaaaggatgctatcagttgatgtagcatcacgccctagtgctatggcgttcacaggctcttccttcttccggaatgatacgcggttgcgtgctcttcgtttccttgaccatttgcttgagagagacaatatgcagaagacggagtttctgaaggcattatcggatatgtggaaggacttcgattcccgagttcttcggtataaagttcttccacctctctgtgctgagttacgcaacatggtcatgcagccaatgattttgcccatggttctaacaatagcggaatctcaggacaaaggtgattttgagctttcaacactgccggcccttgttccggtatttacttcagcgtcaggtgaaacacttcttttgctcgtgaagcatgcggatcttattattcacaaggccacacaagagcatttgatatcacatgtccttcctatgctggtacgggcttatgatgacactgatccccgactacaggaagaagtactgcgacggacagtgccattgtctcgtcagcttgacgtgaagctactgaaacagtctgttctgccacgcgtacatggattagccttaaagactacagttgctgcggtgcgtgtaaatgccttgcgctgtttaggggatcttgttccatctttggataaagaaggcatactggagatcttgcaaactcttcggcgttgtacagctgttgaccacaccgcaccaacacttatgtgcacccttggagtggctaatgcaatttttaaacagtgtggtgttgagtttgctgcggagtacgtgattcctctcgtcttcccactgctcacagcacatcaactgaatgtacagcaatttgctaagtacatactatttgtcaaggatatcacaagcaagattgaggagaagcgtggtgtgactgttacagataatgggaatacagaggtaaaagtatcaccctcattggctaatgggattcattctgagccattgtcacgaggtgtgggacaaactgaacagatacaaactgcaaagggtgctgcatgggatgaggactggggccctactaagaaagcaagcactccatcacagtcatctgattccaatgcacggatgaagcaaccatcagacccttttgatttcagcactcaaacaaagcaaccctcggcacttccttttgatttcagtactcaacaacctaagccatcatctgcaatcccgcaagtgacaccagctacaatttcgcctgcaccatcacttccatcactgcaatctcttgcaccaagctctggaccccaaacttctggttcatgtgttcctgttgacattgagtggcctcctagaaaaaacacatcgtctgactttaatgcaccattatctgttagtgagcaaagtaaatctggagggctatctagtgatggtcttgctgatattgatccttttgccgactggcccccaaaagcaagcagtggtgccagcatttcagctgttggacacctgtcaagcacaagccaaagtatttctggactaagtacaggaaatattgggttcagtggcaacagtggttctctgggacaaatgaaaaccaaccaaatgagctggtcagcgaaaccgaacactactaatttaatggccgtgaactcaacaggcaattacttgaatcagggcaactcagctcttggatttggaaatccaattggaggacggagtacagggtcattgtcaagcagcacaacacagggtccacccaggcttgctcctcctccatctgcttctgttggaagagggcgtggtagaaatcaagggcaatcggcactttcacgagcatcacgtactcctcattccaatgtttcatcagagcagccacctattctagatttactgtagcaattgagggccctctatcttcgttttgcaaatgttgaagttcctatatggtgagcatcatgcctttttcttcccaacctgcttgcggcagtagtgtatttacatgtcagttttgcaaactggatggtctgagactgaggcccccaaatgaagctgcttcagagccttccagaggttacagaatgttccctttctcaggagtcaggatgtcttcttccacacttggtcctagttggacaggcgaaacaggagaaattctatttgtgtataatatatttgttcagacggctgtagattgtagagttcatgaatacagtcaacatgtttgttgggatgttttgaatgcccagaatgtgccaccactccaccaggtttaatgggcctcgtgcaaatggacccaaggcgatttactcagatactcccctcccctacatgtaattcatttattctgtgaaggccccatgttgtgtagtccagaagtataggcccatcaacacaacagtaaccgttgtcgatagaaacccgtgtcttctgtgaattgtgattaaagttgttgagggtgaaccgtccattttttttttttgggaaaggaaacccctttgtccatttaacacagacccggaatg

SEQ ID NO: 82322 - DNA, 327 bp, Oryza sativa
  Clone ID: PAT_MRT4530_81763C.1
accatcagcgtttttttagttttttttttttggttcttttgtctcatcattcccccaaccgcgggtttttgattttttcaaaatggggcttttgccacaccaggtgctgatttttacaaacaagggattttcctagttatttttagcaacgaccgtggcgctatttcaagagacaatttggccaacttaacgggggctcagataggaaaggcttaagagagggggaaaaaaaattggaattaaaatgtttggccagaattggtaaggttttacatagataatccacgggctgaaaaaaaaaaatctttttttcaatctcagttttgg

SEQ ID NO: 82323 - DNA, 350 bp, Oryza sativa
  Clone ID: PAT_MRT4530_81764C.1
atattggggttagaattttttaacatatatgggacaggaggcctgagttgacaaaaagacgttaccatgtgtagcgggaaaagtgcacccaagagccccaaaaaacgggacaaaacgcccgagttaaacaaaaaaaaggaacacaagaacccgagggggaaccaaagagctttaagatcagaggggtcaaggcccttgacacaaaagacccaaggggctttaggtcgaaaatccaaaactcctcaggggtgagatggggttctagaaaacaggagggggggacctcggggaaaaagtccacaccgataaggtgaaaaaccgaaggggaagccaggggaacaagcaccccg

SEQ ID NO: 82324 - DNA, 777 bp, Oryza sativa
  Clone ID: PAT_MRT4530_81765C.1
gcttcgttgagcctcctcctctgcctcgccgcggcggccggcgccgccgccgcggctgttccgccgcgcttgcagtgctttgagcacccgccggacatgaaggccggcggcggcgaggccggcgtggtcgtccacgacctggcgggctacgaggcctacgtcaccggcgccgcccactccggccgggccatcgtcctcgcctccgacgtctacggtttccaagcgccgttactgaggcaaatagctgataaagttggtgatgccggatattacgtcgtggtacctgatttgtttcatggagatccagcaaccacaactgtgaactttaccgaatggctcgagtctcactctccggtgaaagaagctgaaaaagctaaatcaatctttgcttttctaagaaacgaagggaaatcacttgttggagttggaggatattgttggggtggaaagtttgctgtggaggtagcgaaaaccaatgaggtaggaagcgttgtcatctctcatccttacgcagtgactgctgatgatatgaaagaggttaaattggccatcgagatccttggaggccagaatgacacagttacaccaccaaagatagtctaccagtatgtgcatgccttgcgtcaaagaaacgatattgatttctacgccaagatttttccaggagtttcccatggatttgccggtcgatataacaccagcgacccgtttgctctcgaaaccgggaaacaagctctcgccttaatgctggactggtttcagaaacacttgaagtga

SEQ ID NO: 82325 - DNA, 450 bp, Oryza sativa
  Clone ID: PAT_MRT4530_81766C.1
atgcggatgcggatgcggattttgtcatgcggatgcggatgcggatgtggggagtgggcgagtggcggcgcgacggcgagtcgacccagcgcgacggcgacccagcgccggccggccgctcctccttggctgctagcgccgccgccgctcctcctcggctgcagtacaggctggtggcgccgctgccattcgtcctcgcctcctcggctcctcggcgccgccaccactccgtccactgtcgcccatcagcacgtctccagcgccgggccgccagtgcaccgtcacatccccgtcaccagcccagccgccatccctgttggctgtcgccagcagccatccccgtcgtggcgtcgccactcgccagccaccactgtcgtcagccgtgccgtgtcgtcgtcgtgcttccaatttgaagtatcaaatttgggatttactgatttagaaatgtag

SEQ ID NO: 82326 - DNA, 1863 bp, Oryza sativa
  Clone ID: PAT_MRT4530_81767C.1
atggcgccgtcttcgttgctgctctgctggagcatcctctgcctcgccgtggccggcggcggcggcggcggcgctgccacctctgccgattcgctgcgcttgccgtgcctcgacaacccgccggagctgacggccgacggcgacggtgaggccggcgtggtcatcgatgacctggcaggcttcccggcctatgtcaccggcgacgtccactccggccgggccatcatcctggcctccgacatctatggattcgaagcaccattgctgagggacaatgctgacaaagttggtgaagctgggtattacgttgtggtacctgatttcttccatggacaaccttacaatggagacccaagtataaacgttacaaaatggatcacgcttcactctccgggctatggtcttgtaaaagcagctgaagatgctaaatcaatttttgctgctctaaaaagggaaggcaaatctgttattggaattggaggttattgttggggtgtctcagcacaagttcaactggcagcaaagtttgctgtggaggtggccaaaaccaatgaagttgaagcgattgtcatctctcatccttcagaggtgattgctgatgatatgaaaggtgtcaaatgccccattgaaatccttggaggtcagaatgaccctataacaccaccaagtttggtggaccagtttgtgaatgtgttgcgtcaaacaactgaggttgattactttgccaggatctttccaggcgtgtctcatggctttgcttgcagatataacgccagcaaccagtttgctgtcaatactgctgaacaggctcttgccttaatgcttgactgtatgcaaattaaccatatggcaactgcttcgttgagcctcctgatcctctgcctcgccgcgctcgccgcggcggccggcgccgccgccgcggctgctccgccgcgcttgcagtgctttgagcacccgccggacatgaaggccgccggcggcggcgaggccggcgtggtagtccacgacctggcgggctacgaggcctacgtcaccggcgccgcccactccgaccgggccgtcgtcctcgcctccgacgtctacggtttccaagcgccgttactgaggggaagggaagggtgcctcgagatggccaccctccgtgtcaccaccgcggcattccctggtgcatcagctgctcgtccctaggcgggcccgaccgaatggctcgagtctcactctccggtgaaagaagctgaaaaagctaaatcaatctttgcttttctaagaaacgaagggaaatcacttgttggagttggaggatattgttggggtggaaagtttgctgtggaggtagcgaaaaccaatgaggtagaagcggttgtcatctctcatccttacgcagtgactgctgatgatatgaaagaggttaaatggcccatcgagatccttggaggccagaatgacacagttacaccaccaagattagtctaccagtatgtgcatgccttgcgtcaaagaaacgatattgatttctacgccaagatttttccaggagtttcccatggatttgccggtcgatataacaccagcgacccgtttgctctcgaaaccgggaaacaagctctcgccttaatgctggactggtttcagaaacacttgaagtgatgaaacttaataaatacatgaaagaacatgcgactgtttattcagaataaattaccggtgtccgtgtacaaatttgcatgaacagccatgtatgcaggctgaatacaatgagtgtctgcaatctgaatttggttgctaatttcttaataccctctcaatgcctgctgggctttgctattttttcaataatggaacaaaaaattttggcctttaatt

SEQ ID NO: 82327 - DNA, 1023 bp, Oryza sativa
  Clone ID: PAT_MRT4530_81768C.1
atggcactcgaggcgcagccctccccgtcgccgtcgccccgccgctcgccggaggcggcggcgggcggcgcgggcgcggcgggggatccgccggtgacgccgatgcacagcgcggcgggcgacgagtgggcggccgaggagaagaggccccccaccccgccgcagtcctcctccgcctctcccccgcactccgcggccatcgtcgtctcctcccagacgcacgcggcggccgccaagtacgtgcccccgagcgccgcgggccacgtcggcggcggggatggccgctcatggtactcgtggaacggcggccgcaccgccaaaccgtatcgccccccgccgccgccgaggaagaagccgcaattccagccacccccgcagccgccgcgggcatgggatccatccccgcctcctcctcctccagcgccagcggcgcctgtgctggtgcctccgcctgctcccgcaccgaggccggctccggctccggcaccgagagtgccggctagggcggtcgagcacgaccaccgggtggtgcccgacatcctgttgcgcaagcggcgcacggctgttctgcagcgcaccgcgctggtggcgcgggttgcggccgcgctgctctgcctcgcggcgctcgcggtgctcgccgccgacagccgcaagggtttcgcccttgactcctacagcaactacagccagttgcggtactctgaggcggtgaacgtgattgggttcgtgtactcggtgctccagttctttgtgctcgcagatctcatgaggaggaacaagcatttgaatccgcggcgcaaaggagattacttcgacttcttcatggatcaggtgctggcataccttctgatatcttcgtcgtcatcagcaactgcacgagtaggcgattggatcgacaactggggaagcgaccctttcccgaagatggcgaacagctccatcgccatttcattcatggcattcttggtttttgctatcagtgccctcatctctgcttacaatctcttccggcgagatatttag

SEQ ID NO: 82328 - DNA, 1005 bp, Oryza sativa
  unsure (1)..(1005): unsure at all n locations
  Clone ID: PAT_MRT4530_81769C.1
cgatgtcgncgcgccgcggcggccgcccgacccgaaggcgacggcgacggcgacagcacggctctctcatccggccgccaccttctctccggtgagcacgctgcctttcctcctctcccctcctcttccaaatctagggttagggtttccttctcttctccctttcctgtcgtcgccgccatcccatcgagcaccgctcccggtcgcagcatagcgtcggcgcatccactctgcagccgccgcccatcgccctcgcccacggcgccacgccgccaccggcgtggcgccctcggagaagaagaggcggaggagagcacaaggcgattctttggctattcttgttgttcttgctgttcttgtaaactccaccttgtcgatagcgtccttgagctgcagcgaccagttcatcatgctggggtcgttgatccgctgcttcttcactaaactcactacgctgttcatctcctccaggaaatttgccacgctgttaagcttctccttcacggttgcatgccgctgacgcccgagctcaccgccgccgctgctcttgcttcgcccgctgctcgaacccgtcgcggacaggcggcgggatccgtcgacgagaggggggatagagaagggtgggcgcaccagccgctcgaactgctcgaagacggccaggtcggcgccaccgttggcgcgcgccgcggcgatgcggctcatgcacatcgctgcgcccggcatagcttccccaatcccctcgatcctcgacatcctctgcgcctcccttcccaaaatactcaaatcttcatcttccccttgcgagtcgcgaagcccgccgccgccaccccacgtcgccaccaccgccgaaaccgccgccgcgcccacgtcccgccccctccgggccacgttggccgccccggtcgtgcgccgcgtctcccgcacccgcttccccctctctcccgctcgcgcccgcgtcccctctctctttttccccttttcgccgaactctcccgagctctccat

SEQ ID NO: 82329 - DNA, 457 bp, Oryza sativa
  unsure (1)..(457): unsure at all n locations
  Clone ID: PAT_MRT4530_8176C.1
cccgtgccaagctctctgatggtctggtcccacccaccagccgcaagcgattgagatcctttacaggcacggtttttgtcacgggcatgtatgggactggagatcatcggtccacatgttaatgaccaatgtgatatttcatttgttccaaaatattaaaatattagctagaatataatgtaatactttctattactaaaaaggtttttcctaaattcattacaatagaaagtatctaatcgtatactagatagtaacatttaggacggaaatagtatgatctagccgtagcacaaatacgnattgtactctactagctactctatatggtgtgcatgtgcatggggagnacggcggtccgttgccctgcatgcatggtatgngatatactattacaggttatcagcccatcgtctatgaaggttatattatnggcaaaatttaattttaaaaaaaa

SEQ ID NO: 82330 - DNA, 418 bp, Oryza sativa
  unsure (1)..(418): unsure at all n locations
  Clone ID: PAT_MRT4530_81770C.1
aaactagtggatccccgggctgaggaatcggcagaggaagaattcaaagcactagtacaaattattgaagtttgatgaacatgcggcgcttgaggttgctaaagatttctcatctcttttgttttatgggtgtgggtgagtgtgtgtgtttcacgtccttaattttagtttaaggctttaacccnttggtgaatgtttattttttntcctttttctttgttaggagagtgggaaaagtgctctttttaggcttctttatccnctctatctagtgtagaagcgtggattgttttgtgtgctcgcgctctttccgtggttttttttctctcgtctttctagtttgcttttgtacaagtgactcgcaacacgacatgtaattacgtacattcttgccatttgactggctagttctggcttt

SEQ ID NO: 82331 - DNA, 942 bp, Oryza sativa
  Clone ID: PAT_MRT4530_81771C.1
atgtaccagatctggaagctcctgcccaatgttgccaacgggctccacgatacgcgcccgcttcgtcgtcgtcgcccctccacctgcgagctgctattgttgctcctccacgctcacccggtgccgccgctaggcttggggatgcagcagctgctccgcccgtcgccggcggccctccacccacgagctgccaccgtcgcccctccgcgctcgtccggtgccgctgtcgttggcgccgagatgcagcaccagacgagctgccactggcgcccctccgcccacgagctgctctcccttatcctctactctcctctcctctcctctcccattctctccgcctcctctctccctctccctctacccgcgagctactcctcggtgacggcagcaggcggcgatggcggcggcgcctctccgtccttcgcctcctctctctcgccatggggccgcgggacggctcgacggtggcgggcggcggtaggcagcagcgccctcccgtccggccggaggggaggcggcgggcagggacgacgccctctcctccgccggatccagcgggagaggaggcggcggtggtacgacatctcggatccaacgggaggggaggggagaaggtggcggcccgacgtcccagcgatggtggcacccctcccctccgccgaatccagcgggaggggagccggtggcgacctagcgtccctgtggctgttcggcggcgacagcggcaccctcctcttccgacgtcgcattgaacaattccacggcctcatctcttggtgtactgttgccccacctcccattcttgtggcaaataaggactccacatgtcattgttcgccattcaagtacttcctttgcctcatcaagggtaagacgggttcctgtgaaccatcctttgagctgtcggttacggatatttctaagtcatatcgcttccggtag

SEQ ID NO: 82332 - DNA, 5381 bp, Oryza sativa
  Clone ID: PAT_MRT4530_81772C.1
agcataaaaacgacgaagatgttcaatattccaagagttgtcgatatgagtaccgtcttcacgcttgagtcggtaagaacttggccgagtgacttcaaaaattatgaacggtccttcccacaagggagataacttgtgccgatcctgtgtagtttgaatttttctcagaaccaggtcgcgactaaaaaagctcgagatcgaacattgcgattgtaataacggcgcatcccttgtaagtaccgagccgactgaattaaggctgcttcatgggcttcttctagtcggttgagatcatctactcggtattctccgtagcgctcctcgctgaagttacgaaatcgtagagattcaaattccacctcacttggcaacatcgcttctgctccatagactaggaataacggcgactggcccgtagcccgactcagagtggtgcgcagggaccaaagtacgaatgacagctgttctacccacttgccagcatacggatgcagtcggtcgaaaactcgtgcttttattccttgaagtaccataccattagcgcgttcgacttgtccattgctcatggggtgcgctacagaggcatatcaaattttgatgccgaagtcctcacagaaatctttaaatactccgcccgtgaattgagtgtcgttatcagtaatgatccgattgggtaccccaaactggtgcacaatgttgatgaagaaatctctagccttgtctgtcgtgattgtgataaccggtttggcttcaatccacttggaaaacttgtcaacagctacaaagagatgagtataaccaccgactacctttttaaacgggccgaccatgtcgagcccccaaaccgcgaacggccaagacaacgggatggtttgcaactcctgagccggtagatgagtttgtcaggcgaaaaattgacaaccctcacatgttcgcacaattttgtcagcgtcggacacggctgtgggccagaaaaaaccttgccggtaagccttgccaacgatggttcgtgcggtagcgtgattgccacagatgcctgaatgtatatcctttatcaattgtcttccctcctctaaagacacacagcgttgcaggattcctgatggacttttcttgtacagctcggtctcatgtatgacataaagtctgctgcacctggagatcctctcggcttcatctttatcttgagggagttcttgttttgtcaaaaatcttatgaggggctctctccagtcgacttcaatcatgcttatgtcttgagtgtacgtggcctcgaccatttctttcctcggtacgattagttcataaagatgttcgacaaacacatcgaaaggagttgcttctcgttttgaatcgaaattggccagtctgttggctgcctcattgttatgtcggagaacatgtgttagctcaaggtcatcgaatttatcttctagcttgcgtacctcctgccaataagcagtcatattatcatcaaggcaggaccactctttcatgacttgattaacaaccaactgagaatctccatgaactatcagaagccgaattcccaaagagattgcaatccttaatccgtgaagaagcgcctcatattccgccacgttatgggacgcagaaaaatgtatccacaatacatagctcaacctttctccagtcggggaaattaggaccactcctgctccggtgctcgaaagcctctttgacccgtcaaaatgcatagtccaatactccatcttctctgcaggcgtgtcttcctggcactcggtccactcggcgacgaagtctgctaaagcttgggacttgatcgaagttcgcggcttgaaggatagatccaaagacatcaactctaaggcccactttgcgatccacccatttgcttcgcggttatgaagtatatccctaagtggaaacgatgtaaccaccgtgaccgagtgaccttgaaaatagtgagataatttccggcttagcgccgccatgcatccagttaacttttgaacatctttctgggagctcggcggtttcatgttgaggatggcgttgattttctccgggttggcctgtatgcccctatgggataccataaagccaagcagcttccctgacggtactccgaagatgcacttttcagggtttaatttcatcctgaaggcgcagatgctcgcaaaggtctcttctagatacgcgatcaaatcatccttctgcttggtcttgacaaccacatcatcaatataggcttcaacgttgcgaccaatcagagttgaaaagcatctgttcttcaatccaaaaggcatggtgatgtagcaataggccccgaagggtgtgatgaatgaagtcttcaagcagtcggattcctttagtcggatctgatgatatcctgagtagcaatccaaaaaactgagtaactcgcagccgactattgagtcaaccacctggtcaatgcgaggtaacccgaagggatctttgggacaagatttgttgaggtctgtgtaatcaacacacatacgccattgccccgtcttcttccgaaccaggactgggttagccagccagtcgggatgtaggacttccttaatgaagcctgctgctaacagcttggtcaattcctctttgatcgaatcttttctatcctgtgcaaaacggcggagtcgttgtttgatgggtttagcgtcttccttaacatgtaaagagtgctcaatcacctctctaggaataccaggcatatcagatggtttccacgcaaagatataatctaactcagcgcctattacagcagtcttagtgggatcagagggatctagagggattttcttggtcttggcatcgccttctccgcttttcgacatcttggttgcagacacttctccttcggttgctgtagatgcagccagtcggatttcctctcgggcgagcgtgatctcgcgggtctgggccatctcgcagctttccttgtcacaagtaacggcttgcttgatgtcgctccgcagggatatgactcctcgaggacctggcatcttcatcatcatgtaggtatagtgggggacagccatgaacatggctaacgctgggcgtccgagtatggcatgatacgctgtctcgaaatcagcaacttcgaaacagacgttttctgtgcggaagttctcccgagtgccgaaagtaaccggaagagtgatctggccgagtggtgtagcagatagcccggggatgactccgtgaaagggcgcattacttggctttaattccgtgcgagggatctgcatgtcgtccagagtcttggcgaaaaggatattgagtgcattgccatcatcgatgagagatctgcaaagcttgacgttgcgaaccactgggtctagtactagggggtaccgccccgggtggaccactcggtcgggatgatcccagcggtcgaacttgattgttgtctctgaccaccgaagatattgaggtgtgtcgggctggacagcattgatctcccgttcggtcagcttttgctttctcttggattcataggctagtggtccgccaaagatgtggttgagttccttgcgatggtcttcaaaactagtcggggcatcatcttcatcatccttcttctttgacgtgctttgatctccatcagtggtcttgcgtgcgttcttagcgtattgttctgcaaattgcgatccttgtgattggtacttccactccccccctatagtcggcatatctttcttcggcttccaagtggtgcccgactgcttggatgcggtgatggcatcttcggcttttgcatactcattggctttttcgaacatctgcttgaccgtcctgggaggcttgcgtccaaacttgccgactaagagctcgtggcggatgcccttggtgaaggcggcgatgatgacgtcgtcggtgatgttggagatattgtagagatcgaactgagtgccagggcgttcaaaggtgccctggaaattggcgatgaagtggtcgcgaagttccgcccaagatccgattgtgccacggggtagcccgaggagccaggaccgggcagaatccgctagtgctacgggtagatagtttgccatagctttgttgtctcctcctgctgcgcgaattgcaagaccgtagacagtgagccaagactcagggttagtggtgccatcatacttctcgattctagtcggcttgaagccggccggccaatccactcgatgcaggtcgcttgtgaaggcagcaactccatccacgtcgtcgtcatagcgatatggtgaatggtgggggatgtagcctctcgccgcgcggcgctggtttatagtttcgcgaagatcgatgggatgcctgcgatgcggggagcggggacgttcagctcgacgctccctgcgtcggtcaggaggtaagtggacggagcgctcgtcgtggtcccttctcctgcgactggatccggcaccaacgacgctgaggctcggttggtgatagtcttgagattgaagaggggggactcggctgccagtcggcgtgtggacgcttgcggagttaatcgggaccgaagctgcgatcatggtcttggtctggttcaagatgttgacgacgtgattggcttgattgagtgcgtcttccttaaggagggtgtcgaggagggtgatcgctgcaaccgcgttctgttgaggggtgcgaaaaaccgccgttccctcgacgtcttgctgcctgataagttctcgtgctcgtcgcccggcatccaaggcgcgctgtcgctggtcttcagccttctttgcagcccgttcgtgctcctgttgctcacgctgcagccgttctcgttcttgtgcttggcgctcctcttccaatcggcgtcgttcggcttcctgtcgcacgcgctgttcttcggcttctcgggctttacgctgttcttccgtctcgttgtcggccatgaagatgctgaagtagagaggcgtgtagttatcttcaaagtcttcgtcgaagtcgtcgaggttgcggtagtcgtagaggtagccgaagtcgtcgtactcaatgatcttcgtatgccatgagtcgacgccgggggagctatggggagaagacgcccttgtggtgaagacgacagccaaatcatcggggagtttcatcaggattggcggataagctccatcatcttgatcaggtcgtgttgtagtagattggatctcgtccgagtggtttgaggccaactcggttgagatggtcttggggtagatctcggccgagttcgggataccgaacggggcggagatctggcctcttcctgactggttcgaattcgagtcgaggagaaaaatcttgccgaggtcgttggtgatgaagtcgaggctaccgaaccggaacgcctgcccgggagggaagacgaagtcgtcgatgccggaaacgaaacccat

SEQ ID NO: 82333 - DNA, 324 bp, Oryza sativa
  Clone ID: PAT_MRT4530_81773C.1
atgtcggtctttgtggctcctacattgggttttgctagatctgcattggcttgtattggcatcttgccccttgtctcagggggagtgttcctggataactccaaccaagccctcgagggcgaatggaatgtcctgaagaacggcgtgtaccacgttctcgcatacctgaaactcacccacctcgaaatcaacatcgataagatgctggaagatgttggtacgctcggggattcggcggacgccgacatcatcgaaagcaggtcgccgccggtcgagggagtctcctgcgagttcgccaaaggacttcgaggaaatcgctggtga

SEQ ID NO: 82334 - DNA, 2907 bp, Oryza sativa
  Clone ID: PAT_MRT4530_81774C.1
atggcacggggttccgctctgctcgatggtagcgtgctgccgccttcccggatcgtgagcgagaggcaggctgggctgtcgcgccgcttcatgccggaatctgccaccggccgggagatagtcacgctgggcgagggacgcccggcgccagactacccggggcggtccgtcttctttctcccctttgcaatggcagggctggttccaccattttcttctttcttcatggatgttctggagttctacgatctccagatggcgcacctcacccccaacgcggtgatgacattggccatcttcgcgcatctgtgcgagatgttcattggggtgcgcccatctcttcggctgttccggtggttcttcaccgtgcagtcggtgtcgccgccatcggtagtcggtggctgctacttccagccacgggggccggtgctgaaccgctacatcccctgtgccctccgcaagaagtgggacgactggaagagcgactgctggcgggcgccggtagatctgggggatggctatgacgccgtcctcgaccgcctggcgggcctgcgatcccaggggctcacaggggccatggtgtacggcgactacctccgtcgtcggattgcgccgctccagcgacgcgctcggggcgcctgggagtacaccgggtccgaagacttcacgaggacccaccagggagtgagatgggactgggctcctgaggacttcaagatattggtccaacgggtgctgaatctcaactccgtagaggcggccctcattccccaaggaatcctccccctctgcagcgatccagaccgcgcctccatcctgaccattatgatggcggtcggggcctcagaggagcgagctccaaagggccacgacggcgcaggcgggagccgcaggggggaacaatctaccccgagagggggtcgtgcttctgggtcccgcgacaggggcccggggagcagccgccctgccgacgcccgggtgaagaggaagcagggaggaacacctcccccatctcctccccgagggggcggggcggcgcgtgccagtaacaggcgcccggagggggccgcgccaacatcgcagcccgagggggagcgcaagaagaagcggccccgtaagatgggggagacagaaccatctcggggaaacctcatttcccctccaaagtggtcgtttaaccgaccccctcacagcgagatcccgtcgcgtccctcccgccattccaagtccggccagtctgaggccgaggatccggcggccgcagaggccctcaggcgggaatctgaccggcgagaggccgcggatcgcctacgggaagccgaggaggccgcccaggaggccgcccgggctcgccaggccgaggaaaccgctcgggaggaggccggatttcgccaggacgaggcgatggcgacttccgaggcagctcgcgacgaggccgcgggcgcgtcgcttgggcccactccctcaggcgacactcaggcgacaacttccggggcagctggcgacgaggccgcgggcgcgtcgcttgggcctactccctcgggcgacgctcaggaccaaccgggtccgggggacatccccgagtccggcacttccatcggcggcccgagccgcgtggcatcctctccaaggcggctcttccccacgccttctatcgccctactgaacgcagagccccttctgcaggccttggccgccgcaaacaccacggtgttggatgggttaagtgcccaggtggaggtcctgcaggcagagcgggcggagctcgacgccgcgtgggcgcgtgtcgaagaggggcgacgctcggtggaggccatggtggaggtgggccgtaaggctcaccgccggcacgtctcggagcttgaaactcgtaagaaggtgctggcggagatcgccaaggaagtggaggaggagcggggggctgccctcattgccaccaccgtgatgaacgaggcgcaggacaccctccgccttcaatacgggagctgggaggcggagctagggaagaagctcgacgccgcccagggggtgcttgacgctgccgctgcccgagaacagcgggcggcggagaccgaagcggcgtcccggcggcgcgaagaggcccttgaggcgcgcgccatggcgctggaagagcgcgcctgcgtcgtggagagggatctagcggaccgcgaggccgccgtcaccatccgggaagcaacgctggtggcgcacgaggctgcctgcgccgaagaagagttcacgctccgcctccgcgaggacgcgctcaccgaacgggagcgagctctcgagggggccgaggccgcggcgcaacagctggcggtcaacctgtcactccgcgaggcagcgcaggaggagcaggcgcgccgcaatctggaaggtgcccgcgccgagagggccgtactgaaccaacgggccgctgagctcgaggcacgggcgaaggagctggacgcgagggcgcgcagcggcggggcggccacgggcgaaagcgacttagccgcccgcctcacagctgccgaacgcaccatcgccgatctgcagggcgcgctggactcgtccgccggggaggtcgaagccctccgcttggcaggcgaggtagggcccggcatgctttgggacgccatctcccgcctagattgcgccggtcggcaagtgggcctctggagagggcggaccgtaaagtacgccgccaaccagggaggcctcgcccagcgcctctcgaagatggccggggctctccaacggctccccgaggagctcgagaagacaattaagtcatcctcgagggacctcgcccaaggagcggtggagctcgtcctggcgagttaccaggccagggaccccaatttctctccatggatggcgctggatgagttccctcctgggaccgaggaccgcgcgcgcgcgtag

SEQ ID NO: 82335 - DNA, 427 bp, Oryza sativa
  Clone ID: PAT_MRT4530_81775C.1
acgggattacacatgaacatttcacagttttgcaatttccaattgccggaattatataataatccctgccggacagtgaaaagtgtgatgaggtggggaaaaaaagcaaacaaagaaccgagaagctgggttgggccctcgaaactttgaatttctcatttcaaagggtcgaaaggaaaaaggtggaaatcttgggaaaatttttggagcgaggcggagttacaaaggcaggaaccttataagtttttactttctcactttcactggtaggccaccaaggtggaaaagcctatgaccctttgcgaatttccccacttgttgggggaccaggttaagactttcaccatgtatgaccctattaacatgctgagcgacgggtcaatggtgcacgaaacgtctgaacacctgaggtacaagggcaccatcg

SEQ ID NO: 82336 - DNA, 4044 bp, Oryza sativa
  unsure (1)..(4044): unsure at all n locations
  Clone ID: PAT_MRT4530_81776C.1
atggcattccggttcggcagcctcaacttcagcaccaacgacttcggcaagatttctctcctcgactcggattcgaaccagtcgggaagaggccagatcttcgctccgttcggtatcccgaactcggccgaggtctaccccaaggtcatctccgccgaattggcttcaaaccactcgaacgagatccaatttactccaacacgacccgatcaagacgatggggcctatccgccaatcctgatgaaactccccgacgatttggctgctgttttcactacaagggcgtcttctccccgtaggcctaggcgggatccggcttcagccccggtccggcctagctccagggaagtcggcgacatactccagccactcggcacggtttcgacggaccaactggacggctacctcagctcccccggcgtcgactcacgaccaacagagatcgtggagtatgacgacttcggctatcgctacaacaaccgcaacctcgacgacttcgacgagggctttgaagataactacacccctctctacttcggcgtcttcatggctgacaatgagacggaggaacaacacaaagcccgagaagcagaagagctatgcgtacaacaggaagccgaacgacgccgactagaagaggagcgccaagcgcaagagcgagaatggctgcagccgatcaccctcctcgacaccctcctcaaggaagacatactcaaccaagctaatcacgtcgtcaacatcttgaaccagaccaagaccatgatcgccgcctcggtcccgcgccgtgtggcacgaggctacgccccccaccattcaccggatcactacgacgacgatgtgaatggagtcgctgcctttacaagcgacctgcgtcgagtggattggccagccggcttcaagccaactggaatcgagaagtatgacagcaccactaacccggagtcttggctcaccgtttacggtctcgcaattcacgcagcaggaggagacagcaaagccatggcaaactacttgctagtggctttagcggattctgcccggtcctggcttcatgggttaccctgtggcacaatcggatcatgggcggaacttcgcgaccacttcatcgccaacttccagggcacctttgaatgccctggtacacagtttgatctctacaacgtcattcagaagtctggagaatcccttcgagattacatccgacgcttttctgagcaacgcaacaagatctccgacattaccgatgacatcatcattgctgctttcaccaagggaattcgtcacgaagatctagtcggcaagttcgggcgcaaaccccccaagatggtcaagcagattttcgaaaaaaccaacgatcgggcaccacttggaaagccgaagaaagatacggcgactacaggagggagtggaagtaccaatcacaaggaccgtaagcgtaagcccgaggaacttgttgcaactactacaccttcctcccgacaacgttcgcgcgtgaacacttttgacaagattatgaactcccaatgtccgcatcatcccaactccaatcacgcggccaaagattgcttcatctacaaacaatttgcagaacaatacgccaagaacgcacgaaaggcctctgacggagatcaaagcacgtcaaagaagaaggacgatgacgatgatgtcccgacaggttttcaagaccatcgcaaggaaatcaatgacatctttggcggacctctggcttatgaatctaagagaaagcaaaagctaaccgaatgggagattaacgctcttcagcccgacacgccccaatatcttcggtggtcggaaacaacaatcaagtttgatcgctcggatcatcctgaccgagtggtccacccggggcggtaccccctggtactagacccaatggttcgcaacgtcaagcttcgcagatccctcatcgatggtggcagtgcactcaacatccttttcgctaaaactctggatgacatgcagatccctcgcacggaattaaagctgagtaatgcgccctttcacggagtcattctagggctatccgctacaccactcggccaaatcactcttccggttaccttcggcacccgggagaacttccgcacagaaaacgtttgcttcgaagttgctgatttcgagacagcgtgtcatgccatactcggacgcccggcgttagccaagtttatggctgtcccgcactatacctacatgatgatgaagatgcctggtcctcgaggagtcatatccctgcggagcgacatcaagcaagccatcacatgcgacaaggaaagctgcgagatggcccagacccgcgagatcacgctcgcccaagaagaaatccgactagctgcatccacagcaagcgaaggagaagtgcctgtgaccaagatgccaaagagcggagaaagcgacgccaagaccaagaaaattcctctagatccttctgatcctactaagactgctgtaattggcgctgagttagattgtattcccagagaggtgattgagcactctttacatgttaaggaagacgctaaacctatcaagcaacaactccaccgtttcgcacaggataggaaggatgcgatcaaggaagaattgactaagctgttagcagcgggcttcatcaaagaagtccttcatcccgactggctggctaacccagtcctggttcggaagaagacggggcaatggcgcatgtgtgtcgattataccgacctcaacaagtctagtcccaaagacccttttgggttacctcgcattgaccagacttcattcattacgcccttcggggcctactgctacatcaccatgccctttggattaaagaacgcaggagcaacttatcaacgcatgatccagagatgtttttcaactcagatcggccgcaatgatgaagcttatgtggatgatgtaatcgtgaagaccaaacagaaggatgatttgatcgcggatctagaagagacctttgcaagcatccgcgccttcaggatgaaactaaaccctaaaaagtgcatcttcggagtaccgtcagggaagctgcttggatttatggtgtcccatagaggcatacaagccaacccggagaaaatcaacgccatcctcaacatgaaaccgccgagctcacaaaaagatgtccaaaagctgactggttgcatggcggcgcttagcaagtttgtttcgcgactcgacgagcgggggatgccctttttcaagctgttgaagaagacagancaatttcagtggggactcgaagcacataaagcctttgaagacttaaaaaaacttttcactactccaccagtcctagcttcaccacatccgcaagagccgctgttgttatacatgtcggcaacttcccaggttgtaagcacagtcctggtgttgagcgtgaagaagaaggccatgttcaaaaagtccaacgaccaatctacttcgttagcgaggatcgcgatctccttgggcattcggcgtctgatagttcgtggagattctcagttggttgttgatcaagtcatgaaagagtggtcctgccttgatgataacatgaccgcttatcggcaggaggtacgtaagttggaagacaaattcgatagacttgaactcactcatgttcttcggcacaataacgaggcagccgacagactggctaattttggttcaaaacgagaagtagctccttccgacgtgttcgttgaacatctttacgaaccaaccgtgccaaggaaagaaacaattgaagccacggatactcaagacggttgtcaatttttcgcccgacaaactcatttaccagctcaggagttgcaaaccatcctgttgtcttggccgtttgcggtttgggggcttgacatggtcggcccattcaaaaaggcagtcggtggttatactcacctctttgtggctgttgacaaattttccaagtggattgaagctaaaccggtcattacaatcatggcagacaaggctagagatttcttcatcaacattgtgcaccggtttggggtacctaatcgtatcatcactgataatggcacttaa

SEQ ID NO: 82337 - DNA, 1701 bp, Oryza sativa
  Clone ID: PAT_MRT4530_81777C.1
atgggttccgtctccgacattgacgacttcgtcttccctcctaggcaggcgttccggttcggcagcctagacttcatcaccaacgacttcggcaagatttctctcctcgactcgtattcgaaccactcaggaagagaccggatctccgccccgtttggtattccgaactcggccgaggtctaccccaaggtcatctccgccgagttggcttcaaaccactcggacgagatgcaatctactccaacacgaccagatcaagacgatggggcctatccgccaatcctgatgaaactccctgacgatctggctgccgtctttactacaagggcgtcttctccccgctacctcagctcccctggcatcgactcacgaccaactgaggtcgtagagtacgatgaattcggctatcgctacgacaaccgcagcctcgatgacttcgacgaaagcttcgaagataattacacccctctctacttcggcgtcttcatggtcgacaacgagactaaagaacagcgccaagctcgagaagcagaaggacgacgcgtacaacaggaggccgaacgacgccgactggaagcagagcgccaggcacaagagcgagaacggctgcagcgcgagcaacaggaacgtgaacgggctgcaaaggaggctgaggaccgacgacaacgagccttggaagccgggcgacgagcgcgagaacttatcggacagcaagacgttgagggaacggcggtctttcgcacccctcaacagaacgcggttgcagcaatcactctcctcgacaccctcctcaaggaagacgcactcaaccaagctgatcacgtcgtcaacatcttgaaccagaccaagaccatgattgccgcctcggtcccggttaactccgcaagcgtccgcacatcgactggcagccgagttccccatcttcgatctcaagattatcaccagccaagcctcagcatcgccggcgcgggatccaatcgcaggagcaggggttacgatgagcgatctgtccactcgcctcccgaacgacacagggagcgcggagttgaacggcctcgctccccacctcgtaggcgccccgtcgatcttcgtgatacaatcaaccagtgccgtgcagcacgaggctacccccaccaccattcaccagaccgctatgacgacgatgtggatggagtcgctacctttactagcgacctgcgtcgagtcgattggccagccggcttcaagccgactggaatcgagaagtatcatggcaccactaatcccgagtcttggctcaccgtctacgccgtcgccgtcgctcgggaagaccaccgtcgtgctcgccaagtcgtcgccgtcctcgtccgccccttcgccgtcaccggagatcgtcggagcttcgtcgccgtcgtcaagccgaagagcttcgccgcttcctcctcgtcgccgtcgccgtccgttgaccttccgccgtcgttttggtcgccggtgagttcgccgtgccgcccgcttcgtcttggtgccctccgtttgcgtcctcgcgccgccgttcaccggcgagcgtgcgccgttcgagccgtcttctccgccgagccgccgccgctgtcggtgacgtcaccgctgacgtcatcggggtcgtccgccgtgagccgctgtggatccgatcgatctcggccgttcgttttggattggttcgatctcggccgtccgttcgtgtga

SEQ ID NO: 82338 - DNA, 3207 bp, Oryza sativa
  Clone ID: PAT_MRT4530_81778C.1
atggcacggggctccgctctgctcgatggtagcgtgctgccgccctcccgcatcgtgagcgagaggcaggctgggctgccgcgccgcttcatgccggaatctgccaccggccgggagatagttacgctgggcgagggacgcccggcgccagactacccggggcggtccgtcttctttctcccctttgcaatggcagggctggttctgccattttcttctttcttcatggatgttctggagttctacgatctccagatggcgcacctcacccccaacgcggtgatgacattggccatcttcgcgcatctgtgcgagatgttcattggggtgcgcccatctcttcggctgttccggtggttcttcaccgtgcagtcggtgtcgccgccatcggtagtcggcggctgctacttccagccacgggggccggcgctgaaccgctacatcccctgcgccctccgcaagaagtgggacgactggaagagcgactggttctacactcccctcgccgacgaagcgcgcctccgacttccgagccagcccccggcgcaggcctccagctggcgggcgccggtagatctgggggatggctatgacgccgtcctcgaccgcctggcgggcctgcgatcccaggggctcacagggaccatggtgtatggcgactacctccgccgtcggattgcgccgctccagcggcgcgctcggggcgcctgggagtacaccgggtccgaagacttcatgaggacccaccagggagtgagatgggactgggctcctgaggacttcaagatattggtccaacgggtgctgaatctcaactccgtggaggcggccctcattccccaaggaatcctccccctctgcagcgatccagaccgcgcctccatcttgaccattatgatggcggtcggggcctcagaggagcgagctccaaagggccacgacggcgcaggcgggagccgccggggggaacaatctaccccgagagggggtcgtgcttctgggtcccgtggcaggggcccggggagcagccgccctaccgacgcccgggggaagaggaagcagggaggaacacctcccccatctcctccccgagggggcggggcggcgcgtgccagcagcaagcgcccagagggggccgcgccagcatcgcagcccgagggggagcgcaagaagaagcggccccgcaagatggaggagacagaaccatctcggggaaacctcatttcccctccaaagtggtcgtttaaccgaccccctcgcagcgagatcccgtcgcgtccctcccgccattccaagtccggccagtctgaggccgaggatccggcggccgcagaggcccgtaggcgggaagctgaccggcgcgaggccgcggatcgcctacgggaagccgaggaggccgcccaagaggccgcccgggctcgccaggccaaggaaatcgctcgggagggagccgcccgggcccgccaggccgaggaaactgctcgggaggaggccgcccgagcccaccaggccgaggaagctgctcgggaggaagccggatttcgccaggacgagacgatggcgacttccgaggcagcccgcgacgaggccgcgggcgcgtcgctcgggcccactccctcgggcgacgctcaggcgacaactcccggggcagctggcgacgaggctgcgggcgcgtcgcttgggcccactccctcgggcgacgctcaggaccaaacgggtccgggagacatccccgagtccggcacttccatcggcgggccgagccgcgtggcatcttctccgaggcggcttttccccacgccttctgctgccctactgagcgcagagccccttctgcaagccttggccgccgcaaacaccacggtgttggacgggttaagtgcccaggtggaggccctgcaggcagagcgggcggagctcgacgccgcgtgggcgcgtgtcgaagaggggcgacgctcggtggaggccatggtggaggtgggccgtaaggctcaccgccggcatgtctcggagcttgaaacccgcaagaaggtgctggcggagatcgccaaggaagtggaggaggagcggggggctgccctcatcgccaccaccgtgatgaatgaggcgcaggacaccctccgccttcaatacgggagctgggaggcggagctaaggaagaagctcgacgccgcccagggggtgcttgacgctgccgctgcccgagaacagcgggcggcggagaccgaagcgacgtcccggcggcgcgaagaggcccttgaggggcgtgccatggcgctggaagagcgcgcctgcgtcgtggagagggatctggcggaccgcgaggccgccgttaccatccgggaagcaacgctggcggcgcacgaggctgcctgcgccgaagaagagctcgcgctccgcctccgcgaggacgcgctcaccgagcgggagcgagctctcgagggagccgaggccgcggcgcaacagctggcggacagcctgtccctccgcgaggcagcgcaggaggagcaggcgcgccgcaatctggaaggtgcccgcgccgagagggccgcactgaaccaacgggccgctgagctcgaggcgcgggcgaaggagctggacgcgagggcgcgcagcggcggggcggccgcgggcgaaagcgacttagccgcccgcctcgcagatgccgaacacaccatcgccgttctgcagggcgcgctggactcgtccgccggggaggtcgaagccctccgcttggcaggcgaggtcgggcccggcatgctttgggacgccgtctcccgcctagatcgcgccggtcggcaagtgggcctctggagagggcggaccgtaaagtacgccgacaaccagggaggcctcgcccagcacctctcgaagatggccggggctctccaacggctccccgaggagctcgagaagacaattaagtcatcctcgagggacctcgcccaaggagcggtggagctcgtcctggcgagttaccaggctagggaccccaacttctctccatggatggcgctggatgagttccctcctgggactgaggaccgcgtgcgcgcgcaagtccgggacgccgccgactatatcgtcgacagcttcgagggctcggcccctcggcttgcgtttgcccccaactccgacgatgagggcaatgccggtggtgtagacgacagtgacgtcgaggccggcgatccgggcgcatcgggatga

SEQ ID NO: 82339 - DNA, 1472 bp, Oryza sativa
  Clone ID: PAT_MRT4530_81779C.1
gcgccgcgctgcgcctgccgcctcctccgcctccctcctgctcccgcctcccccagccactcgccgcccccgccccccgcctcccccgcccgcccccccctccccccccccccccgatggacttggtgcgcgcgctcgccgccatcccggctcgtcaccctctccctccctcctcgctgacaaaggctcgccgccatgggcctcaaccatcgacgaccgttctggcgccggtgccaggtggaatgttggatagaagaagactgctgttgattcctgcaatcagcatcagcattggctccttcgacaagggggcagcaaaagctgagtttgctgatatgcctgcgcttcgtgggaaggattatggaaagacgaagatgaagtacccagattacactgaaacagaatcaggtcttcagtacaaggacttgagagttggtgatgggccttctccaaagaaaggggaaacagtagtgtgttatcatttgttgatttatgccaaccctgatatagatttggattgtgtgagtgcacttaaggttgattgggatggctacacaattggatactatggtcgcatttttgaagctcgaaacaagaccaaaggtggttcctttgagggtggtgataaagacttctttaaatttaagattggatcaggacaggtcataccagcttttgaggaggctatatcagacatggctccaggtggagttaggaggataatagtaccaccagatcttggatacccagacaatgactacaacaagttgggtccaaaaccaacgacattctcgggacaaagggctctggattttgttctgaggaatcaagggttgatagataaaactctcctgtttgacattgagcttttgaagattataccaagtcaatagtacatggcaatgttgctgaccacttggagaaaaaaacacacaagtttttggcgtcgtaccagtaccagtcgacatgtaaatatgggcctgtttagttttcaaacaaaatttttcacgctgtcacatcgaatgtttggacacatgcatagtgttaaatgtagaaaaaaaaaccaattacatagttcgacaggaaattgcgagatgaatcttttaagcttaattgcgccaggatttgataatgtggtgctacaataaacatttgttgatgacggattaattaggcttgataaattcgtctcgaagttttctggcagaatctgtaatttgttttgttattagactacgtttaatactttaaatgtgtgtccgtatatccgatgtgacatgtaggggcaaatttttttgccaactaaacaggccctatatatgccatcaatttgaatatgaacagaaaattttctaagcatatatacataaatattgtatgccaaaaaaaaaaaaaaaaaaaatgacaccacggacgaattcattacgacagtaattattattcaaaccatcttgatatgagatgaaccactt

SEQ ID NO: 82340 - DNA, 543 bp, Oryza sativa
  Clone ID: PAT_MRT4530_8177C.1
atggacgacaagatggcgtatgccgaccttgggacaagccatcatcaccctaaaaaggcactgagcatgggggctatcagacgacatggtcgtttgacttgttgccagttccagcccactgtagtacagccccacctagcctctaatgctcaagtaggctcggcaaccaccaagctagagaagcacaagcttcgacacaaagcgtcggtgtcctctctccctatgcatcctcacaagagctgcgccatcgccgccaccgaatcgtccagcgaggaggccggggacaccggatctggcgaccccggcctccccgccgatggatccggttggctggtcagaaccttcgttgctattttcttatccaatggggtcgacaacgttatttggtttgtgttcatgttgttgatcccggatctagccaatgtggcgaaggagaaggagatcaccaagttggtggcaattaagggctcaagcgcgacgatggatgaggttgggtgtacggatagattaggagattactatgaagttgatccttatttgtga

SEQ ID NO: 82341 - DNA, 3423 bp, Oryza sativa
  Clone ID: PAT_MRT4530_81780C.1
tcattccaatgcgcccgggtcgccggcctcgtcgccgccgtcatcctcatcgctggcgtcgctctcctcgtcggagctgggggcgaacgcgagcagaggggccgacccctcgaagccgtcgacgatatggtcggcagcatcccggacgcgcgcgcgcgcgtcgtcctcggttccgggagggaactcctccagcgccatccagggagagaagtcggggtcccgggcctggtagctcgccagcacgagttcgaccgccccctgggcgaggtccctcgaggatgacttgatggtcttctcgagctcctcggggagtcgttcgaggacccaggccatcctgttgaggtgcggagcgaggccttccaggttgctagggcgcgtcctcgtctggcctttccagaggcccgcttgccgaccggcgcgatccatgcgggagaccgagtcccaaagcatgtcgggccccatctcgcccgccaagcggagggcctcggcctccccgatggaagaatccagcgcgcgctgcatgtcagcgacggtgtgttcggcagccgcgaggcgagcggctaagtcgctttcgcccgcagccgccccaccgatgcgcgccctcgcggccagctctttctcccgtgcctcgaggttggcagcccgctgctccagcgcggctctctcggcacggacgcattcaaggttgcggcgcgcctgctcctcttgcgccgcctcgtgatgaaccctgagttcctctcgacactcaaggttgttgttggcccgatctttcggtgagttgatgaaaactctccgtgggttgttgatcttgccggtgcaaatcaaccttattccttgagaatactcaccttcatttctctcagcaccatttaatttaccttgcgaactttcttcagataatgtagctgcatcagccttctcctcattcgcgagtgatggaagtgacatctcaaacatatcgttcttctcattttggagacttttctgaacttcctcgcggagggagaggctgttcgccagccgttgcgtcgtggcctcggcctcctcgagagctcgctcccgctcagcgagtgcatcctcgcgaaggcggagcgcggactcctcctcggcgcaggcggcctcgtgcgccgccagcgtcgtctcccggagagcagtggcggcctcgcggtccgtgaagcccttctccacggtgccggcgtgttcttccagcgccatggcacgggcctcaagggcctcctcgcgccgccgggacgccgcttcggcttccgttgcccgccgctctcgggcagcagcggagtcaagaaccccttgggcggcgtcgagcttgttcttcagctccgcctcccagctcccgtgttgaaggcggagggagtcctgcgcctcaatcatcgcggtggtggcgacaagggcggcctctcgctcctcctccacctctcgggcgatctccgccagcgccgccttgcgggcttcaagctccgagatgtggcggcggtgggccttacggcccacctccaccatggcgtccaccgagcgccgcccctcctcaacacgcgcccatgcggcctcgagctccgctcgttctgcacgcagggcctccacttgggtgttgaacccatccagcactgcggtgtttgcggcggccagggcctgcagaaggggctcggcgctcagcggggcgacagaagatgaggagaagagccgccttggagaaaaggcgacgcggcttggccccccggaagatgcgctgggctcggggatgtcccccgggcccgtttgatcatgggcgtcgcccggtgaggtaggcccaggcgatgcgcccgcggcctcgtcgcgagccgcctcggaggatgtcgcctgagggccgcccgagggagtaggcccaagtgacgcgccagcagcagctgtcgcctcagcctggcgagcccgggtggcctcctcccgggcagcttcttcggcttggcgagcccgggcggcctcctcccgagcagcttcctccgcttggcgaacccgggcggcctcccgggcggcctcttcagcttcccgaaggcgggctgcggcttcacgccggtcagactctcgcctccgctcctctgcggctgctggatcttcggcctcggactggccggacttggggtggcgggaggaatgcgacgggacatcgctgcgagggggtcggttgaatgaccaccttggaggggaaatcaggtttccccggcatggttccgtctcccccgtcttacggagccgcttcttcttgcgcaccccctcgggctgcgatgtcggcgcggccccctccgggcgccgactgctggcacgcaccgccccgccccctcggggaggagatggcggaggtgttcctcccagcttcctcttcccctgggcgacggcagggcggctgctccccgagcccccgacgcggggcccagaagcacgaccccctcctggggcaggttgttccccccggcggcgctcgcccgcgccgtcgtggcccttaggggctctctcctctgaggccccgacccccatcataatggttagaatggagacgcggtcgggatcgctgcagagggggaggatctcttgaggaaggcgagacgcctccgcggagctaagattcagcaccctttggactacgatcttgaagtcctcgggagcccaatcccatctggctccctggtgggtccgcatgtagtcttcaggcccagtgtactcccaggcgctccgggcgcgccgttggagcggcgcaatccggcgacggagataatcgccgtacaccatggccccggtgagcccctgggatcgcaggcccgccaggcggtcgaggacggcgtcgtagtcctcccccagatctaccggcgcccgccagctggagacctgcgccgggggctggcttggaagtcggaggcgcgcttcgtcggcaaggggggtgtagaaccggtcgctcttccagtcgtcccacttcttgcggaggacgcaggggatgtagcggttcaacactggcccccgcggctggaagtagcagccgccaaccgctgacggcggtgacaccgactgcacggtgaagaaccaccggaacagctgaagagaggggcgcaccccaatgaacatctcgcacaggtgtgcgaagatggccaatgtcatcaccgcattgggggtgaggtgcgccatctggagatcgtagaactccaggacatccatgaagaaatgagaaaatggcgggaccagcccagccatcgcgaaggggaggaagaagatggaccgccccgggtagtctggtgccgggcgcccctcgcccagcatcactatctcccgaccggtggcggactccggcatgaagcggcgcggcagtccggcgtgcctctcgttcacgatgcgggaaggcggtagtacactgccatcgagcagagcagagccccgtgccat

SEQ ID NO: 82342 - DNA, 4204 bp, Oryza sativa
  Clone ID: PAT_MRT4530_81781C.1
atgggttccgtctccggcatcgacgacttcgccttccctcccgggcaggcgttccggttcgatagcctcaacttcatcaccaacaacctcagcaagatctctctccttgactcggattcgaaccagtcggggagagaccatgtccccgcgccgttcggtattccgaactcggccgaggcctactccaagatcatctctctcgggtcggcttcaaaccactcggacgagatccaatctactcctccgcgaccagatcaagacgacggttctcgaccaaccgagatcctcgactgcgacgacttcggctaccactacgaccacggcgacttcgacgacagctatgaggataagtacacgcctctctttttcggcgtattcatggctgacaacgaaacggaggaacaacgccgagccaaagaagtggaggaagagcgcacacgacaagaaaccgaacgtcgccgactggaggaagaacgacaacgacaagagcgagaacgactacagcgtgagcaacaagatcgcgagcgagttgcaaaggaggctgaagatcgacggcaacgcgccttggaatccaggcgacgagcgagagacctcatcgggcaacaagacgtcgatgaaacaacggtttttcgcaccccccagcagaacgcggttgcagcaatcactctccttgacaccctcctcaaggaagacgcactcaaccaagctgatcatgttgtcaacatcttgaaccagacgaagaccatgatcgctgcctcggttccagccaactccgcaagcacccgcaccccgactggtagccgagtccctcatcttcgatctcaagactatcaccaaccaagcctcagcattaccggcgccggatctagtcgcaagagcaagggacatgatgaacgatctgttcgtttgcctcctgaacaacatagggagcgccgagttgaacgaccacacttcccacatcgaagacgccccatcgatcttcgtgacaccatcaaccagcgccgcgcggcaagaggacatcattcaccggaccgctacgacgacgacatggacggagttgctgccttcacaaatgatctgcgtcgagtgaattggccagctgactttaagccgactggaatcgagaagtatgacggcaccaccaacccggaatcctggctcaccgtctacggtcttgcaatccgcgcagcaggaggagacagcaaagccatggcgaactacctgcccgtggccttggcggattctgcccggtcctggcttcacgggctaccccgtggcacaatcggatcatgggtagaactacgcgaccacttcatcgccaacttccaaggcacttttgaacgccctggtacacactttgatctctacaacatcattcagaagtctggagaatcccttcgagattacatccgacgcttctccgagcaacgcaacaagatctccgatatcaccgacgacatcatcatcgccgcctttactaaaggcattcgccacgacgacctagtcggcaaattcggacgcaaacctcccaagacggttaagcagatgtttgaaaaaaccaacgagtatgccaaagccgaagatgctattactgcgtccaaacagtcgggcaccacttggaagccaaggaaagacacgccgaccgcaggagggagtggaagtaacaaccgcaaggatcgcaagcgtaagcccgaagaacttgtggcaacaacctctccatcttcccgacaacgtccccgcgtcaacacattcgacaagataatgaactcccaatgtccgcatcatcccaactccaaccacgtggccaaagactacttcgtctacaaacaatttgcgaagcaatacgtcaagaatgcacgtaagccctcagacggagatcaaggcacatcaaagaagaaagatgatgaagatgatgccccgactggttttcaagaccatcgtaaagaactcaatcacatcttcggcggacctctggcttacgaatctaagagaaagcagaagctaacagaacaggagatcaatgcggttcagcccaacacgccccaataccttcggtggtcagagatagcaatcaagttcgaccgctcggatcatcccgaccgagtggtccacccggggcggtaccccctgatactagacccagtggttcgcaatgtcaagctccgaagaactctcatcgatggtggcagtgcactcaacatccttttcgctaagaccctggacgatatgcagattcctcgcacggaattaaagccaagtaatgcacccttccacggtgttatcccaggattatcagccacaccactcggccagatcactcttccgagcacgcgcctcctgctccgctcgcccgctttttccgtggacgcccatttcaaccttcatttaatggccagcgacttccttgccgtgcttgcgctacagcctggaatgaatctgaccgggactgacataccaactccaggagtcagcacgccagctccggctagggacgagagccgggaagccctcatcattccgacgggacggggcgagacgtgtgacaggccgcctgttgccacctaacccgcgatctgaccggtctgtgaccggtcacacaccgcgaccggtcacggaccggataagcgtgcgctgcgccacccacgacgaggccgcgggcgcgccgctcgggcccgacccctcgggcgacgcttgggacgagccagcttcgggggacgcccccgagtccggcacgtcgatcggcgggccgagccgcgtggcacccacaccgaggcggctctcccctcggccttccgctgccccactgagcgcggagcccctcctgcaggccttggccgccgcgaatagcacggtgctggacgggttaagtgcccagatggaggccctgcaggcggagcgagcggagctcaaagcggcgtgggcgcgcgtcgaggaggggcggcgctcggtggaggccatggtggaggcgggccgcaaggcacaccgccggcacgcctcacagctcgaggcccgtcgtagggacctggcggagatcgccagggaggtggaggaggagcgggagactgccctcatcgccaccgccgtgctcgacggggcgcgggacgacctccgcctccaatacgggagccgggcggcggagctagaggagaagctcgacgccgcccagggagtccttgacgccgccgctgcccgggaacggcgggcggcggagaacgaggcggcgtcccggcagcgcgaagaggcccttgaggctcgcgccacggcgctggaggagcgcgcccgcgccctggacgcgaaggagagagacctggcggaccgcgaggccgccgtcgccacccgggaggcaacactggcggcgcacgaggccgccggcgccgaagaggagtccgcactccgcctccgcgaggacgcgctcaccgagcgggggcgagctctcgaggaggccgaggccgcggcgcagcggctgacggacagcctgttcctccgcgaggcagcgcgggaggagcaggcgcgccgcaatctggaaggcgcccgcgccgagagggccgcactggatcagcgggccgctgagctcgaggcacgggcgaaggagctggacacgagagcgcacagcggcggggcggccgcgggccacggcaacctagccgcccgcctcgcagccgccgaacacaccatcgccgagctgcagggcgcgctggactcgtccgccggggaggtcgaggccctccgcttggcgagcgaggtagggcccggcatgcttcgggacgccgtctcccgtctagaccgcgccgggcagcaggcgggcctctggggcgggcggtacgcgaagtacgccgccaaccaggggggcctcgcccagcgcctctcagagatggccggggccctcgagcggctccccgaggagctcgaggagacgatcaagtcatcctcgagggacctcgcacggggggcggtggagctcgtactggcaagctaccaggccagggaccctgacttctccccgtgggcagcgctggaagagttccctcccggaaccgaggacggcgcgagcgcgcaggtccgagacgccgccgaccacatcgtccacagcttcgagggtacagcccctcggctcgcgttcgcgctcgactccgacgaggagggcggtgacgacggtgcggacgacagcgacgacgaggccggcaacccgggcgcgtcggagtga

SEQ ID NO: 82343 - DNA, 382 bp, Oryza sativa
  Clone ID: PAT_MRT4530_81782C.1
tcggatccggcgagatcgtagtcgagttggttcaactagatctcgatggcttggctccttgcaggctctggcttcataggctgtgtgggttgtgttggctctgagattcgatgccttaggtcctccccggggggtcccttttatattgcagacctggaggtctccaagtagaactcggagatatcagaccctgtacgatacattaacgacccaatcttgtccgagtaggattcttcccatccatagattctgtgaaggatttccttagagtacgcaagaagtatccgtatgcgcgtggatataccataccgatatgtaacgtatattaaagggtaaagggtatgcctaacccgttcgtcgcaaggcgtcgaccccctgggta

SEQ ID NO: 82344 - DNA, 485 bp, Oryza sativa
  Clone ID: PAT_MRT4530_81783C.1
agcaagcaagcaaactgacctttcatcaaaaggattattattccagtgccttggtaggcatcactaggtactactagtagtggatgctgctctgcttggtattatgtcaacaagtactacacagcaataccaggggcaggcaggataaggaaagaattgacattgccacacacactagcagattaactgaatgaatgatatgcaatgctccacatccatcttctctcacaccagccacttggaatgaacagatggtaaaccctaggaggggtagtcaccaccatctctgcatggaataaattcagcactagaaattgcaacatcttgcaatctactacaaggaggataggaaaaattcagatatgggcacttggagttaaaactaaagcatgatcactataattaaatctcaaaatgtgtttcatggaaaacattttggccgctttacatgcacaccaactagcaaacactaacatgggaaaggg

SEQ ID NO: 82345 - DNA, 3198 bp, Oryza sativa
  Clone ID: PAT_MRT4530_81784C.1
atggcacggggctccgctttgctcgatggtagcgtgctgccgccttcccgcatcgtgagcgagaggcaggccgggctgccgcgccgcttcatgccggaatctgccaccggccgggagatagtcacgctgggcgagggacgcccggcgccacactacccggggcggtccgtcttcttcctcccttttgcaatggcagggctggttccgccattttcttctttcttcatggatgttcaggagttttacgatctccaggtggcgcacctcacccccaacgcagtaatgacattggccatcttcgcgcacctgtgcgagatgttcatcggggtgcgcccatcccttcggctgttccgatggttcttcaccgtacagtcggtgtcgccgccgtcggtggttggtggctgttacttccagccgcgggggccggtgctgaaccgctacattccctgcgtcctccgcaagaagtgggatgactggaagagcgactggttctacacccccctcgccgacgaagcgcgcctccgacttccgagccagcccccggcgcaggcctccagctggcgggcgccggtagatctgggagatggctatgacgccgtcctcgaccgcctggcgggcctgcgatcccaggggctcacaggggccatggtgtacggcgactaccttcgtcgccggattgcgccgctccagcggcgcgcccggggcgcctgggagtacaccgggtccgaagactatatgaggacccatcagggagtcagatgggactgggctcctgaggatttcaagatagtggtccaacgggtgctgaatctcagctccgtggaggcatccctcattccccaaggagtcctccccctctgcagcgatccagatcgcgcctccatcctgaccatcatgcaggcggtcggggcgtcggaggagcgggctcctcgaagccacgatggcgcgggcgggagccgcaggggggaacaatctaccccgggagggggtcgtgcttctgggccccgcgacgggggcccggggagcagccgccctgccgacgcccgggggaagaggaagcaggaaggaacccctcccccatctcctccccgagggggcggggcggcgcgtgccagcagcaggcgcccggagggggccacgccgacgtcgcagcccgagggggagcggaagaagaaacggctccgcaagatgggggggacagaaccatcccggggaaaccttatttcccctccaaggtggtcgtttaaccgaccccctcgcagcgagatcccgtcgcgtccctcccgccattccaagtccggccagtctgaggccgaggatccggcggccgcagaggctcggaggcgggaatctgaccggcgagaagccgcggatcgcctacgggaagccgaggaggccgctcgggaggccgcccgggctcgccaggccgaggaagccgctcgggaggaggccggactccgccaggccgaggcgacgacatcctccgaggcgacccgtgaaactgaccggcaagaggccgcggatcgccttcgggaagccgaggaagctgcccaggtggccgtccgagctcgccaagctgaagaagccgctcgggaggaggccaaacttcgccaggctgaggcgacgacgacttccgaggcagctcgcgacgaggccgcgggcgcatcgcttgggcccactccctcgtgcgacgctcaggacaagccaggtccgggggacatccccgagtccggcacgtccatcggcgggccgagccgcgcggcatcctctccgaggcggctcttccccacgccttccgttgccccactgagcgcagagccccttctgcaggccttggccgtcgcgaacaccacggtgttggacgggttaagtgcccaggtggaggccctgcaagcagagcgggcggagctcgacgccgcatgggcgcgtgtcgaagaggggcgacgctcggtggaggccatggtggaggtgggccgcaaggcacaccgccggcacgtctcagagcttgaagcccgtcggaaggtgctgggggagatcgccaaggaggtggaggaggagcggggggctgccctcatcgccaccaccgtgatgaacgaggcgcaggacaccctctgccttcaatacggaagctgggaggcggagctagggaagaagctcgacgccgcccggggggtccttgacgctgccgctgcccgagaacggcgggcggcagagaccgaagtggcatcccggcggcgcgaagaagcccttgaggcccgtgccatggcgctggaagagcgtgcctgcgccgtggagagggacctggcggaccgcaaggccgccgttgccatccgggaggcaacgctggcggcgcacgaggccgcctgcgccgaagaggagtccgcgctccgcctccgcgaggacgcgctcaccgagcgggagcgagctctcggggaggccgaggccgcggcgcaacggctggcggacagcctgtccctccgcgaagcagcgcgggaggagcaggcgcgccgcaatctggaaggtgcccgcgccgagagggccgcactgaaccagcgggccgctgaactcgaggcgcagacaagggaactggacgcgagggcgcgcagtggcggggcggctgcgggcgaaagcgacttagccgcccgcctcgcagctgccgaacacaccatcgccgatctgcagggcgcgctagactcgtccgccggggaggtcgaggccctccgcttggcaggcgaggtagggcccggcatgcttcgggacgccgtctcccgtctagaccgcgccgggcggcaggcgggtctctggggcaagcggactgcgaagtacgccgctaaccaggggggcctcgcccagcgcctctcggagatggccgggactctccaacggctccccgaggagctcgagaggacgattaagtcatcctcgagggacctcgcccgaggagcggtggagctcgtactggcgagttaccaggccagggatcccgacttctccccatggacggcgctggacgagttccctcccgggaccgaggacggcgcgcgcgcgcaggtccgggacgccgccgaccacatcgtccacagcttcgagggttcggcccctcggctcgcgttcgccctcaactccgacgaggaggacgatgacagcggagtgggcggcagtggcgacgaggctggcgacccgggtgcattggattga

SEQ ID NO: 82346 - DNA, 1392 bp, Oryza sativa
  Clone ID: PAT_MRT4530_81785C.1
ttatggagtacttggggcagttgggccttgagtatctggcattagttcaagcttgcctagtgggctagtggctacaaggaaacaggccatttcagacttgcacggtttggactttggacagagtagaacggatacgaatggttgcctgtcactgcgcttgtcagtagccttgccacattcaccctggaggccacttctctcaacatgcttcctggctgggcatcctcttacactgctacacttatagtaacccctaggatgtggggatccttttattggcttctgtccatacttcctccatgagaactcatcagctggaatgtcagcaaccttattactgattgcagggactttgatagacctccttatcctcagcttccttttcttcgcacagtgacatcggctcccagttgtgcatcgtccactaccatcctccctaccagtgcacctcctcctctgcatgaggcctaactctggagtgcttgacgtctgtgacccactaactagctggaatggacgactggagcggctaccgtccaaactcgcaatgctcccctccatactcagagacgacaagaatgaacgggaggatgatgcccgtgcaattagaactgtcaaacttgagattaacacccttaccaccaccattgctaccaccctgttcaccaaggccactcctctttatcatctcactctgcatcttcatctgctgcatgagctgaaacctctggtagctctgatgctgctggatgaaatgaagatgcgccgaaggcaatgccgggtgaggcgttccagctgggggcgcaacagacaccggctggatgagctggagcggtggcccccgtgatggcccatccgaatcaaccgcagggttatctagaagcaaccttttggggaattgggcagggatcctaacaggatcctttgaagaagagccctccatctgatggtacctcggaaacagctggaggctagtgatcggactcgagttaggtgtcttggctgccatcgccacagccagtgcagggctctccaaaaagaggttgctatcaaagataggcaagggcttcttgatctttctaacccgggcatggccctggaggccattgccattgttcagcctggatgccacggagcagaactttgcaacagcctctcccgtagccgccgcgagatccttgttagggacaagctggctatgggggctggagaggagggtgagcaccctgtgacagctctgcactgcctccctgtttgcttcctccatcccctccatgaatcactcccctcccaccctacctcgctggagccagggctgagacctccaccggtggagacgacgacgacgaggaggagagggagtggctgccccgctctctctccctcgtgcgg

SEQ ID NO: 82347 - DNA, 3144 bp, Oryza sativa
  Clone ID: PAT_MRT4530_81786C.1
atggcacggggctctgctctgctcgacggcagtgtactaccgccttcccgcatcgtgaacgagaggcacgccggactgccgcgccgcttcatgccggagtccgccaccggtcgggagatagtgatgctgggcgaggggcgcccggcaccagactacccggggcggtccatcttcttcctccccttcgcgatggctgggctggtcccgccattttctcatttcttcatggatgtcctggagttctacgatctccagatggcgcacctcacccccaatgcggtgatgacattggccatcttcgcgcacctgtgcgagatgttcattggggtgcgcccctctcttcagctgttccggtggtttttcaccgtgcagtcggtgtcaccgccgtcggtggttggcggctgctacttccagccgcgggggccggtgttgaaccgctacatcccctgcgtcctccgcaagaagtgggacgactggaagagcgactggttctacacccccctcgccaacgaagcgcgcctccgacttccaagccagcccccggcgcaggtctccagctggcgggcgacggtagatctgggggaggactacgacgccgtcctcgaccgcctggctggcctgcgatcccaggggctcaccggggccatggtgtacggcgattacctccgtcgccggattgcgccgctccaacgacgcgcccggagcgcctgggagtacactgggcctgaagattacatgcggacccaccagggagccagatgggattgggctcccgaggacttcaagatcgtggtccaaagggtgctgaatcttagctccgcggaggcgtctcgcattcctcaggagatcctccccctctgcagcgatcccgaccgcgcctccattctaaccattatgatgggggtcggggcctcagaggagagagcccctaagggccacgacggcgcgggcgagcgccgccggggggaacaatctgccccaggagggggtcgtgcttctgggccccgcgtcgggggctcggggagcagccgccctgccgacgcccaggggaagaggaagctgggaggaacacctcccccatctcctccccgagggggcggggcggcgcgtgccagcagtcggcgcccggagggggccgcgccgacgtcgcagcccgagggggagcgcaagaagaaacggctccgcaaaacgggggagacggaaccatgccggggaaacctgatttcccctccaaggtggtcattcaaccgaccccctcgcagcgatgtcccgtcgcattcctcccgtcactccaagtccggccagtccgaggccgaggatccagcggccgcagaggagcggaggcgagaatctgaccggcgtgaagccgcagatcgccttcgggaagcggaagaggccgcccgggaggccgcccgggttcgccaagcggaggaagctgctcgggaggaggccgcccgggctcgccaagccgaagaagctgcccgggaggaggccgcccgggctcgccaggctgaggcgacagccgctgctggcgcgtcacttgggcccactccctcgggcggccctcaggcgacatcctccgaagcggctcgcgacgaggccgcgggcgcatcgcctgggcctacctcaccgggcgacgcccaggaccaaacgggcccgggggacatccccgagcccagcgcatcctccggggggccaagccgcgtcgcattttctccaaggcggctcttctcctcatcttctgtcgccccgctgagcgccgagccccttctgcaggccctggccgccgcaaacaccgcagtgctggatgggttcaacgcccaagtggaggccctgcgtgcggaacgagcggagctcgaggccgcatgggcgcgtgttgaggaggggcggcgctcggtggacgccatggtggaggtgggccgtaaggctcaccgccgtcatgtctcggagcttgaagcccggaaagcggcgctggcagagatcgcccgtgaggtggaggaggagcgggcggccgccctcatcgccaccaccgcgatgatcgaggcgcaagacaccctccgccttcagcacgcaagctgggaggcggagctgaagaaaaagctcgacgccgcccaaggggtccttgactccgccgctgcccgagagcggcgggtaacggagactgaagcggcgtctcggcggcgcgaggaggctcttgaggcccgtgccatggcgctggaagaacacgccggcgccgtggagaggggcttgacggaccgcgaggccgccgctgttctccgggaggcgacgctggcggcgcacgaggccgcctgcgccgaggaggagtgcacgctccgcctccgcgaggacgcactcgctgagcgggagcgagctctcgaggaggctgaggccacgaccaaacggctggcggacagcctgtccctccgcgaggcagcgcaggaggagcaggcgctccgcaatctggaatgcgtccgcgccgagagagccgcactggagcagcgggctgccgacctcgaggcgcgggaaaaagagctggacgcaagggcgcgcgtcggtggggcggctgcgggcgaaagcgacttagccgctcgcctcgcggctgccgaacacaccgtcgctgacatgcagcgcgcactagattcctccatcggggaggccgaggccctccgcttggcgggcgagatggggcccgacatgctttgggactcggtctcccgcatggatcgcgccggtcggcaagcgggcctctggaaaggccagacgaggatgcgccccgccaacctggaaggcctcgctccgcacctcaacaggatggcctgggtcctcgaacaactccccgaggagctcgagaagaccattaagtcatccttgagggacctcgcccggggggcggtcgaactcgtgctagcgagttaccaggcccgggaccccaacttctccccatggatggcgctggaggagttccctcccgggaccgaggacgatgcacgcgcgcgcgtccgggatgccgccgaccacatcgtcaacggcttcgagggctcggcccctcggctcgcgttcgcccccagctccgacgaggagggcgatgccagcggtgaggacgatggtggcgacgaggccggcgacccgggcgcgtcagaatga

SEQ ID NO: 82348 - DNA, 634 bp, Oryza sativa
  Clone ID: PAT_MRT4530_81787C.1
ccggccgggcctctctctctctctcgatcggccacatccacccacagattcgaacttctccctgcccccccccccccacccccaacaatggtcggattcgacatagcgggaggaggattcgtttcttcgcggtccccgtgttgaataggaaggaattcagagggattagtcctcatcgccgaggtttttcagaagacgaccaccacggttgatttaccggacctctcaaggcaacagcggatgatgttcgggcggcgacgtttatggagcgcgcgcgtcaaggactagtacagccagttcaaggagaactccgccgagaaagcactggatctgcatcgaggacaagttccgcgccgccggcgactacgtctcacagaagagcagctcggtgtttggcaaaaagaaggtcgagcccatggtcaaggatgcagcagctccagggaagggcgggaggtgactccggtggcagtcgaatctcagtgaagggggctcgcatctgatcataaccaacttgagacaagtgtaaatcctcttaggtattcgatggtggaatttttggagctgtgagatcttatcgatcagcttaagatggaatctagcaatgcacaacctcaagattctgcctattcagttc

SEQ ID NO: 82349 - DNA, 2913 bp, Oryza sativa
  Clone ID: PAT_MRT4530_81788C.1
atggcacggggctctgctctgctcgacggcagtgtactaccgccttcccgcatcgtgagcgagaggcacgccggactaccgcgccgcttcatgccggagtccgccaccggtcgggagatagtgatgctgggcgaggggcgcccggcaccagactacccggggcggtccatcttcttcctccccttcgcaatggctgggctggtcccgccattttcttctttcttcatggatgtcctggagttctacgatctccagatggcgcacctcacccctaatgcggtgatgacattggccatcttcgcgcacctgtgcgagatgttcattggggtctccagctggcgggcgccggtagatctgggggaggactacgacgccgtcctcgatcgcctggcgggcctgcgatcccaggggctcaccggggccatggtgtacggcgattacctccgtcgccggattgcgccgctccaacggcgcgcccggagcgcctgggagtacactggacctgaagactacatgcggacccaccagggagccagatgggattgggctcccgaggacttcaagatcgtggtccaaagggtgctgaatcttagctccgtggaggcgtctcgcattcctcaggagatcctccccctctgcagcgatcccgaccgcgcctccattctaaccattatgatgggggtcggggcctcagaggagagagcccctaagggccacgacggcgcgggcgagcgccgccggggggaacaatctgccccaggagggggtcgtgcttctgggccccgcttcgggggctcggggagcagccgccctgccgacgcccaggggaagaggaagctgggaggaacacctcccccatctcctccccgagggggcggggcggcgcgtgccagcagtcggcgcccggagggagccgcgccgacgtcgcagcccgagggagagcgcaagaagaaacggctccgcaagacgggggagacggaaccatgccggggaaacctgatttcccctccaaggtggtcattcaaccgaccccctcgcagcgatgtcccgtcgcattcctcccgccaccccaagtccggccagtccgaggccgaagatccagcggccgcagaggagcggaggcgagaatctgaccggcgtgaagccgcagaccgccttcgggaagctgaagaggccgcccgggaggccgcccggattcgccaagcggaggaagctgctcgggaggaggccgcccgggctgaggaagccgctaaggaggaggccgcccgggctcgccaggctgaggcaacagctgctgctggcgcgtcaactgggcccactccctcgggcaaccctcaggcgacagcctccggggaggctcgcgacgaggccgcgggcacatcgcctgggcccacctccccgggcgacgcccaggatcaaacgggtccgggggacatccccgagcccagcacgtcctccggggggccgagccgcatcgccttctctccaaggcggctcttctcctcatcttccgtcgccccgctgagcgccgagcccattctgcaggccttggccgccgcaaacaccgcggtgctagatgggttcagcgcccaagtggaggccctgcgcgcggaacgagcggagctcgaggccgcatgggcacgcgttgaggaggggcggcgctcggtggacgccatggtggaggtgggccgtaaagctcaccgccgtcacgtctcggagcttgaagcccggaaggcggcgctgacggagatcgctcgtgaggtggaggaggagcgagcggccgccctcatcgctaccaccacgatgattgaggcgcaagacgccctccgccttcaaaacgccagccgggaggcggagctgaaagaaaagctcgacgccgcccagggagtccttgactccgccgctgcccgagagcggcgggtaacagagactgaggcggcgtcccggcggcgcgaggagtcccttgaggcccgtgctatggcgctggaagaacacgccggcgccgtggagaaaggcttgacggaccgcgaggccgccgctgctctccgggaggcgacgctggcggcgcacgaggccgcctgcgccgaggaggagtgcgcgctccgcctccgcgaggacacactcgctgagcgggagcgagctctcgaggaggctgaggccacgaccaaacggctggcggacagcctgtccctccgcgaggcggcgcaggaggagcaggcgcgccgcaatcttgaatgcgtccgcgccgagagagccgcactggagcagcgggctgctgacctcgaggcgcgggaaaaggagctggacgcgagggcgcataccggtggggcggccgcgggcgaaagcgacttagccgcccgcctcgcagctgccgaacacaccgtcgccgatatgcagcgagcgctggactcctccaccggggaggccgaggcccttcgcttggcgggcgagattgggcccggcatgctttgggatgcggtctcccgcctgaagcgcgccggtcggcaagcgggcctctggaaaggccagacgacggtgccccccaccaatctggaaggcctcgctccgcacctcaacaggatggcctgggttctcgaacaactccccgaggagcttgagaagaccatcaagtcatcctcgagggacctcgcgcggggagcggtcgaactcgtgctggcgagttaccaggcccgggaccccaacttctctccatggatggcgctggaggagttccctcccgggaccgaggacgacgcgcgcgcgcgggtcggggatgctgccgaccacatcgtcaacggcttcgagggctcggcccctcggctcgcgttcgcccccgactccgacgaggaggggaacgccagcagtgcaagcgacggtggcaacgaggccggcgacctgggcgcgtcagaatga

SEQ ID NO: 82350 - DNA, 649 bp, Oryza sativa
  unsure (1)..(649): unsure at all n locations
  Clone ID: PAT_MRT4530_81789C.1
caaggatgtgctgacgctaaacaattctcttctcactgtcgcaaacatggatggtgagacaccactgctcactgccgtgacaaatggacacatgtctttggcctctattctacttgaatgctgctgcacactagggttcagtgaggcaatcttgcaacaagacagaaatggttgtaatgcactgcaccatgccattcattgtggtcacaaggaccttgcactggaattgatattaaaagagcctgccctatcaaaagctgtgaacaaatacagtgagtcaccaatgttcatcgcggtaatgagagattttacagatgtttctgagaaactgttgggaattcctggatctagccatgttggaacatatggccacaatgccttgcatgctactgtgagaaatggaaatgcagttatggctaaaaaaattttggagggtcgtccttggctggggaaagaacgaaccagagagaggaagaccccaatcctgatgacggtaatttgggacaagatagacgtgcttcgtgtgttgttggaacatgatgtgcttttagggtatgaatgctatgagatngtggtaatctgagccctcttcttgttgctgctgcatatcgaggtcatgttgatgttgctcaagagcttcttaaccact

SEQ ID NO: 82351 - DNA, 279 bp, Oryza sativa
  Clone ID: PAT_MRT4530_8178C.1
atgcagagcgatgcaggtgatggtgatgagctgaattatttggtcttggttttggtttggtctgggtctcgaactccggtgtgctccaactccgtccatgtggttgaagacgcggcggcgtgcggccatggcgcgatccatcggcgattcggccgcgacgccggcacgatccatcggggattcggccacgacgcgaggtgcggtggctacaggcaatccggcgacgacggcgtggtggttcataggccgatcgtcctcattgttggtaccaatccttga

SEQ ID NO: 82352 - DNA, 243 bp, Oryza sativa
  Clone ID: PAT_MRT4530_81790C.1
gacctgtggaagaggagcgacgtgcggtggcccacgggaaaggagcagcggccaatctcccggtctcttccttctccgccgcagcatggatccttcgctgagctgccggatttgcacagccgcgaggacggtagagcggccactgccgtcgtcctcccctttctccacgatgtcaaatccgagcagcgacatcgcctcaggatacgagccaacgtgtcggcgatggtgagctactgcaagtag

SEQ ID NO: 82353 - DNA, 546 bp, Oryza sativa
  Clone ID: PAT_MRT4530_81791C.1
cccacgcgttcggtcgctcgctctcttctctctctgcctcttccgccgacgggctgggagaaggaaggagaaagcaagccatcggcccccgactccgcctccgaagggacattggaggtaggtgcagatggctgaacaggctaatcaaccgactgtccttgagaagttcggcggccagttccaccttggctacagctttcctgaaggcgtacgggctcgcaacatctgaccatatgactgatgctatgacaggcgctttaccacaaggagctacctgacccatggccttgtcaatggtggcatgaacgccccaatgatgacgtcctctacaattttagctaatgctccagctgaaaaaggcgggaaaaacttcatgatggatttactgatgggcggagtgtcagacgcagctgcaaagactgctgctgctccgattgagcgtgtgaagctgcttatccagaaccaggatgaagagatcaaggctagaacgctctcaggagccatacaacggtattgggacactgctttcgggacgcgaactatcaa

SEQ ID NO: 82354 - DNA, 690 bp, Oryza sativa
  Clone ID: PAT_MRT4530_81792C.1
tcacgcaggcggccgacgggagaagaggtagcggcgcacggtgacctgtggaagaggagcgacgtgcggtggcccacgggaaaggagcagcggccaatctcccggtctcttccttctccgccgcagcatggatccttcgctgagctgccggatttgcacagccgcgaggacggtccgctccagcccacaccttgacacataagcagcacatggtgagcaggtagagcggccactgccgtcgtcctcccctttctccacgatgtcaaatccgagcagcgacatcgcctcaggatacgagccaacgtgtcggcgatggtgagctacgtcacggggaagaagcaaagggaaaggtcggcgccgaaggtgtgcacaaacaatagctccggagcagcacacgaaggtgcaggagggagtgtagaccgtctccatggcggcatcagtgaggtggtcatcgagggaaaccgctagcagcatggcggtggcgacgcaggatgagacaacgaggacaccgcagcagagtgtgcgacatgggcgtttgatgtcgacgaaggtgacgagcgtggctgcgacgccatggtggttgacaagccgccaccacaccctcccgctccaccctctccgcctcttaccaccggtgacaccagcatcatcgtcggttttctctccctccgcgccatctccaccgtccat

SEQ ID NO: 82355 - DNA, 446 bp, Oryza sativa
  Clone ID: PAT_MRT4530_81793C.1
agcagacaaagccaaagcatgcaaatatgcgattgcaatgctgcccttctccctctcctctcctctgcctaactagaactccataatccatatccatcatctctccactactactatagtacacccaaagcaaatgagcactagctaggactagtagtacattgatgatgatcgctgcctctcctctgccccctcccatgctccctctctcatcatggacggagcataaagcccgtagccaaaagtagagcgcacaaaaagagtttggccagatcatggcactgcgaaaagggcatcaactagctatggctagcttggcgatgccaatgccgacccaaggcatggagaaatggaggatgatggagtagggtacatgtcgagcatgcagatgcagtgtactgccagtagtaacactcgatcgctgctgctgactgctggtgctgttg

SEQ ID NO: 82356 - DNA, 459 bp, Oryza sativa
  Clone ID: PAT_MRT4530_81794C.1
atgtccggcagattgtaccaactctgcgttgacgcgaaccgtgtcaatgaacatacgaaggcctgggagatctgcttaactctagtgaaggttctaaaattaatgagatgtgggcgtgccagtcagtttgatcctgcacctgacaagatatcaagaagcggtgacagcaagcagcggcgatgggatggagcaagcggagcaatggcagtggagcaggcagcaatgtcagccatggagcgagcagtctggccgtggactgaaggaagcacatccagtggcggcggcgaggcagtggagagctcgtgctgcagtggcaggtctagcaacaacacgagcagatccattgacggcggcgggtccggcagcagctcggcatggtgtggccactactggagaactggtctttatccagatggcaaaaatcacattagtcctagttcgaatagtaaccgggactaa

SEQ ID NO: 82357 - DNA, 185 bp, Oryza sativa
  Clone ID: PAT_MRT4530_81795C.1
tgaactctatggtttcagtctttcagatcagtgcgcttcatgcagccacggggaagctgccttcttccaggtcaggattgtcgatcagagccaaaccaagcagcacagcgaggggaaaggaaggcatgacacttatcttcgtgtgctgcaaccccagctgcaatcacagatggagggagtgacat

SEQ ID NO: 82358 - DNA, 231 bp, Oryza sativa
  Clone ID: PAT_MRT4530_81796C.1
acaggattacatacgatacgtcaactgtcgtaaaagttaatctagcaggatatggggatcataagttaattattgcacgtaacaaatcagattgcctacgggtatgcaggtagctcatatgagccaaatctctctgctatatcagcggtttcgtattcacagagttgtagatcacacctgagagccaagccttttttgaygcyrgtgcagtttatcactgatgtcggtact

SEQ ID NO: 82359 - DNA, 394 bp, Oryza sativa
  Clone ID: PAT_MRT4530_81797C.1
tgaaactccggtacatgtaatcttggttctgactctagaacatacacctatatatatggccataaaggcccgaggctcgacggcacgacccgacaattgagccatgccttggcatggtgggccagcccggcacgacatggtcaaataaaaatagtagagggatcgaaaatagacttaatcagccatataaggcacaacccaaagagaagagggatacaaaattgtcagggttatggataccacatccctaatagtagttgactaagctcggaatcatacctcgtatatagaaagagttccggataaggaaggacaaatagagttctatatggaaacgacaagtactagccagattgtatccatattggtccccctagttttacttggacaaggg

SEQ ID NO: 82360 - DNA, 248 bp, Oryza sativa
  Clone ID: PAT_MRT4530_81798C.1
cgttgagtttgatgaagcctgcaaatggttcactgcgaactttgggggtctagcagctcatcgtccggcttgattcgaagaatcgagctgtcccaataatacccggggctgtctcaatcaaaaactgagaggtaactgcttgaatgaattgctactaacttcggtgccttgggtataccggcctcgtggtagcctgctgtgctacattgccctcattgcctcacggaatcttaactagaacttttatt

SEQ ID NO: 82361 - DNA, 432 bp, Oryza sativa
  Clone ID: PAT_MRT4530_81799C.1
atgcgtgatgcttggggatgtcgacagtgggctccggcgatcttcgacgcgctccggcagggtggcatcacgacggcgcagaggacatgcatgggcaccggcaccggcaaagaggagatgaggctgggcagcggcagcggcacagccgccgcagaagccgccgcctccaccgaccgcacccgcacctccttcgtcgacagcctccgcaagaactccacaactcctgcagcacgcaatccagatggccgcgacgaggtgctcggcccccaccaccccgccggccgcggcaacgccgccgtgttccgtgcttggtcgcggaacggcaccgcctccctcctttgcgccctcggccggagcagccgccacagcgctagccgtcgccggcaaccggacctcctcctctcccgcctcgccccaccggcctccccgtcg

SEQ ID NO: 82362 - DNA, 124 bp, Oryza sativa
  Clone ID: PAT_MRT4530_8179C.1
aggggcggtggcctgataccacagtagaaatggatcaggacgccgttgtgcggggccacgacgggatcggagaggacactagagagactgcacaacagggagatgacacgaccaaagtcacggg

SEQ ID NO: 82363 - DNA, 1398 bp, Oryza sativa
  Clone ID: PAT_MRT4530_817C.1
atggacgcgtccaagaaatccgtcatgacgaaggaggagcaacaactgtcgccagcagcaagcccagcggcagcagtcatgacagccgaggctgatgccatcaacgaggaacaagacaaggctgctgctgctacaaccgcagatcacactgctcctcctcctcctcctcctgctgctgctgctgttgcagatcacgctggggagatggacatggctagtggcagcggcgttgctcacctggcaccaccggcggtggcgccggcgccgcggtcttctctcgctatggcggtctcggggctggcggaccatgtcctggagcgcatggtgaaggtgctgatgaggaagtgccacccgccgcaggcgttgtacccgctgattggcaagtcgccactgcggccgccatggtggccgacggggcgcgagcagtggtggccggagctcggcgccggcgccgtcgtcccgccgtacaggcctgcgccgctgctgtccaaggcggagaaggaggtggccgtggtcgccatggtgaagaacctcgtgccggacttcgagcgcctcttcatggccgtgcgaatggcgcccagcgtcaccagcaggatcaccgacgccgaggcgagggcgtgggacgacggcgtcgccggggagcgcgagacgtacatggcgcggcacccgcaccgcacgacgccgaccagggcgtggaagctcatggattccctcaagccggaggcggtgaggatgaagctcaaggcgcccaagccgaagccgcaggtcaccatcaaagtcgaggacgccgcgcctttcctcactgtctccgctgccgctgaccccgccgccgtcgaggccgccatgggggccatcgaagccatgagaaacagcagcaaggatccagatgctccgtactatcccatgccatctccacttcatgggcataatgaagttggtccaaatgattacccagaaaacccagcaatctggaaggagttcaacaggaaagaaggtcagcttgacttgttgcgagttggcaaaaagaatgaccggatggcgatatccgatagggtggatggaggagccagtggtagcggccccaggaagggctatcttgtgatgaaaacgtacaaaaaggctcaagaatattatcgcgaactacggaacaaaggcgccatggctagtggtgcaggtgttaaaattgaagatgacagtgaaaccgagagtgacaatgaagatgagaaggcaaatgagaaggctaaggctaaggccaaggctagagctgtgtatcaacaaaataaaggtgttaaaactgaagatcagagtgaaacagaaagtgataatgaagatgaacaggcaaaggttatggcaaaagctaaggctagagttatacctcgaccaaacaaaggtatctaa

SEQ ID NO: 82364 - DNA, 522 bp, Oryza sativa
  unsure (1)..(522): unsure at all n locations
  Clone ID: PAT_MRT4530_81800C.1
gcaatgtttcagaaatctggaaaaactagaacttggatgctgtgatgtgctcctgttctggccactgagagaattccacagcctagagtcgttgaaggaattaatagttaagtcatgtaataatctaaaagttaagccagtcgacggagagccgcacaaggacagctcctaccacatcttacctcgctacaaatagaagattgccaagacttaacagagctttttaatctccccctatccctcaagtctattgacatcgacggctgccctaagttgaagtctgtatgggatgaacaggaggatactgaattggggacaaacacgcaagacccatcaccatcagcaagggtgcatagtctaccatgcctagaaacgttttatataaacgattttgataacttaccaaggtttcgcgatctcccgtcatcgctccagtcattggcactgtttaactgtcctaaggttcagtttctatcanggaagctggatgcactgacatgtctagctatttctggatgcgag

SEQ ID NO: 82365 - DNA, 102 bp, Oryza sativa
  Clone ID: PAT_MRT4530_81801C.1
atggtcaccggcaagctcctctccgtggtcgcggtgccggtgaggttgagctcctccctatggtcgccgaatgccaagtacaccaagaccaagaaaagctaa

SEQ ID NO: 82366 - DNA, 1194 bp, Oryza sativa
  Clone ID: PAT_MRT4530_81802C.1
atggcatcgtcttcttcacaccgctggagaaagggtttttatccccgcaaagatggtttctccaacaacggcaacacaaccaaccacatcttcggcgttgagctcgacaccatcgtcagctccaagttcttggatcctaacgacaaccatgtcagcatcgacatcaacagcctcaagtccatcgccgtgcacaccaccggctactacgacgacaagaccggtgccttccacgacctgtccctgatcagcggcaaggccatgcagggagtctggacaggccgacggccgaccgacggggaggccggtggggcgaggcgggagaggaggaggtccggttgccggcgacggctagcgctgtggcggctgctccggccgagggcgcaaaggagggaggcggtgccgttccgcgaccaagcacggaacacggcggcgttgccgcggccgctggacgtcgacgccggcgtggaagcggtccccgagctcttgcgagctcaccggcgtggaccccggcggcggcgaggtgagcgaggatacgcggggtggtgggggccgagcacctcgtcgcggccatctggattgcgtgctgcaggagttgtggagttcttgcggaggctgtcgacgaaggaggtgcgggtgcgctcctcgctcgcggcgctcggcggcacgggcatccgcgtcgtcggcggcgcgcccaactacgacctccccgccctggcgcacggcgggacagccgccacggccgcctggatccaggcctacccgatgatgttattccggttcgtcatcgtgggcaatgaggtcgccggcgccgacacgcagctcctcgtcccggccatggagaacgtccacgccgcgctcgcggtggctggtctgggacacatcaaggtgacgacgtcgatctcccaggccaccatcggaatccacatcccgccatccgccagcgagttcaccgacgaggcgaagtcgtcgttcctgagctacgtgatcccattcctggaatggacgcacgcgccgctgctggccaacctgtacccgtacttcatctactcctacaacccgggcggcatggacatcagcttcgcgctgttcacggcgagcgagcgggcggcagccggcggaggcggcatttacaggttcctttctggcttggactgtgaattaaccaacttgactcttctcaggcatgctctgtag

SEQ ID NO: 82367 - DNA, 502 bp, Oryza sativa
  unsure (1)..(502): unsure at all n locations
  Clone ID: PAT_MRT4530_81803C.1
gcatggaccaattgttcggcatctttatcatttttctgtggattgaagtaattcctctgttacaagatacaatggtaataaaacgcctgttacatcaacaacaacaatggaagaatggaacgtaattgtattagaaactacaagtgggcattgtgaacggtaaactgcgagaagaagccttacgaggttttcctccatcttcccatctctcttgaatcaatgattgtgcattccattcctcaaaatcagaagcatcagctggatccaccatcgaattgctcgcttcaaatcagtttcagtagcattgccactagaacactttcagctcttatgatccatatgcgactcaaaccagtcgaagatttccccattcttgaggctggtaaactcatggtacgcatatgcaagattcagctcctccgtgacatgcctctccagccggaattcctccggcaagatcttggccttctccgcncgctttttcacggcgtgctcctcccgt

SEQ ID NO: 82368 - DNA, 2324 bp, Oryza sativa
  Clone ID: PAT_MRT4530_81804C.1
attcaacaaatcagcagactcacataaaaaaattaacataaacaaatccttcacaggaagcaaatcgatttcacagcagtcagcatgcatcaacaaatcctttacaggaagcaaatcgatctggagagaggcggtcgccgtcctgtcgctgcggtcgctgtcgagccggagagccggagaaaggcgaagggaggtgggaggttggaggcacagagaggagagagccgcgcgccgtcaccgctgccagcacgcgtcgtcaccaccgagacccaccacgcgccatccgctgccgccgagcgtcgtcaccgctgagcgccgtccccttgccactgccgagcccctaccccgtgccgccgccgccgagccccctccccggtctccgccaccacagatctggggggagatggcggatttgggagaggagagggcggatctggactcgtacctatctagcctccgcccatcccgcaccagcaccggcatcctcctcccatcccgcgccgcagcctctgttgtcgccgccgccgcctcccctcccccatccggatttgagagaaggagggtagccgcgcagagaggagagagttggaccagggtgacacaactgaacaagttggaggacctaaacgagtcatctacaagtttagggaccgggatgatacaggcgaacaagcttgaggacctgaacggtcgatttgcaagtttagggaccgggatgacacagcgagcggccgtgcaacggcgctgtctggcgaaggatggccgcgtcagcgcagtcgtgcgaatcctgggcggcggtttcggcgtgggctgcccggcagcagccatgtgccgtggcagcgcggcgcggcggccggcgacgcgggggcagcggcaaggacggatgagaatccgaggatacggaggcagcggtgaggagggatggggatccagggacgtaggggcggagagtgaggagaaagccatgcccaccttccccttccccacggcgcagatgaatgccgaagaagagatggaatctgagacaggaacggcagcggttggagtatgctggggcatgagcggcgacaacctgccgccggcgagcaaggtcaccgagatgctccgcgagaacggcttcaccgtcgtgcgcctctacgcgccggacagcgccgcgctcgcggcgctcggcggcacgggcatccgcgtcgtcgtcggcgcgcccaactacgacctccccgccctggcgcacggcgggaccgccgccgcggccgcctggatccgcgagaacatccaggcctacccgacggtcctgttccggttcgtcgtcgtgggcaacgaggtcgccggcgccgacacgcagctcctcgtcccggccatggagaacgtccacgccgcgctcgcggcggccgggctgggacacatcaaggtgacgacgtcgatctcccaggccaccatcggcgtccacatcccgccgtccgccggcgagttcaccgacgaggcgaagccgttcatgagctacgtgatcccattcctggaacggacgcacgcgccgctgctggccaacctgtacccatacttcatctactcatacaacccggggggcatggacatcagcttcgcgctgttcacggcgagcggcgcggtggtgcaggacggggagtacgggtaccagaaccagttcgacgcgacggtggacgcgctgtacacggcggtggcgaagctcgggggagagaacgtgagggtggtggtgtctgagaccgggtggccgacggcgggcggcgtgggcgcgtcggtggagaacgccatgacattcaaccagaacctggtgaggcacgtccggaatggcacgccgcggcatcccgggaagaagacggagacgtacgtgttcgccatgttcaacgagaacctcaaggaggccggcgtggagcagaattggggcctcttctaccccagcaccgatagggtctaccccattagcttccatgcccgtatttgacacggacacggatcctctgcagtgctgttggtacagtagcaattacgagcggcagccagtagtttgatcctatataatagtggctcatcctatatcagcggtaatgcagagaattcccgtcgggtctgaacataccatcggttggtcgaaacatatgtatgcggccgtgctacgtgctgactacttctgtatgcgtatctgtacagtaattggttgtgaacgcgaggagaggtcaacatgtatagcacgagcctggagatagaggggtgtatacgtttgttattgtgtcagtattgtgtatttttcatcgtgtgcctgcgatttgtactattcctaatttatactt

SEQ ID NO: 82369 - DNA, 628 bp, Oryza sativa
  Clone ID: PAT_MRT4530_81805C.1
cccacgcgtccgcccacgcgtccgcccacgcgttcgcgacactgacagtctcctcttccaccactggcctagggcaagagatcgacgagaggagcggagggaggaggaggagatgggcggagtggagcaggagcagctgctcagcctgggcgtcctcatcgacatcgtcgacgagcagtggatgcgcgacaccctcccagccgacgatgtccccgtgccgcccgccatggccgtgaagacggaggaggcggaggatccagcacccgccaatcaggaaagccaaccagcacaaggggatgtgtggcgtgatttcacattggagaatctctgatcacttgtgacctacaagtgcttccagagatgaatataccatgctgggaatctaggagctacgtggtcattgcaatttctgagcttcatataactataaggtcatctgaacttagcgtactatctggttttgtttcagctgtagttcgtcgaacccatgctttaaaccgatgtaaatgctccagatattggtagcacattgctgcatgatgacaccgaaccttgtgatgagaaattatatgttgtgaactatgatggtgatgagaacagtcattcagatctggaacatatcaaatcc

SEQ ID NO: 82370 - DNA, 264 bp, Oryza sativa
  unsure (1)..(264): unsure at all n locations
  Clone ID: PAT_MRT4530_81806C.1
ccggcgagacacgcccgcacgtctcttgaccttttgaccgattttncttgcctttttttttaatttctgtttttttacagtgtattatttagagcagaaattggattttncctgttctaatatgggttgtaattagtttctgtaaataatagttttgtaggattttaggtgtgagacagagagatgatggcaacaattcaaaaaaagaaatgatttgcttgctaacacctgattggttagcttgagggcaaaaaaaaaaaaaaa

SEQ ID NO: 82371 - DNA, 606 bp, Oryza sativa
  unsure (1)..(606): unsure at all n locations
  Clone ID: PAT_MRT4530_81807C.1
ttggacgcccnccaagggtgttttgaagctcgcttttcatgcacgncgtttttgccncggtctccgtnaggttccaaggccntcgaccgtcgccaggcccacatgtgttcntgaacgaggcntgcgaggaggaggcttacaanaagctcgtcattgccctgtgctccgagcacaagatccccctgatcaaggtgcccgacggaaagcagctcggcgagtgggctggtctctgcgttcttgaccgtgagggcaacgcccgcaaggtcgtcaactgctcctgcgtcgttgttaaggactggggcgaggagtcccaggagcgcagcgtcatcctcaactacttccagaccgagcaataagctacgaatcatgaaaatgggaaatttgtctttttgatatcctgcatggggcgttcacgataccgggagtcacggagggcatgggtgtttttcgagacggatgccggttcggatgtactctagcttttccaggctggcattgggactcggtcggaagggttttagaaaggcgaaacaccgttcattcgggcctgggaataaaaaaagcaataacaaaagttgatgacttggaaaaaaaaaaaaaaaaaaa

SEQ ID NO: 82372 - DNA, 135 bp, Oryza sativa
  Clone ID: PAT_MRT4530_81808C.1
atgacggatgatgagttcttcagttgttcaggtggggtcgcggaggacgagcgaccggacgcgacggcgtccggcgacgacccggccactccgggatctactcatctcactgccatgccgcctctgttcaattga

SEQ ID NO: 82373 - DNA, 1395 bp, Oryza sativa
  Clone ID: PAT_MRT4530_81809C.1
atggccgatccggttaagctcatcggcgcttttggcagcccattcgtgcaccgcgtcgaggcggccctgcagctcaagggagttgcctacgagctcatccacgaggacttggagaacaagagcaacctgctgctcgctagcaaccctgtccacaagaaggtccccgtcctcctcgatggcggccgagctatctgcgaatcacttgtcatcgtcgagtacgtcgacgacgcattcgacggcccgcccatcctacctgccgacccctatgaccgcgccacggctcgtttctgggctcaattcatcgatcacaaggcaaatctcttcatgttgttgcatcattgcgttcattgcacgttgccgttgttgctggccctgtggctggacggtgaggagcagaaggggtttctgaaggagacgaaggagaacctgtcgctactggaggcacagctcgaggggaagaggttctttgccggcgacgccgtgggctacctcgacgtcgccgccggcggaatggctcactggatcggtgtgctcgaggaggtcaccggagtgagcgtgatcggcagtgaggacgacgacgagtatccttcgctgcagcggtggatcaaggagtacgccaacatcgacgccgtgaagctgagtctgccggatagagaagaactcgttgccttctacacgagaaacaaggataagtataagatgatgttcagggcgatggtgcatcacgccttcgggagcccattcgggcaccgcgccgaggcggcgctccggctgaaaggcgtgcagtacgagctcctcctggaagacctccgcagcaagagcgacctgctgctcgcccacaaccccgtccacaagctcgtccccgtcctcctccactccgacggccgctccgtcgccgagtccctcgtcgtcgtccagtacgtcgacgacgccttccatggcccgcccctcctccccgccgacccatacgctcgtgcccaggcccgtttctgggcccaattcatcgatgataagttctcgaggccgttctggctgtcgttctggatggaggacggggagaagaaggaggcgttcgtgagggaagcgaaggagaatctgcggccgctggaggcgcagctcgacggcggcaacaagaggttcttcggcggcgacgccattggcctcgtggacatcgccgccagtgggctggctcactgggtcggggtgttcgaggaggtcaccggcgtgagcttggtgagcgagcgggagttccccgcgctgtgccggtggtcgcagcgctacgtcaacgatggagccgtgaggcagtgcttgccgagcagagatgaactcgtcgccttgttcactgcaaacaaagaggcgtatacactgctggccaaggcaaagttgcagaaataa

SEQ ID NO: 82374 - DNA, 239 bp, Oryza sativa
  Clone ID: PAT_MRT4530_8180C.1
gggatgggttaattattgaagcagtcgaccacttcttatttacaccagtagcgaaacgtaatacccgtataccccgacctcctaataaacgacccccggggtggaacaataccccccggtcggactacagtacccgtcctaggagcagaaaaccaacagcgcttgagctcaagccacatccctggccatgtaaacatccccaaaaacgatctgattaaaccaccgcttttctaacaccc

SEQ ID NO: 82375 - DNA, 661 bp, Oryza sativa
  Clone ID: PAT_MRT4530_81810C.1
gctaaacatatctatcaattgatggttcctgcgcccgaagtaaagttcgctttttatttcattcgtcactttgactgtgaatgccatgttctctcttgatcagtttattttcaggagtactagactactggttgatatatgtaaatatccatatctagtagagaggagatctagctagctaatgcaacatcttcatgtcttttaattcttttaacacagttaatctctcagaatcattatcattaccctctgctaacaaaatttgatattttgcgtttcaaagacatctcggctggtgggttgtaagtgtaactaatgcataacatgtttccttgcaaaagttgagttcttctactggcaaaatatgacatccagatttcacatcgatcaatccaactaattaaagctaatttagatatactgtattccaggtagctatatttctatataccactacatggagaccaaatttagatgtaaagttatgaatgtataaaatagatgggcgctatttctgcaagtgttgcaattttatttggaattttctatggctaattttcatcatgtataaatgtttggaggttcactatatatccagacttatgatatatatatgcgcccttgtttgtttaaacaactaaattggtttcttattttctcg

SEQ ID NO: 82376 - DNA, 2922 bp, Oryza sativa
  Clone ID: PAT_MRT4530_81811C.1
atggcacggggttccgctctgctcgatggtagcgtgctgccgccttcccgtatcgtgagcgagaggcaggctgggctgccgcgccgcttcatgccggaatctgccaccggccgggagatagtcacgctgggcgagggacgcccggcgccagactacccggagcggtctgtcttctttctcccctttgcaatggcagggctggttccaccattttcttctttcttcatggatgttctggagttctacgatctccagatggcgcacctcacccccaacgcggtgatgacattggccatcttcgcgcatctgtgcgagatgttcattggggtgcgcccatctcttcggctgttccggtggttcttcaccgtgcagtcggtgtcgccgccatcggtagtcggtggctgctacttccagccacgggggccgtgggacgactggaagagcgactggttctacactcccctcgccgacgaagcgcgcctccgacttccgagccagcccccggcgcaggccttcagctggcgggcgccggtagatctgggagacggctacgacgccgttcttgaccgcctggcaggcctgcgatcccaggggctcacaggggccatggtgtacggcgactaccttcatcgtcagattgcgccgctccagcggcgcgcccggggcgcctgggagtacaccgggtccgaggactacatgaggacccaccaggggcacaaatgggactgggtccctgaggaccttaggatggtggtccaacgggtgctgaatctcagctccgtggaggcatcccttatcccccaaggtgtcctccccctctgcagcgatccagatcgcgccaacatcctgaccatcatgcaggaggtcggggcgtcgggggagcgggccccccgaggccacgatggcgcgggcgggagccgcaggggggaacaatctaccccaggagggggtcgtgcttctgggccccgcgacgggggtccggggggcatccgccctgccgacgcccgggggaagaggaagctggaagatacaccttccccatctcctccccgagggggcggggcgcttttcttctgcctcagcgagatcccgtcgcgcccctcccgccattccaagttcggccggtctgaggtcgaggagtcgacgaccgcggaagcccggaggcgggaagctgaccggcgagaagccgcggaccgcctccgggaatccgaggagactgcccaggaggccgtccgggctcgccaggctgaggaggccgctcgggaggaggccagactccgccgggccgaggagtccgtccgggaggcggagacggcgcacgcacgccaggcggcccgccaagcccccgacccgactccgtccgaggtgacaacaacttccgaggccacccacgacgaggccgcgggcgcaccgctcgggcccgacccctcgggcggcgctcgggacgtgccagtttcgggggatgcccccaagtccggcacgtcgatcggcgggccaagccgcgcggcgcccgcaccgaggcggctttcccctgtgccttccgctgccccactgagcgcggagcccctcctgcaggccttggccaccgcaatcagcacggtgctggacgggctaagtgcccaaatggaggtcctgcaggcggagcgggtggagctcgatgcggcgtgggcgcgcgtcgaggaggggcggcgctcagtggaggccatggtggaggcgggccgcaaggctcaccgccggcactcctcaaagctcgaggcccgtcggagggagctggcggagatcgccagggaggtggaggaggagcgggaggctgccctcatcgccaccgccgtgctcgacgaggtgcgggacgacctctgcctccaatacaggagccgggcggcggagctagagaagaagctcgacgccgcccagggagtccttgacgccgccgctgcccgggaacggcgggcggcggagcgcaaggcggcgtcccagcggcgcgaagaggcccttgaggctcgcgccacggtgctggaagagcgcgcccgcgcgaaggagagggacttggcggaccgcgaggcaaccctggcggcgcacgaggccgcctgcgccgaagaggagtccgcaatccgcctccgcgaggacgcgctcaccgagcgggagcgagctctcgaggaggccgaggccgcggcgcagcggctggcggacagcctgtccctccgcgaggcagcgcgggaggagcaagcgcgccgtaatctggaaggcgcccgcgctgagagggccgcactggatcagcgggccgctgagctcgaggcgcgggcgaagaagttggacgcgcgggcgcgcagcggcggggcggccgcgggcgacggcgacctagccgcccgcctcgcagctgccgagcacaccattgacgagctgcagggcgcgctggactcgtccaccggagagatcgaggccctccgcttggcaggcgagatagggcccggcatgcttcgggacgccgtcttgcgtctagaccgcgccgggcggcaggcaggcctctggggcgggcggaccgcgaagtatgctgccaaccaggggggcctcgcccagcgcctctctgagatggccgggaccctccagcggctccccgaggagctcgaggagacgatcaagtcatcctcgagggacctcgcccggggggcggtggagctcgtactggcaagctacatggccagggacccggacttctccccgtgggcagcgctggacgagttccctcctgggaccgaggatgacgcgcgcgcacgggtccgggacgccgccgaccacatcgtccacagcttcgagggtacggccccccggcttgcgttcgccctcgactccgacgaggagggcggtgacggcggtgcggacgacagcggcgacgagaccgtcgacccgggcgcgtcggaatga

SEQ ID NO: 82377 - DNA, 2494 bp, Oryza sativa
  Clone ID: PAT_MRT4530_81812C.1
atggcacggggctccgcaccgctcgatggtagcgtgctgccgccttcccgcatcgtgagcgagaggcaggccgggctgccgcgccgattcatgccggaatctgccaccggccgggaggtggtcgcgctgggcgagggacgcctggcgccagactacccggggcggtccgtcttcttcctctctttcgcaatggccgggctggtcccgccattctctaatttcttcatggatgttctggagttttatgatctccagatggcgcatctcacccccaacgcaataatgacgttggccatcttcgcgcacctgtgcgagatgtttatcggggtgcgcccatctctccggctgttccggtggttcttcaccgtacagccggtgtcgccgccgacggtagtcggtggctgctacttccagccgcgggggcaggtgctgcaccgctacattccctgcgtcctccgcaagaagtgggacgactggaagagcgattggttctacacaccccctcgccgacgaagtgcgcctccgacttccgagccagcccccggcgcaggcctccagctggcgggagacggtagatctgggagacggctacgacgccgttcttgaccgcctggcgggtctgcgatcccaggggcttacgggagccatggtgttcggcgactaccttcgtcgccggatcgcgccgctccagcggcgcgcccggggcgcctgggagtacaccgggcccgaggactacatgaggacccaccaggggcgcaaatgggactgggtccctgaggacttcaggatggtggtccaacgggtgctgaatctcagctccgtggaggcatcccttatcccccaaggtgtcctccccctctgcagcgatccagatcgcgccaacatcctgatcatcatgcaggcggtcggggcgtcgggggagcgggccccccgaggccacgatggcgcgggcgggagccgcaggaggaaacaatctaccccgggagggggtcatgcttctgggccccgcgacgggggcccggggggcagccgccctgccgacgcccgggggaagaggaagcaggagggcacgcccccccatctcctccccgagggggcggggcggtgcgtgccagcagcaggcgcccggagggctgaggaggccgctcgggaggaggccagactccgccgggccggggagtccgtccgggaggaggaggcggcgcgcgcacgccaggcggcctgccaagcccccgacccgactccgcccgaggcgacgacgacttccgaggccacccacgacgaggccgcggacgcgccgctctggcccgacccctcgggcgatgcttgggacgagccagcttcgggggacgcccccgggtccggcacgtcgatcggcgggccgagctgcgcggcacccacaccgaggcggctctcccctctgccttccgctgctccactgagcgcggagcccctcctgcaggccttagccgccgcgaacaccacggtgctggacgggttaagtgcccagatggaggtcctgcaggcagagcgggcggagctcgacgcggcgtgggcgcgcgtcgaggaggggcggtgctcggtggaggccatggtggaggcgggccgcaaggcacaccgccggcacgcctccgagctcgaggcccgtcgtagggacctggcggagatcgctagggaggtggaggaggagcgggagactgccctcatcgccaccgccgtgctcgacgaggtgcgggacgacctccgcctccaatacaggagccgggcggcggagctagagaagaagctctacgccgcccggggagtccttgacgccgccgctgcccgagaacggcgggcggcggagatcgaggcggcgtctcggcagcgcgaagaggcccttgaggctcgcgccacggcgctggaggagcgcgcccgcgccctggacacgaaggagaaggacctggcgggccgcgaggccgccgtcgccacccgggaggcaacactggcggcgcacgaggccgcctgcgccgaagaggagtccgcactccgcctccgcgaggacgtgctcaccgagcgggggcgagctctcgaggaggccgaggccgcggcgcagcggctggcggacagcctgttcctccgcgaggcagcgcgggaggagcaggcgcgccacaatctggaaggcgcccacgccgagagggccgcactggatcagcgggccgctgagctcgaggcgcgggcgaaggaactggacgcgagagcgcacagcggcggggcggccgcgggcgacggcgacctagccgcccgcctcgcagccgccgaacacaccatcgccgagctgcagggcgcgctggactcgtccgccggggaggttgaggccctccgcttggcgaacgaggtagggcccggcatgcttcgggacgccgtctcccgtctagactgcgccgggcggcaggcgggcctctggggcgggcggtacgcgaagtacgccgccaaccaggggggcctcgcctag

SEQ ID NO: 82378 - DNA, 6125 bp, Oryza sativa
  Clone ID: PAT_MRT4530_81813C.1
atgggttccgtctccggcatcgacgacttcgccttccctcctgggcaggcgtttcggttcggcagcctcaacttcatcaccaacgacttcggcaagatctctctccttgactcggattcaaaccagtcggggagagactaggtccccgtgccattcggtattccgaactcggccgaggcctactctaagatcatctcttccgagtcggcttcaaaccactcggaagagatccaatctactcctccgcgaccagatcaagaggacgggttctatccctcaatcctgatgagacttcctgatgatttggccgctgtcttcacagccaagacatctcccactcgaagatctagacaagctccggcttcggccccgatccaatctagatccagagaggttggcgttatactccaacctcttgggacagtctcgacggaagagttggatggctaccttagctcccctggcgtcagttcttgaccaaccgagatcctcgactgcgacgacttcggctaccaccacgaccacgacgacttcgacgacagctatgaggataactacacgcctctctttttcggcgtattcatggctaacaacgaaacggagggacagcgccgagcccgagaagtggaggaagaacgcacacgacaagaaaccgaacgtcgccgactggaggaagaacgacaacgagaggagcgagaacgactacagcgtgagcaacaagatcgcgagcgagttgcaaaggaggctgaagatcgacggcagcgcgccttggaatctgggcgacgagcaagagatctcatcgggcaacaagatgtcgatggaacaacggttttccgcaccccccagcagaacgcggttgcaacaatcactctcctcgacaccctcctcaaggaagacgcactcaatcaagctgatcatgttgtcaacatcttgaaccagacgaagaccatgatcgctgcctcggttccagccaactccgcaagtgcccgtaccccgactggtagccgagtccctcatctccgatctcatgattatcatcagccaagcctcagcatcatcggcacaggatctagtcgcaggagcaggggccacgacgaacgatccgttcactcgcctcccgaacgtcacagggagcgtcgagtcgaacgacctcgctctccacctcaccagcgtcccgtcgatcttcgcaacacgatcaaccagcgccgtgcagcacgaggtcaccgccattcaccaaatcgctacgacgacgacatggatgaagtagctgccttcactaatgacctacgtcgagtagattggccagccggctttaagctgactagaatcgagaagtatgatggcaccactaatccggagtcttggctcaccgtctacggactcgcaattcgcgcagcaggaggagacagcaaggccatggcaaactatctacctgtggccctagcggattccgcccgatcctggtttcacggactaccccgtggtacgatcggatcatgggcaaaacttcgtgatcactttatcgccaacttccagggcacctttgaacgccccggcacacagtttgatctctacaacgtcgttcagaagtctggagaatccctttgagattacatccgacgcttctccgagcaacgcaacaagatctccgatatcaccgacgacgtcatcattgccgcctttaccaaaggcattcgccacgacgacctagtcggcaagttcggacgcaaacctcccaagacggtcaagcagatgtttgaaaaagccaatgagtatgccaaagccgaagatgctattatggcgtccaagcagtcgggcaccacttggaagccaaagaaggacatgccgaccgcaggagggagtggaagtaacaaccgcaaggatcgcaagcgtaagcccgaagaacttgtggcaacaacctctccatcttcctgacaacgtccccgcgtcaacacattcgacaagataatgaacttccaatgtccgcatcatcccaactccaaccacgtggccaaagactgcttcgtctacaaacaatttgcggagcaatacgtcaagaatgcacgtaagccctcagacggagagcaaggcacatcaaagaagaaagatgatgaagacgatgccctgactagttttcaagaccatcgcaaagaactcaatcacatcttcggcggatctctggcttatgaatctaagagaaagcagaagctaacagaacgggagatcaatgcggttcagcccaacacgccccaataccttcggtggtcagagatagcaatcaagttcgaccactcggatcatcccgaccgagtggtccacccggggcggtaccccctggtactagacccagtggttcgcaacgtcaagctccgaagaactctcatcgatggtggcagtgcacttaacattcttttcgctaagaccctggacgatatgcagattcctcgcacggaattaaagccgagtaatgcacccttccacggtgttatcccaggattatcagctacaccactcggccagatcactcttccggttaccttcggcactcgggagaatttttgcacagaaaatatttgtttcgaagtcgctgatttcgagacagcgtaccatgctatactcggacgaccagctctagccaaattcatggccgtcccacactacacctacctgatgatgaagatgcctggtcctcgaggagtcatatcactacggagcgacatcaagcaagccgtcacatgtgacaaagaaagttgcgagatggcccaaatccgcgagatcaccctcgctcgcgaagaaatccgactggatgcgaccacggcaagcgagggagaagtgcctgcaaccaagctgacgaagaccgaagaaagcgatgctaagacgaaaaagattcccttagatccctctgatcctgataagactgctaataataaagatatctttgcatggaaaccattcgatatgcctggtattcctagagaggtgattgagcactctttacatgttaaggaagacgctaaacccatcaagcaacgactccgccgttttgcacaggacaggaaggatgcgatcaaggaggaattaaccaagctgttagcagtgggcttcattaaagaagtccttcatcccgactggctggctaacccagtcctggttcggaaaaagacggggcaatggcgcatgtgtgtcgattataccgacctcaacaagtcttgtcccaaagatccttttgggttacctcgcattgaccaggtagttgactcaacggccggctgcgagctactcagctttttggattgctactcgggatatcatcagatccgactaaaagaatccgattgcttgaagacctcgtttattacgccctttggggcctactgctacatcaccatgccctttggattgaagaacgcaggagcaacttatcaacgcatgattcagagatgtttttcaactcagatcggccgcaatgttgaagcttatgttgatgatgtagtcgtcaagaccaagcagaaggatgacctgatcgcagatttaggagaaacttttgcaagcattcatgctttcaggatgaaactaaaccctgaaaagtgcatcttcagagtaccgtcagggaagttgctcggatgtatggtatctcaaagaggcatacaggccaacccggagaaaatcaacgccattctcaacatgaaaccgccaagctcccaaaaagacgtccaaaagctgactggttgcatggcggcgctcagccggttcgtctcacgactcggtgagcgggggatgccctttttcaagctgctgaagaagactgacaattttcagtggggacccgaagcacaaaaaacctttgaagacttcaagaaacttctcaccactccactagttttggcctcgccacatccacaagagccgctactgttatatgtgtcggcgacctcccaggttgtgagcacggtcctggttgtcgagcgtgaagaggaaggccatattcaaaaagtccaacgaccaatttatttcgttagcgaggttttggccaactccaagacaagatatcctcaggttcaaaagttattatatggtgtcttaattaccgtcaggaaattatctcactactttcaaagtcactcggtcacggtggtcacatcgcttccactcggggatatacttcataaccacgaagcgaacggatgaattgcgaagtgggccttagagttgatgtctttggatatatcgttcaagccacgaacttcgatcaagtcacaagctttagctgatttccttgccgagtggaccgagtgccaacaagacatgccagaggaaaagatggaatattggactatgcattttgatgggtcaaagaggcttacaggcactggagctggggttgttttaatctccccgactggagaaagactaagctacgtattgtggatacatttttctgcatcccataacgtggcggaatatgaggcgctgctccatggattaaggattgccatttctctaggcattcgccgattaatcgtccgtggagactctcagttggttgttaatcaagtcatgaaagagtggtcttgtctagatgataatatgaccgcttatcgacaagaggtacgcaagttggaagataaattcgatggactcgagctcacccatgtcctccggcataataatgaggcagcagacagattggccaattgtgcatcgaccaggccgatggggccctctgacagggctacaacggctagttttctagccgttgcagagttgcacggtctgaccggccgcatacctccggtcagactggcagagcacagagttgggggatttcgcccccaacggctagttttggtgggtgggagtataaatactcccccaccagcagcaagggggctctcttggcacccaattcaattgcatacactccttgcacctctctcacactcacttaagctttgtgttcatccatctagcgtgttagagggttgtttagccaagagtcaagtgcatttgcttccattgtagagctagtgtggcacttgatcatctccacaccgggtcattgcttgttactcttgcaggttgccgcctcctagacggcttgtggaggagttgcccggtgacctctccgagaagattgtggaggaggcccggcaccggtttgtgaatggtttggagttcaccaccttcggagtgaaggaagaactaccccgagtgatagaggcttgggtagtcctctccgtgggccggctcccgccttgcccaccccttgacgaagggggcgtgcggtggcttcatggttgagcggtggagttgggctcgcctcaacggggagtaggaaaccggcgagtttccgaacctcggtgaaaaatctcttgtctcattgtctcatttgattgtcgcatttacatttgtgcaatttacatttctagagacacacttgagatcatatcaccctaggattgcaaaacatcgacataggagcgtgatttactcttctagagatatatttgagccactatcaccctaggtttgcaaaacataacttagttgcttagttagagttcaccctcaccaagcctagcaacttaggttagatttgattaggtgttatttagttttaaatcgcctattcacccccctctagtcgacatctcgatcctacaactactcccagtcgggctaccggccagtcgccgttctttttggtttatggtgcagaagcaatgttgccgagtgaagtggaatttgaatcactacgatttcggaacttcaacgaggagcgctatgaagagggccgagtagacgacatcaatcaactagaagaagcccgtgaagcagttttaattcagtcgactcggtatttgcaagggttgcgccgttatcataatcggaatgttcgatcgcgagcctttttagtcgacgacatggttctgaggaaaattcaaaccacacaggatcggcataaattatctcccttgtgggaaggactgttcataattgctgaagtcactcggccaggttcttatcgactcaagcgcgaagatggtactcttatcaataattcttggaatattaaacaccttcgttgattttatgcttaggcatttcgtttgtatctttcctct

SEQ ID NO: 82379 - DNA, 225 bp, Oryza sativa
  Clone ID: PAT_MRT4530_81814C.1
atgactgtcaagacgacggaacactacgtcctccaagttcgcctagtatacattgacgggccgggagccggatatatcgaatccgacacggctgggaaccgcatcgactccgacacggatgcggtgcggctggaaaaggaatttcgtgtagatgggcagcaaatcaccacgccgctgtatgagagcaagaaaatgagtggagagagggagggagcaggtggctaa

SEQ ID NO: 82380 - DNA, 3129 bp, Oryza sativa
  Clone ID: PAT_MRT4530_81815C.1
atggcacggggctccgctctgctcgatggtagcgtgctgccgccctcccgcatcgtgagcgagaggcaggctgggctgccgcgccgcttcatgccggaatctgccaccggccgggagatagtcacgctgggcgagggacgcccggcgccagactacccggggcggtccgtcttctttctcccttttgcaatggcagggctagttccgccattttcttctttcttcatggatgttctggagttctacgatctccagatggcgtacctcacccccaacgcggtgatgacattggccatcttcgcgcatctgtgcgagatgttcattggggtgcgcccatctcttcggctgttccggtggttcttcaccgtgcagtcggtgtcgccgccatcggtagttggtggctgctacttccagccacgggggccggtggcgaaccgctacatcccctgcaccctccgcaagaagtgggacgactggaagagcgactggttctacaccccccttgccgacgaagcgcgcctccgacttccgagccagcccccggtgcaggcctccagctggcgggcgccggtagatctgggggatggctatgacgccgtcctcgaccgcctggcgggcctgcgatcccaggggctcacgggggccatggtgtatggcgactacctccgtcgtcggattgcgccgctccagcggcgcgctcggggcgcctgggagtacaccgggtccgaagacttcatgaggacccacaatggagtgagatgggacggggctcctgaggacttcaagatattggtccaacgggtgctgaatctcaactccgtggaggcggccctcattccccaaggaatcctccccctctgcagcgatccggaccgcgcctccatcctgaccattatgatggcggtcggggcctcagaggagcgagctccaaagggccacgacggcgcaggcgggagccgccggggggaacaatctaccccgagagggggtcatgcttctgggtcccgtgacagtggcccggggagcagccgccctgccaacgcccgggggaagaggaagcagggaggaacacctcccccatctcctccccgaggggacggggcggcgcgtgccaacagcaggcgcccggagggggccgcgccagcatcgcagcccgagggggagcgcaagaagaagcggccccgcaagatgggggagacagaaccatctcggggaaacctcatttcccctccaaagtggtcgtttaaccgaccccctcgcagcgagatcccgtcgcgtccctcccgccattccaagtccggccagcctgaggccgaggatccggcggccgcagaggcccggaggcgggaatctgaccggcgagaggccgcggatcgcctacgggtagccgaggaggccgtccaggaggccgcccgggctcgccaggccgaggaaaccgctcgggagggagccgcccgggcctgccaggccgaggaagctgcttgggaggaggccgcccgagcccaccaggccgaggaagccgctcgggaggaggctgtccgagcccacaaggccgaggaagccgctcgggaggaagccggatttcgccaggacgaggcgatggcaacttccgaggcagctcgcgacgaggccgcgggcgcgtcgcttgggcccactccctcgggcaacgctcaggcccaaccaggtccggaggacatccccgcgtctggcacgtccatcggcgggccgagccgcgtggcatcttctccgaggcggcttttccccacgccttctgctgccctactgagcgcagagccccttctgcaagccttggccgccgcaaacaccacggtgttggatgggttaagtgcccaggtggaggccctgcaggcagagcgggcggagctcgacgccgcgtgggcgcgcgtcgaagaggggcgacgctcggtggaggccatggtggaggtgggccgtaaggctcaccgccggcacgtctcggagcttgaaacccgtaagaaggtgctagcggagatcgccaaggaggagcggggggctgccctcattgccaccaccgtgatgaacgaggcgcaggacaccctccgccttcaatacgggagctgggaggcggagctagggaagaagctcgacgccgcccagggggtgcttgacgctgccgctgcccgagaacagcgggcggcggagaccgaagcggcgtcccggtggcgcgaagaggcccttgaggcgcgcgccatggcgctggaagagcgcgtctgcgtcgtggagagggatctggcggaccgcgaggccgccgtcaccatccgggaagcaacgctggcggcgcacgaggctgcctgcgccgaagaagagctcgcgctccgcctccgcgaggacgcgctcaccgagcgggagcgagctctcgagggggccgaggccgcggcgcaacagctagcggacagcctgtccctccgcgaggcagcgcaggaggagcaggcgcgccgtaatctggaaggtgcccgcgccgagagggctgcactgaaccaacgggccgctgagctcgaggcgcgggagaaggagctggacgcaagggcgcgcagcggcggggcggccgcgggcgaaagcgacttagccgcccgcctcgcagctgcagaacacaccatcgccgatctgcagggcgcgctggactcgtccgccggggaggtcgaagccctccgcttggcaggcgaggttgggcccggcatgctttgggacgccgtctcccgcctagattgcgccggtcggcaagtgggcctctggagagggcggatcgtaaagtacgccgccaaccagggaggtctcgcccagcgcctctcgaagatggccggggctctccaacggctccccgaggagctcgagaagacaattaagtcatcctcgagggacctcgcccaaggagcggtggagctcgtcctggcgagttaccaggccagggaccccaatttctctccatggatggcgctggaagagttccctcctgggaccgaggaccgcgcgcgtgcaagtccgggatgccgccgaccatatcgtcgacagcttcgagggctcggcccctcggctcgcgttcggccccaactccgacgaggagggcaatgccggtggtgcagacaacagtga

SEQ ID NO: 82381 - DNA, 6073 bp, Oryza sativa
  Clone ID: PAT_MRT4530_81816C.1
atgggttccgtctccggcatcgacgacttcgccttccctcccgggcaggcgttccggttcagcagcctcaacttcatcaccaacgacttcggcaagatctctctccttgactcggattcgaaccagtccgggagagaccaggcccccgcgccgttcggtattccgaactcggccaaggcctactccaagatcatctctcccgagtcggcttcaaaccactcggacgagatccaatctacccctccgcgactagatcaagatgacgggtcctatctctcaatcctgatgagacttcctgatgatttggccgctgtcttcacagccaagacatctcccactcgaagatctaggcgagctccgacttcggccccgatccaatctagaaccagagagattggtgttatactccaacctcttgggacagtctcgacggaagagttggatggctacctcagctcccctggcgtcagttctcgaccaaccgagatcctcgactgcgacgacttcggctaccactacgaccacggtgacttcaacgacagctatgaggataactacacgcctctctttttcggcgtattcatggctgacaacgaaacggaggaacagcgccgagcccgagaaacggaggaagagcgcacacaacaagaaaccgaacgtcgccgactggaggaagaacgacaacgacaagagcgagaacgactacagcgtgagcaacaagatcgcgagcgagttgcaaaggaggctgaagatcgacggcagcgcgcgttggaatccgggcgacgagcgagagatctcatcgggcagcaagacgtcgatggaacagcggtttttcgcaccccccagcagaacgcggttgcagcaatcactctcctcgacaccctcctcaaggaagacgcactcaatcaagctgatcatgttgtcatcatcttgaaccagacgaagaccatgatcgctgcctcggttccagccaactccgtaagtgcccgcaccccgactggtagccgagtccctcatcttcgatctcaagactatcaccagccaagccttagcattaccggcgccgggtccagtcgcaggagcaggggacatgatgaacgatctgttcgttcgcctcctgaacaatatatggagcaccgagttgaacgaccacactccccacatcgaaggcgccctgtcgatcttcgcgacaccatcaaccagcgccgcacggcaagaggctatcattcaccggatcgctatgacgacgacatggacagagttgctgccttcacaaatgatctgcgtcgagtgaattggccaaccggctttaagccgactggaatcgagaaatatgacggcaccaccaacccggaatcctggctcaccgtctacggtcttgcaattcgcgcagcaggaggagaccgcaaagtcatggcaaattatctgccagtggccttggcggattctgcccggtcctggcttcacgggttaccccgcggcacaatcggatcatgggcagaactacgcgaccacttcatcgccaacttccaaggcacttttgaacgccctggtacacactttgatctctacaacatcattcagaagtctggagaaacccttcgagattacatccgacgcttctccgagcaacgcaacaagatctccgacatcaccgacgacgtcatcatcgccgcctttactaaaagcattcgccacgaggacctagtcggcaagtttggacgcaaacctcccaagatgatcaagcagatgtttgaaaaagccaacgagtatgccaaagccgaagatgctattactgcatctaaacagtcgggcaccatttggaagccaaggaaagacacgccgaccgcatgagggagtggaagtaacaaccacaaggatcgcaagcgtaagcccgaagaacttgtggcaacaacctctccatcttcccgacaacgtccccgcgtcaacaccttcgacaagataatgaactcccaatgtccgcaccatcccaactctaaccacgtggccaaagattgcttcgtctacaaacagtttgcggagcaatacgtcaagaacgcacgtaagccctcagacggagatcaaggcacatcaaagaagaaagatgatgaagacgatgccccgactggttttcaagatcatcgcaaagaactcaatcacatcttcggcggacccctggcttatgaatctaagagaaagcagaagctaacagaacgggaaatcaatacggttcagcctaacacgccccaataccttcggtggtcagagatagcaatcaagttcgaccgctcggatcatcccgaccgagtggtccacccggggcggtaccccctggtactagacccagtggttcgcaatgttaagctccgaagaactctcatcgatggtggcagtgcactcaacatccttttcgctaagaccctggacgatatgcagattcctcgcacggaattaaagccgagtaatgcacccctccacggtgttatcccaggattatcagctacaccactcggccagatcactcttccggttactttcggcactcgggagaattttcgtacagaaaacgtttgtttcgaagttgctgatttcgagacagcgtaccatgccatactcggacgaccggctctagccaaattcatggccgtccaacactacacctacatgatgatgaagatgcctggtcctcgaggagtcatatcactacagagcgacatcaagcaagccgtcacatgtgacaaagaaagttgcgagatggcccaaacccgcgagatcactctcgctcgcgaagagatcaagctggctacgaccacggcagacgaatgagaagtgcatgcgaccaagctatcaaagaccgaagaaggcgacgacaaaactaagaagattccactagatccctccgatcctaccaaaactgctaataataaagatatctttgcatggaaaccatccgatatgcctggtattcctagagaggtgattgagcactctttacatgttaaggaagacgccaaacccatcaagcaacgactccgccgttttgcacaggacaggaaggatgcgatcaaggaggaattaaccaagctgttagcagcgggcttcattaaagaagtcctttatcccgactggctggccaacccagtcctagttcggaagaagaccgggcagtggcgcatgtgtgtcgattacaccgacctcaacaaatcttgccctaaagatcctttcgggttacctcgcattgaccaggtggttgactcaacggccggctgcgagttactcagtttcttggactgctactcgggatatcatcagatccgactaaaagaatccgactgcttgaagacctcgtttattacgccctttggggcctactgctatatcaccatgccctttggattgaagaacgcaggagcaacctatcaacgcatgattcaaagatgtttctcaactcagatcggccgcaatgttgaagcttatgttgatgatgtagtcgttaagaccaagcagaaggatgacctgatcgcggatttagaagaaacttttgcaagcattcgtgctttcaagatgaaactaaaccctgaaaagtgcatcttcggagtaccgtcagggaagttgctcagatttatagtatctcaaagaggcatacaggccaacccggggaaaattaacgccatcctcaacatgaaaccgccaagctcccaaaaagatgtccaaaagctgattggttgcatggcggcgctcagccggttcgtctcatgactcggcgagcgggggataccctttttcaagctgctgaagaaaaccgataatttccagtggggacccgaagcacaaaaagcctttgaagacttcaagaaacttctcactactccaccagttttggcctcgccacatccacaagagccgctactgttatatgtgtcggcgacctcccaggttgtgagcacggtcctggttgtcgagcgtgaagaggaaggccatattcaaaaagttcaacgaccaatttatttcgttagcgaggttttggccgactccaagacaagatatcctcaggttcagaagttattgtatggtgtcttaattaccgtcaggaaattatctcactactttcaaagtcactcggtcacggtggtcacatcgtttccactcggggatatacttcataaccgtgaagcaaacggacggattgcgaagtgggccttagaattgatgtctttggacatatctttcaagccacgaacttcgatcaagtcacaagctttagctgatttcctcgccgagtggaccgagtgccaagaagacatgccagaggaaaagatggaatattggactatgcattttgatgggtcgaagaggcttacgggcactggagctggggttgttttaatctccccgaccggagaaagattgagctacgtattgtggatacatttttctgcgtcccaaaacgtggcggaatacgaggcgctgctccatggattaaggattgcaatctctctaggcattcgccgactaatcgtccgtggagacactcagttggttgttaatcaagtcatgaaagagtggacctgtctagatgataatatgactgcttatcgacaagaggtacgcaagttggaagataaattcgatggactcgagctcacccatgtccttcgacacaataatgaggcagcaaacagattggccaattttggttcaaaacgagaagcagccccttctaatgtgttcgttgagcatctttatgaaccaaccgtgcctagaaaagaaacaattgaagccatggatactcaagccgtaagcatgattgaagccgactggagagaacctctcataagatttttgaccaaacaagaactccctcaagacaaaaatgaagccgagcagatttccaggcgcagcagactctatgtagtccacgagaacgagttgtacaagtccatcaggaatcctgcaacgctgcgtatctttggaagagggaagacagttgctaaaagatattcattcaggcatctgtggtaatcacgctgtagcatgaactattgttggcaaagcttatcggcaaggtttcttctggcccatagctgtttccgacgccgacaaaattgtgcgaacatgcgagggttgtcaattctttgcccgacaaactcacctaccagctcaggagttgcaaaccatcccgctgtcgtggccgtttgcggtttgggggcttgatatggtcggtccattcaaaaaggcagtcggcggttatactcatctctttgtagctgtggataagttttccaagtggattgaagccaaaccgatcgttacaatcactgcggacaaagctagagatttcttcatcaatattgtacatcggtttggggtaccgaatcgtatcattactgataacgacactcaatttaccggcggagtatttaaaggcttttgagaagactttggcattaaaatctgttacgcctccgtggcacaccccatgagtaatggacaagtcgagcgcgccaatggcatggtacttcaagggatcaaagcacgagttttcgaccgactgcgtccctatgctggtaagtgggtagatcagctgttgtccgtactttggtctttacacactactcccagtcaggctaccggccagtcgccgttcttcttggtctatggcgcagaagcaatgttgccaagtgaggtagagtttgaatcccttcgatttcacaacttccgggaggagcgctatgaggaagatcgagtggatgatatcaaccgactggaagaagctcgtgaagcagccctaatccagtcagctcggtatttacaagggttgcgccgttatcataatcggaatgttcgatcgcgagcctttttagtcggtgacctggttctgaggagagttcaagctacacaggatcggcataagttatctcccttgtgggaaggactgttcataatcgctgaagtcacttggccaggttcttaccgactcaagcgtgaagatggtactcttgtcaacaattcttggaatattgaacaccttcgtcgattttatgcttaggcatttcgtttgtatctttcctct

SEQ ID NO: 82382 - DNA, 1218 bp, Oryza sativa
  Clone ID: PAT_MRT4530_81817C.1
atggcacctgttccggccaccgccgccgccgccgcccctgcggccgtcgtcagcacccacgagatccggcgtgcgcagcgcgccgatggcccggccaccgtgctcgccatcggcacggcgaacccggagacgtgcgtgccgcaggatgagtacgccgacttctacttccgcgtcaccaagagcgagcacctgcctgagctcaagaacaagctcaggagaatctgtaacaagtcaggcatcgagaagcggttcatgttcgtgaacgacgacgtcatggaggcacacccggagttcgccgaccgacacctgacgtcactcgacgccagggtggagatcgtctccaaggtcgtgccggagctcgccgcggccgcctcggcgaaggcgatcgccgagtggggccggccggccaccgacatcacccacctcatcttcagcacctactccggcgtcaaggcgcccggcggcgaccgcctgctggcgtcgctcctcggcctccgccccaccgtgtcgcgcaccgtgctcagcctccacggctgctacggcggcggccgggcgctgcagctcgccaaggagctcgccgagaacaaccgcggcgcgcgcgtcctcgtcgcctgcgccgagtccacgctcatcgcgttctacgggcccgaggtggggtgcaacgacaccatcatcgggcaggcgctgttcggcgacggctcgggcgccgtcatcgtcggcgccgacccggtcggcgccgtcgagcgcccgctgttcgagatggcgttcgcgtcgcaggccaccgtcccggacagcgagggcgccatcaccatgcagcacaagaagggcggcatggactaccacatcggcggcggcgtgccggagatgctcgccggcagcatcgagcggtgcctggccgacgcgttcggcgccatcggcgtcgccgccaggtggagggacctcttctgggccgtccacccgggtggccgaaggatcctggacctcatcgaggaggcgctcgggctggacaacggcgccatggcggcgagccggcaggtgctgcgcgagtacggcaacatgagcggcaccacggtgatcttcgtgctcaacgagctgcgccgccggttcgtcgccgacggcgccgagggagccgactggggcgcgctgatggcgttcgggccgggcgtcaccgttgagaccattttgctccgcgtcggaagcggcctcaagggaaattaa

SEQ ID NO: 82383 - DNA, 5739 bp, Oryza sativa
  Clone ID: PAT_MRT4530_81818C.1
ctaagcataaaatcgacgaaggtgttcaatattccaagaattgttgatgagagtaccgtcttcgtgcttgagtcgataagaacctggccgagtgacttcagcaattatgaacggtccttcccataagggagatattttatgccgatcctgtgttgtttgaattttcctcagaaccaggtcgtcgactaaaaaggctcgcgatcgaatattccgattatgataacggcgcaacccttgcaaatatcgagtcgactgaatcaaagctgtttctcgggcttcttctagtcgattgatgtcgtctacttggccctcttcatagccctcctcgttgaatttccgaaatcgtagtgattcaaattccacttcactcggcaacattgcttctgcgccataaaccaaaaagaacggcgactggccggtagcccgattaggagtagtgcgtaaagaccaaagtatggacggcagctgatctacccacttgccagcatagggacatagtcggtcaaaaactcgtgctttgatcccttgaagtatcatgtcgttagcacgctcgacttgtccagtactcataggttgtgccacggaggcgtaacaaattttaatgccgaagtcttcacaaaagtctttaaatgctccgccagtgaattgagtgccattatcagtgatgatccgattaggtaccccaaaccgatgcacaatgttgatgaaaaaatctctagccttatctgctgtgatcatgatgacctgtttagcctcaatccacttggagaatttgtcgatagccataaagagatgcgtgtaaccgccgactgcccttttaaacgggctgaccatgtcaagcccccagaccacaaatggccaggataacgggatggtttgcaactcttgggcttgccggtaagctttgccgacaatggtccgtgcagcggcatgattaccacaaataccagaatgtatatccttcaacaactgtctcccttcttccaaagacacatagtgctgcagtattcctgatggacttttcttgtacagctcggtctcatgaataatgtaaagtctgctgcgcctggaaatccgctcggcttcatttttgtcttgagggagttcttgtttgctcaaaaattttataaaatgttctctccagtcggctttgatcatgcttacgccttgagtatccatggcttcgactgtctcttttctgggcacggtcggttcgtaaagatgttcgacgaacacatctgaaggagctgcttcccgttttgaaccaaaattggccagtttgtcggatgcctcattgttatgtcggaggacatgggtgagctcgagtccatcgaatttattttccaacttgcgtacctcttgtcgataagtggtcatattatcatctagacatgaccactctttcatgacttgattaacaaccaactgagagtctccacggacgattagtcggcgaatacctagagatattgcaatccttagtccatggagtagcgcctcgtattccgccacattatgggacgcagaaaaatgtatccacaatacgtagctcaatctttctctagtcggggagattaaaacaaccccagctctagtgcctgtaagcctcttcgacccatcagaatgcatagtccaatattccatcttttcctctggcatgtctttttggcactcggtccactcggtaaggaaatcagctaaagcttgtgacttgattgaagttcgtggcttgaacgatatgtccaaagacatcaattctaaggcccacttcgcaatccgtccgtttacttcgcggttatgaagtatatccccgagtggaaacgatgtgactaccgtgaccgagtgactttgaaagtagtgagataattttctgacggtaattaagacaccatatagtaacttttgaacctgagaatatcttgtcttggagtcagctaaaacctcgctaacgaaataaattggacgttggactttttgaatatggccttcctcttcacgctcgacaaccaggaccgtactcacaacctgggaggtcgccgacacatataacagtagcggctcttgcggatgtggcgaggccaaaactggtagagtggtgagaagtttcttgaaatcttcaaaggctttctgtgcttcgggtccccactggaaattgtcaatcttcttcagcagcttgaagaagggcatcccccgctcgccgagtcgtgagacgaactggctgagcgccgccatgcaaccagtcagcttttggacgtctttttgggagcttggcggtttcatgttgaggatggcgttgattttctccgggttggcctgtatgcctctttgagataccataaatccgagcaacttccctgacggtactccgaagatgcacttttccgggtttagtttcatcttgaaagcacgaatgcttgtaaaagtttcttctaaatccgcaatcaggtcatccttctgcttggtcttgacgactacatcatcaacataagcttcaatattgcgaccgatctgagttgaaaaacatctttgaatcatgcgttgattggttgctcctgcattcttcaatctaaagggcatggtgatgtagcagtaggccccaaagggcgtaataaacgaggtcttcaagcagtcggattcttttagccggatctgatgatatcccgagtaacagtccaagaagctgagtaactcacagccggccgttgagtcaaccacctggtcaatgcgaggtaacctgaaagggtctttgggacaagatttgttgaggttggtataatcgacacacatgcgccattgccccgtctttttccgaaccaggactgggttagccagccaatcgagatgaaggacttccttaatgaagcctgctgctaacagcttggttaattcctccttgatccatccttcagcagtcttatcaggatcggagggatctaagggaatctttttcgtcttggcatcactttcttcggtcttcgtcagcttggttgcaggcgcttctccctcgcttgccgtggtcgcagccagtcggatctcttcgcgggcgagagtagtctcgtgggtttgggccatctcacaactttctttgtcacatgtgacggcctgcttgatgacgctccgtagtgatatgactcctcgaggaccaggcatcttcatcatcatgtaggtgtagtgtgggacggccataaatttagctaaagccggtcgtccaagtatagcataatatgctgtctcgaaatcagcaatttcgaaacaaacattttctgtgcgaaaattctcccgagtgcctaaggtaactggaacagtgatctggccgagtggtgtagctgacaatcctgggataacaccgtggaagggtgcattactcggttttaattccgtgcaaggaatctgcatatcgtccagggtcttagcgaaaaggatgttgagtgcgctgccaccatcgatgagagtccgtcggagcttgacattgcgaaccactgggtctagtaccagggggtaccgccccgagtggaccactcggtcgggatgatccgagcggttgaacttaattgctatctctgaccaccgaagatattggggcgtgttaggctgaaccgcattgatctcccgttctgttagcttctgttttctcttagattcataagccaggggtccgccgaagatgtgattaagttctttgcgatgatcttgaaaaccagtcatggcatcgtcttcatcatctttcttctttgatgtgccttgatctccgtctgagggtttacatgcgttcttgacgtattgctccgcgaactgtttgtagacgaagcaatctttggccacgtggttggagttgggatgatgcggacattggaagttcattatcttgtcgaaggtgttaatgcgggaacgttgtcgggaagacggagaggtggtcgccacaagttcttcgggcttacgcttgcgatccttgtggttgttacttccactccctcccgcggtcggcatatccttctttggcttccaagtggtgcccgattgcttggacgccgtgatagcatcttcggctttggcatactcattggctttttcaaacatctgtttgaccgtcttgggaggtttgcgtccgaacttgccgactaggtcctcgtggcgaatgcctttagtaaaggcagcgatgatgacgtcgtcggtgatgtcggagatcttgttgcgttgctcgaagaagcgtcgaatgtaatctcgaagagattctccagacttctgaacaatgttgtaaagatcgaagtgtgttccgggccgttcaaaagtgccttggaagttggcgatgaagtggtcgagtagctctgcccatgatgcgatcgtgccgcagggtagcccgtgaagccatgaccgggcagaatccgctagggccacaggtagatagttcgccatggctttgctgtctcctcctgctgcgcggattgcgagaccatagacggtgagccaagactcagggttggtggtgccgtcatatttctcaattccagtcggcttaaagccggctggccaatccactcgacgcagatcgcgttcatcatgtcccctgctcctacgactagattcggcgccggcaatgctgaggctcggctggtgagggactcggctaccagtcggggtgcgggtgcttgcagagttggctggaaccgaggcagcgatcatggtcttcgtctggttcaagatgttgactacatgatcggcttggttgagtgcgtcttccttgaggagggtgtcgaggagagtgattgctgcaaccgcgttctgctgggggggtgcgaaagaccgctgtcccatcgacgtcttgttgcccaatgagctctctcgctcgccgcccagattccaaggcacgttgtcatcgatcttcagcctcctttgcaatccgttcgcgatcttgttgctcacgctgtagtcgttctcgctcttgtcgctgtcgctcttcctccagtcggcgacgttcagcttcttgccgtgcgcgatcttggtccgcttctcgggcttagcgttgttcctccctggatctagatcggatcggggccgaagccggagctcgcctagatcttcgagtaggagatgtcttgactgtgaagacagcggcaaatcatcaggaagtttcatcaggattgaaggataggacccgtcgtcttgatctggtcgcggaagagtagattggatctcgtccgagtggtttgaagccgactcgggagagatgatcttggagtaggcctcggccgagttcggaataccaaacgggacggggacctggtctctccccgactggtttgaatccgagtcaagaagagagatcttgccgaagtcgttcgtgatgaagttgaggctgccgaaccggaacgccgtatatccgactaaattacaactgtcatgtagatatgggtatccataatctccacacatgccgccctccgacacccgcaccgcgaacccctgcgccgtgcccacgcgcgtgctgccggcggatggcccctccgtcagcgcgttgttcagcgccacgatgtcgccgaactgacgcggcaccgcgtcaccgccatcgtcgagcaaggagcggccggagacgacgcgcatggcggtgggagccgggccggtgtaggcgtcgtgcatgtagaaatggaggtgggtggtagtggtggaggcgccgttgcggtggaggaagatggcggctgcgaggaggaagcagccgaggaggagggaggagagggacgccat

SEQ ID NO: 82384 - DNA, 3045 bp, Oryza sativa
  Clone ID: PAT_MRT4530_81819C.1
atggcacggggctccgcaccgctcgacggtagcgtgctgccgccttcccgcatcgtgagcgagaggcaggctgggctgccgcgccgattcatgccggaatctgccactggccgggaggtggtcgcgctgggcgagggacgcccggcgccacactacccggggcggtccgtcttcttcctctctttcgcaatggcggggctggtcccgccattctctatttttttcatggatattctggagttttatgatctccagatggcgcacctcacccccaacgcgataatgacgttggccatcttcgcgcacctgtgcgagatgtttatcgaggtgcgcccatctctccggctgttccggtggttcttcaccgtacaaccggcgtcgccgccgacggtagtcggtggctgctacttccagccgcgggggcaggtgctgaaccgctacattccttgcgtcctccgcaaaaagtgggacgactggaagagcgattggttctacacccctctcgccgacgaagcgcgcctccgacttccgagccagcccccgtcgcaggcctccagctggcgggcggcggtagatctgggagacggctacgacgccgttcttgaccgcctggcgggtctgcgatcccaggggctcacgggggccatggtgttcggcgactaccttcgtcgccggatcgcgccgctccagcggcgcacccggggcgcctgggagtacaccgggcccgaggactacgtgaggacccatcaggggcgcaaatgggactgggaccctgaggacttcaggatggtggtccaacgggtgctgaatctcagctccgtggaggcatccctcatcccccaaggggtcctccccctttgctgcgatccagagcgcgccagcatcctggccaccatgcaggtggtcggggcgtcgggggagcgggccccccgaggccacgatggcgcgggcgggagccgcaggggggaacaatctaccccgggagggggtcgtgcttctgggccccgcgacgggggcccggggggcagccgccctgccgacgcccgggggaagaggaagcaggaggcccgagggggagcgaaagaagaaacggccccgcaagatggggggaccgagccatgccgggggaacctcatctcgcccccgaggtggtcgtttagccgacctccccgcagcgagatcccgtcgcgccccccccgccattccaagtccggccggtctgaggccgaggagacggcgaccgcggaggcccggaggcgggaagctgaccggcgagaagccgcagaccgcctccgggaagccgaggaggctgcccaggaggccgtccgggttcgccaggctgaggaggccgctcgggaggaggctagactccgccgggccggggagtccgtccgggaggcagaggcggcgcgcgcacgccaggcggcctgccaagcccccgacccgactccgcccgaggcgacgacgacttccgaggccacccacgacgaggccgcgggcgcgctgctcgggcccgacccctcgggcgacgcttgggacgagccagcttcgggggacgcccccgagtccggcacgtcgatcggcgggccgagccgcgcggcacccacaccgaggcggctctcccctatgccttccgctgccccactgagcgcggagcccctcctgcaggccttggccgccgcgaacaggacggtgctggacgggttaagtgcccagatggaggccctgcaggcggagcgggcggagctcgacgcggcgtgggcgcgcgtcgaggaggggcggcgctcggtggaggccatggtggaggcgggccgcaaggcacaccgccggcacgcctcacagctcgaggcccgtcgtagggacctggcggagatcgccagggaggtggaggaggagcgggagactgccctcatcgccaccgccgttctcgacgaggcacgggatgacctccgcctccaatacggaagccgggcggcggagctagaggagaagctcgacgccgtccggggagttcttgacgccgccgttgcccgggaacggcgggcggcggagaacgaggcggcgttccggcagcgcgaagaggcccttgaggctcgcgccacggcgctggaggagcacgcccgcgcgctggacacgaaggagcgcgacctggcggaccgcgaagccgccgtcgccactcgggaggcaacactggcggcgcacgaggccgcctgcgccgaagaggagtccacactccgcctccgcgaggacgcgctcaccgagcgggggcgagctctcgaggaggccgaggccgcggcgcagcggctggcggacagcctgtccctccgcgaggcagcgcgggaggagcaggcgcgccgcaatctggaaggcgcccgtgccgagagggccgcactggatcagcgggccgctgagctcgaggcgcgggcgaaggagctggacgcgagagcgcacagcggcggggcggccgcgggccacggcgacctagccgcccgcctcgcagccgccgaacacaccatcgctgagctgcagggcgcgctggactcgtccgccggggaggtcgaggcccttcgcttggcgagcgaggtagggcccggcatgcttcgggacgccgtctcccgtctagaccgcgccgggcggcaggagggcctctggggcgggcggcacgcgaagtacgccgccaaccaggggggcctcgcccagcgcctctcagaaatgaccggggccctcgagcggctccccgaggagctcgaggagacgatcaagtcatcctcgagggacctcgctcggggggcggtggagctcgtactggcaagctaccaggccagggaccctgacttctctccgtgggcagcgctggaagagttccctcccgaaaccgaggacggcgcgcgtgcgcaggtccgggacgccgccgaccacatcgtccacagcttcgagggtacggcccctcggctcgcgttcgcgctcgactccgacgaggagggcggtgacgatggtgcggacgacagcgacgacgaggccggcgacccgggcgcgtcggagtga

SEQ ID NO: 82385 - DNA, 270 bp, Oryza sativa
  Clone ID: PAT_MRT4530_8181C.1
tttgtcgcccggctggcgcgccgccgcatacactagctagcgcgccgtcgacctcccccacgacggccgccgctcctattccccacctcgccggcgcagcttttcccaccgagccgtctctccctctccaccacccagagaactccgacgccatgggctggagcagctctccatgcaggaatcgtgaactgccggtctgtctcgcttggccccccacgattgccatagctccatgatacccgccgatggtgaccgtgtaggatcgaccgg

SEQ ID NO: 82386 - DNA, 2964 bp, Oryza sativa
  Clone ID: PAT_MRT4530_81820C.1
atggcacggggctccgcaccgctcgagggtagcgtgttgccgccttcccgcatcgtgagcgagaggcaggccgggctgccgcgccgattcatgccggaatctgccaccggccgggaggtggtcgcgctgggcgagggacgcccggcgccgcattacccggggcggtccgtcttcttcctctctttcgcaatggcagggctggtcccgccattctcttctttcttcatggatgttctggagctttatgatctccagatggcgcacctcacccccaacgcggtaatgacgttggccatcttcgcgcacctatgcgagatgttcatcggggtgtgcccatctctccggctgttccggtggttcttcaccgtacagctggtgtcgccaccatcggtagtcggtggctgctacttccagccacgggggctggtgctgaaccgctacattccttgcgtccttcgcaagaagtgggacgactggaagagcgactggttctacacccctctcgccgacgaagcgcgcctccgacttccgagccagcccccggcgcaggcctccagctggcgggcgccggtagatctgggagacggctacgacgccgttcttgaccgcctggcgggtctgcgatcccaggggctcacgggggtcatggtgttcggcgactaccttcgtcgccggatcgcgccactccagcggcgcgcctggggcgcctgggagtacaccgggtccgaggactacatgaggacccaccaggggggcagatgggactgggcccctgaggacttcaagatggtggtccaacgggtgctgaatttcagctccgtggaggcatccctcatcccccaaggtgtcctccccctctgcagcgatccagagcgcgccaacatcctgaccatcatgcaggcggttggggcgtcaggggagcgggctcctcgaggccacgatgacgcgggcgggagccgcaggggggaacaatctaccccgggagggggtcgtgcttctgggccccgtgacgggggcccggggggcagccgccctgccgacgcccgggggaagaggaaacaggaggataccccctccccatctcctccccgagggggcggggcgcgagattccgtcgcgccccctcgccattccaagtccggccgatctgaggccgaggagacagcgaccgcggaggcccggaggcgggaagctgtccggcgagaagccgcggaccgcctccgggaagctgaggaggctgcccaggaagccgtccgggttcgccaggctgaggaggccgctcgggagaaggccagactccgccgggccgggaagtcagcccgggaggcagaggcaacgcgcgcacgccaggcggcctgccaagcccccgacccgactccgcccgaggcgacgacgacttccgaggccacccacgacgaggccgcgggcgcaccgctcggacccgacccttcgggcgacgttcgggacgagccagcctcgggggacgcccctgagtccggcacgtcgattggcgggccgagccgcacagcgcccacaccgaggcggctctcccctctgccttccgccgccccactgaacacagagcccctcctgcaggccctggccgccgcgaacacgacggtgctggacgggttaggtgcccaaatggaggtcctgcaagcagggcgggcggagctcgacgcgtcgtgggcgcgcgtcgaagaggggcggcgctcggtggaggccatggtggaggcgggccgcaaggcataccgccggcacgcctcagagctcgaggcccgtcggagggagctggcggagatcgccagggaggtggaggaggagcgggagactgccctcatcgccaccgccgtgctcaacgaggcgcgggacgatctccgccttcaatacgggagccgggtggcggagctagagaagaaactcgacgccgcccggggagtccttgacgccgccactgcacgggaacggcgggcgacggagaacgaggcggcgtcccggcggcgcgaagtggcccttgaggctcgcgccacggcgctggaagagcgcgcccgcgcgagggagagggacctggcggaccgcgagaccgccgtcgctatccgggaggcaacgctggcggcgcacgaggccgcctgcgccgaagaggagtccgcactccgcctccgcgaggacgcgctcaccgagcgggagcgagctctcgaggaggccgaggccgcggcgcagcggctggcggacagcctgtccctccgcgaggcagcgcgggaggagcaggcgcgccgtaatctggaaggcgcccgcgccgagagggccgcactggatcagtgggccgctgagctcgaggcgcgggcgaaggagctggacgcgagggcgcacagcggcggggcggccacgggcgacggcgatctagccgcccgcctcgcagctgccgaacacaccatcgccgatctgcagggcgcgctggactcgtccgccggggaggtcgaggccctccgcttggcgggcgaggtagggctcggcatgcttcgggacgccgtctcccgtctagaccgcgccgggcggcaagcgggcctctggggcgagcggaccgcgaagtacgccgccaaccaggggggcctcgtccagcgcctctcagagatggccgggactctccagcggctccccgaggaactcgaggagacgatcaagtcatcctcgagagacctcgcccggggggcagtggagcttgtactggcaagctaccaggccagggacccggacttctccccgtgggcagcgctggacgagttccctcccggaaccgaggacgacgcgtgcgcgcaggtccgggacgccaccgaccacatcgtccatagcttcgagggtacggcccctcggctcgcgttcgccctcgactccgacgaggagggcggcgacggtggtgtggacgacagcgaccacgaggccggcgacccgggagcctcgaagtga

SEQ ID NO: 82387 - DNA, 998 bp, Oryza sativa
  Clone ID: PAT_MRT4530_81821C.1
ccggccgggtcttcccgggcttgcgccgccgccaagacacaggggaggggcggtgatctccatctcgcgaggagactagagcagagcaggggaggggatcctgttcaactgaaccaccatgtcccaagttggatccgcccctgctttcaggactgggtcacctaagaagcatgaactgaagtccaaacagaagcttgagaagaagctcagcttctacacaaaagtgaaagatgcagtaacctccgtaaatgctacaaagactatctgcaagaaatctaaacagaggagccgccagaagaaactgaaagcatatgatctctcaatgctctctgagttccttcctgaaacagatgcctcaaatctgcacaccgaagcaaaactgaactgcaaatcgaagcaagctttagtgcaacgctagcctacccaactgaatgttgtactggcaaatccgcagttccagctcgtgcagttcgcgggcatccatcagcacctgttgtcaacacagccaacctctgggagaaaggagagcaattccgccaagcaggggaaggaccctaaggccaagaaaagaaagaacaagaagaagaatgcttcatcggcctccgaggcaatggatacctgatatggcaaagtaccctaccaaaggaatggagcgcaattatcgtcaacctcagtttgaaatcgtgtgatctcttaaaccttgtcaaattctgtttcagcatcggcactctcctcccaaaggtgtgaggttgggtcaaattttgtttcagcgtcggcactctcctcaggttttttttttgacggaaaaacagttggagaggctcctactgcaatatattacttgagtgtacaagagactttacctcctcccagcgaactgcttgtagcgtggctgaagtttctttgtgctgatttgtacatatgatgtttatgatgttttggttaattgttcatgtacctggttctcgccaaaaaaaaaaaaaaaaaaaaaaaaaaaa

SEQ ID NO: 82388 - DNA, 3144 bp, Oryza sativa
  Clone ID: PAT_MRT4530_81822C.1
atggcacggggctctgctctgctcgacggcagtgtactgccgccttcccgcatcgtgaacgagaggcacgccggactgccgcgccgcttcatgccggagtccgccaccggtcgggagatagtgatgctgggcgaggggcgcccggcaccagactacccgaggcggtccatcttcttcctccccttcgcaatggctgggctggtcccgccattttctcatttcttcatggatgtcctggagttctacgatctccagatggcgcacctcacccccaatgcggtgatgacattggccatcttcgcacacctgtgcgagatgttcattggggtgcgcccctctcttcagctgttccggtggttcttcaccgtgcagtcggtgtcaccgccgtcggtggttggcggctgctacttccagccgcgggggccggtgttgaaccgctacctcccctgcgtcctccgcaagaagtgggacgactggaagagcgactggttctacacccccctcgccgacgaagcgcgcctccgacttccaagccagcccccggcgcaggtctccagctggcgggcgccggtagatctgggggaggagtacgacgccgtcctcgaccgcctggcgggcctgcgatcccaggggctcaccggggccatggtgttcggcgattacctccgtcgtcggattgcgccgctccaacggcgcgcccggagcgcctgggagtacactgggcctgaagactacatgcggacccaccagggagccagatgggattgggctcctgaggacttcaagatcgtagtccaaagggtgctgaatcttagctccgcggaggcgtctcgccttcctcaggagatcctccccctctgcatagatcccgaccgcgtctccattctaaccattatgttgggggtcggggcctcagaggagagagcccctaagggccacgacggcgcgggcgagcgacgccggagggaacaacctgccccaggagggggtcgtgcttctgggccccgcgtcgggggctcggggagcagccgccctgccgacgcccaggggaagaggaagctgggaggtacacctcccccatctcctccccgagggggcggggcggcgcgtgccagcagtcggcgcccggagggggccgcgccgacgtcgcagcccgagggggtgcgcaagaagaagcggctccgcaagacgggggagacggaaccgtgccggggaaacctgatttcccctccaaggtggtcattcaaccgaccccctcgcagcgatgtcccgtcgcattcctcccgccaccccaagtccggccagtccgaggccgaagatccagcggccgcagaggagcggaggcgagagtctgaccggcgtgaagccgcagcccgccttcgggaagctgaagaggccgcccgggaggccgcccgggttcgccaagcggaggaagctgctcgggaggaggccgcccgggctcgccaagccgaagaagctgcccgggaggaggccgcccgggctcgccaggctgaggcgtcagccgctgctggcgcgtcacttgggcccactccctcgggcggccctcaggcgacatcctccgaggcggctcgcgacgaggccgcgggcgcatcgcctgggcctacctcaccgggcgacgcccaggatcaaacgggcccgggggacatccccgagcccagcgcatcctccggggggccaagccgcgtcgccttttctccaaggcggctcttctcctcatcttctgtcgccccgctgagcgccgagccccttctgcaggccctggccgccgcaaacaccgcagtgctggatgggttcaacacccaagtggaggccctgcgcgcagaacgagcggagctcgaggccgcatgggcgcgtgttgaggaggggcggcgctcggtggacgccatggtggaggtgggccgtaaggcccaccgccgccacatctcggagcttgaagcccgcaaggcggcgctggcggagatcgcccgagaggtggaggaggagcgagaggccgcccttgtcgccaccaccgcgatgattgaggcgcaggactccctccgccttcaacacgggagctgggaggcggagctgaagaacaagctcgacgccgcccaaggggttcttgactccgctgctgcccgagagcggcgggcaacggaagccgaagcggcgtcccggcggcgcgaggaggcccttgaggcccgtgccatggcgctggaagaacacgccggcaccgtggagaagggcttcacggaccgcgaggccgccactgctctccgggagacgacgctggcggcgcacgaggccgcctgcgccgaggaggagtccgcgctccgccttcgcgaggatgcactcgctgagcgggagcgagctctcgaggaggccgaggccacgacgcaacggctggcgaacagcctctccctccgcgaggcggcgcaagaggagcaggcgcgccgcaaccttgaatgcgtccgtgccgagagagccgcgctggagcagcgggctgccaacctcgaggcacgggagaaagagctggccgcgagggcgcgcatcggtggggcggctgcgggcgaaagcgacttagccgctcgcctcgcggctgccgaacacaccgtcgctgacatgcagcgcgcgctggattcttccatcggggaggccgaggccctccgcttggtgggcgagatggggcccgacatgctttgggactcggtctcccgcatggatcgcgccggtcggcaagcgggcctctggaaaggccagacgaggacgcgcccttgcaacctggaaggcctcgctccgcacctcaacaggatggcctgggtcctcgaacgactccccgaggagctcgagaagaccatcaagtcatcctcgagggacctcgcccggggggcggtcgaactcgtgctagcgagttaccaggcccgggaccccgatttctctccctggatggcgctggaggagttccctcccgggaccgaggacgacgcgcgcgcgcgggtcggggatgctgccgaccacatcgtcaacggcttcgaggggtcggcccctcggctcgcgttcgtctccagctccgacgaggagggcgacgccagcggtgaggatgacggtggcgacgaggccggctacccgggcgcatcggaatga

SEQ ID NO: 82389 - DNA, 594 bp, Oryza sativa
  Clone ID: PAT_MRT4530_81823C.1
atgtcccaagttggatccgcccctgctttcaggactgggtcacctaagaagcatgaactgaagtccaaacagaagcttgagaagaagctcagcttctacacaaaagtgaaagatgcagtaacctccctaaatgctacaaagactatctgcaagcttgtttttactgttattgttttgctccatgagtggcgtgggcgtataacgcaaccaatgcttagatatttcaaggataaattccaaattaaatctaaacagaggagccgccagaagaaactgaaagcatatgatctctcaatgctctctgagttccttcctgaaacagatgcctcaaatctgcacaccgaagcaaaactgaactgcaaatcgaagcaagctttagtgcaacgggaggctgcccaactgaatgctgtgctgaccaatccgcagttccagctcgacccgtttgcggcgatccatcagcacctgttgtcaacacagccaccctctgcgagaaaggagagcaattccgccaagcaggggaaggaccctaaggacaagaaaagaaagaacaagaagaagaatgcttcatcggcctccgaggcaatggatatctga

SEQ ID NO: 82390 - DNA, 856 bp, Oryza sativa
  Clone ID: PAT_MRT4530_81824C.1
gtgacgtcaccgacagcggcggctcggcggaggagacggctcgaacggcgcacgctcgccggcgaacggcggcgcgaggacgcaaacggagggcaccaagacgaagcgggcggcacggcgaactcaccggcgaccaaaacgacggcggaaggtcaacggacggcgacggcgacgaggaggaagcggcgaagctcttcggcttgacgacggcgacgaagctccgacgatctccggcgacggcgaaggggcagacgaggacggcgacgacttggcgagcacgacggtggtcttcccgagcgacggcgacggctgaaacgacggcggcgcacggctggagcggcggcggcgacggcaaagctagggcacacggcgctagggcttttccgacgacgagaggcgaaggcgaaggtggcgacgggtagaggagacaccggggatccttttaaaggggctaggaggcgacgacgaaggcccatggcggcggcaacggcgaaggaaagctcggcttggagagagggaaaccgatccgaaacgaactcgattccacgaacttccaaaacgatttagccaaagattccaaaggagaaaaggtagaggagatcccggagattgtttcccctctatcaattcggccggagaaggaaaggagcggccggatttggaaaggaaacggcggcggcgcgaaactagggtttcgggcggcggcggccgaaggaagacgaagggtctgacaggtggaccccacctgtcagcgggcggacgcgcgcgcgcgcggtggcggactgggccggctgggccgaagagagagaagagaggttttgggccgactttcggcccaaagccaaaagagactttt

SEQ ID NO: 82391 - DNA, 414 bp, Oryza sativa
  Clone ID: PAT_MRT4530_81825C.1
atgcgcgcccgtgatctgctccgctctcccctccgctggccgtcgcacgactccgggtggcggcgggaggaggagaccttggcagcaggcagacgcctccctccgcatctccgctccgctctctcccccttagaagttagaccacctccaccgccgtcgcacgccgcatcgcctctccgatctctccctggcggttacgaatcgatcccagccagaggcgaccaggtcggaactcggaagcagtggcagatggtgctgggcctgcaatggcaagtgttctctaataagatcatggtgatatggaccaaagttggggagatcaacactttgtccgtttctatggccgcaaacgccggcaacagaatatgtgcaaagaaccggaatcaagctgcagggataaagctccatccttaa

SEQ ID NO: 82392 - DNA, 203 bp, Oryza sativa
  Clone ID: PAT_MRT4530_81826C.1
ctcgattctgatgggccatacccttcgcgatacgggttcttgtccatgtgctagtgcgtcgcgcaatccaatgcgtaatcactagcctcccctacggggcgttcaccaaccactgtccctgcaccctcacctagtggtttggtaattgggctgaccgcttgaacgattccatccaccgatccaccttcccgttgctgcggaga

SEQ ID NO: 82393 - DNA, 684 bp, Oryza sativa
  Clone ID: PAT_MRT4530_81827C.1
atgtacggccatgtgttcatcaaccttccttgccacctcctcttgcaagctgagctcgtagctcgataccctgaactcaagatctgcaatctttgcctcgagtccacgttttcactttgtcctctgtacccgcgggaagggcacgttatcccgcacaacctaaccgctgtgacgtacatagttcttggcggcttctaccgaggcactaggtcggccgtcttcgtccacttccgttatgatgtgccgaccctcaagcttcttcgcggcatctcgttgcccgcgtgccctcttctgtccagcggaggcggagcggcggcggggcgacgcggcggcggcgtggcagtggcgtggcggcgcacgcggcatcggagtggcgcggcggcggcggcgtggcagcgcggcggtgccgtgccgtggcggcgtcgtggcgtctcggcgtgtcgtgccgccgcggcgtcgtgtcgtgacgacgtcggcgtcggcgtcggcgtcggcaacgaggcggccggcggcaaccgagagggagagagagagatcgagatcagagagagagagctgagagggaggcggcggcggctctcaccccaaagatgcagcggcggcggaggaggcggaggcggcgacgacgacgagcgcgagacgacggcgagatacgacggcggcgtcggcgcggggatgccctag

SEQ ID NO: 82394 - DNA, 102 bp, Oryza sativa
  Clone ID: PAT_MRT4530_81828C.1
atgacaccactcgaccaagccaagaacgggagagacgtgcaggtggtcgaggcgcaacagatgtcaccgccggaccttgaggaggtgcgccggatgccctaa

SEQ ID NO: 82395 - DNA, 849 bp, Oryza sativa
  Clone ID: PAT_MRT4530_81829C.1
ccacgcgtccgcaccagccacgggctacacatcctcgccgcctccttgtgcaaaatccccaaatcctcgtcttctcggcgccgccgccgcgctgtcttcctcccaccatgccgcagcgctgtcttcctcctgcgatgctcggctggcgccgtcttcctcccgcggcgcccggctgtcaccgccgcgccatcttcctcccgcgacgcccgaccgtcaccgccgtcgccgccttttgcggattgattccttcggcccgtcgccgccggacctcggcgactgtggtggctacgaagcatggcgccaccaccgctatcctgatctacctctctgtccccttacccaggttctcaagttaattcgtgaatcatcctccctgattccttttctcatccccaaatcctcccctggttcgccgccctagccggcgccgctgcgttcttgcggagcgagggaaatcacggcgctggcttcgccgccctcgctggtgccgccaggttcttgtcgagcgagcgaaggaccagcgccgcgacagatctagccggcgctggctgctttctcacggagccatcgggcaagcgccacaaccggccgccgccctcctcttccgaagccggccaccgctgccttcaggcggagccaacggcttgtgccgcctcctcgcagagctggtcggcactgccgcttctcggggaagcacaggccagcgccgttgccgccgtcttttcgtcgcgtcagttctcaatgagaggttatagatttaatgattctttgttccagttcgtgtccaattttcctgatttgattgataggtcttcatgcaggtcccatgatctcgtcagctgctcctga

SEQ ID NO: 82396 - DNA, 1500 bp, Oryza sativa
  Clone ID: PAT_MRT4530_8182C.1
atggcgcgtttcgtggtggccggcccgtcggagtacctggccatcaccggctggggaatcgacgacgtgaagctggcgaagaaggcgtgggtgttcgccggccagaagtgcagcaggttcgacatctcgccggtgaactacgagttcaacgtggaggccatgagctccgagaagctggccttcaatctccccgccgtcttcaccatcggccccaagatcacgccggcgccggcgcctgaggtcgatggcgcctcgaatcaacggcgcgttctcatgcctgagagcgaggaaaagctcctactgtacgccaagctcatcgccccgcacgaccatgcgtcgaaccatgtcaaacagcttgtcaagggcgtcatcgagggtgagacccgcgtgctggccgcctccatgaccatggaggagatcttccagggcaccaagaagttcaagcaagaggtgttcgaccaggtgcagctcgatctcaacaagtttggcctctacatctacaatgccaacgtgaagcagctcgtcgacgagcccggccacgagtacttctcctacctggggaagaagacgcagcaggaggcggcgaacaaggcgaaggtggacgtggcggaggagcggatgaagggggaggttggcgccaaggagagggaggggctcacgcggcagaacgcggcgaaggtggacgccgagacgaaggtggtgtctgtccggcagcagggcatcggcctcagggaggaggccaaggtgaaggcggaggtgcaggtgtatgagaatgagagggaggcggagatcgcggcggcgcaggccggccttgcgatgaagaaggccgggtgggagaagcagtccaaggttgcccaggtggaggccgtcaaggccgtcgccattcgcgaggccgagctccagatggaggtggagcgcaagaacgcgctgcgcctcaccgagaagctcaaggccgagcagctcagcaaggccaccgtccagtacgagacacaggtgcaagagtcgaacgcggcgctgtacaacaggcagaaggcggcggacgcgacgctgtacgagcaggtgaagtcggcggaggcgcgcaaggcgcaggcggacgccatgttcttcgagcagaagctggcggaggacgcgaggctgtacgcgaagcagaaggaggcggaggcgctggccatggtgggcaaggccaaggtggagtacgtcacgtccatgctccaggcgctcggcggcgactacggcgcgctccgggactacctcatgatcgacggcggcatgtaccaggagatggcgcgcgtcaacgccagcgcggtgagcggcatgcagcccaagatcagcatctggagcggcgcggacggcgccgccggcgaggccggcgccggcgcgatgcagcaggtggccggcgtgtacaagatgctgccgccgctgctgtcgacggttcacgagcagaccggcatgcagccgccggcgtggatgggctccctgccaaaagacggcgccaactaa

SEQ ID NO: 82397 - DNA, 712 bp, Oryza sativa
  Clone ID: PAT_MRT4530_81830C.1
gcacgaggcctccccctctctctctctcttccgccgcctccgccttgcgccgtctccgcctcccgggcacgccgccgcatccgccttccgctcgcgccgccgctgccgccgtcgtcgcatcggcgtccccgaacgcctcccccaaccctagccgcctccgccgctcacgccctctcctccctgtccctctcccaccgccaccgctccgcgccgccgtccccgcctccgcctcgcgccgccgccgtcgtcatctccgcctccgccgtgcgccgacgtctccgcctccatgtcgcgccgtcgccgtcgtcatctccgtctgcgcgtcgcgccgccgtcgtcgtcatctccacctccgccgtcacatccattgcgtccccgtcgccgcctccacctccgttgcgctccggttcggtcaccgccatcgccgcattgccggatctggcggggggtggtcaaatccgtgtcccccgaccatggaaggggcggcctcgggtggagcaggtcgacgctggccacgaaggtgcaacgcttggatggagcagttcgtgcagccgtcgccatcctcctcctcatccctcgaagccaagggttcggcaagcatcggcgttgcagagtgaggatgtcgagttggtcgccatcaacgactccttcatcaccgctgagtacatgacaagaacaagacgcagcaccgcggagcaagcagagcaagtgt

SEQ ID NO: 82398 - DNA, 1595 bp, Oryza sativa
  Clone ID: PAT_MRT4530_81831C.1
ctacttaacaagcactggtgcactcatcctgattctttttcttttgagtgtgaaagaatacatctttgcctcagaaaaacggcaagagttacaagttttcacttttcagtcgcattgtacatttctaacacctcccctcagcaacaatgctatggcttcaacaactctttgaccagtactctgtatcaaaatagcttaactagctactccatctaaatgaacaggaagcgtcaacaaaatggaggccgggcactatatcatctgtacactgtttgattacctcacaacatcgcctaccaatgtcagtgtacgagaaagcttacagcaacgggtagcttcttgagttaaaaagacaaagattaacaccacaatggcatccctatgaagaactacgctgactctcgcaacctgggcaattgtgcaagctctcatggatgtaaatatcgcaataagggcagaagtgttacttgggcaattttgcacggcgaccatggaggatagattgacatatcaggggtaataaagctttgcttttggacagcgaacatggaggctagattgactatattgactttgcatctaggacatatgtaaccttcagcccccgactttattttcttgtgacaagagcagatggagataagatcctctgctcctctctgcggaaaacccatcttaatcaaattagctgcagcatactcagcaattgcaggtggtggaggagcatgttccagaagcaattccttgaaatgggactcatccagtgcaactgtgtaggatccgccagtctcttcacacagatatttgcagataaaaatctctgcagcaagcccaataaccgaacatcgtattttggatttcttgcattttgctattgtctccatgatatctccaggatcacaggtattcagggccgagtacaaaaataatacttccttgtgaccatatgaaggaacctggtctaaataaccatggacaagctctagagcattctgcagagatggttcaccagaacactcaagcttccccatcaatgctttaatctgtgattcaggactacctccaatctctgtaagtcgatgggaaatcccatctttcattgtcactatccccacatgactcaagggattctggtcaaaaaattcccttatgaatacctcagcatattttgcaacaacagccattcgactaggtcgataatccatctctgaagctgccatggatctaagatctggagctgtgccaaagaggatcttatttactacccgggagagatcgatgacgatgtagaggtagcggatgaggcccttctggatgcgggcggcggcggaggcggcagagcggaggagaaggcggcggcggtactgcgcgtggacgagggtcttggtgtcgatcgggcggaggaggcccgactcgtcctcctgcagcgcctcccatgaccggtcgtccgcgtacgcgcgctcccaggcctcgaggacgcgcccctcgccggactcctcctcctcctcgtcgtcgtcgtcctcgtggttgcgccgccgggccgatgccgtgtagggcgcgttgaagcccccgccgccgccgccgacgccgtacat

SEQ ID NO: 82399 - DNA, 1264 bp, Oryza sativa
  Clone ID: PAT_MRT4530_81832C.1
gtcgacccacgcgtccggtttctccctgtccacttctgtccgattcctcctcacctcttatcgattggacgaccatggcggcgccgcgcgagccggaggtgatccgcgacaaggcggcgatgcgcgcatggtcgcgccgccgtcgcgccgagggcaagaccgtcgcggtcgtacccaccatgggctacctccaccaaggccacctctccctcatctccgccgccgccgccgccgcctccgctgatcccgtcgccatcgtcgtcaccatctacgtcaaccccagccagttcgcgccctcagaggacctcgccacctacccttccgacttcgccggtgacctccgcaagctcgcctccaccggcgtcgtggatgccgtcttcaacccccctgacctctacgtccgtggcgccggtcgccgcggggccggctccggaggcgcgatctcctgcctggaggaggcggccggggatgggcacgagacgtgggttcgggtggagcgattggagaagggattgtgcggggccagccgtcccgtgttcttccgaggcgtggccaccatagtctccaagctgtttaacatcatcgagccggatgttcctgtgttcgggaagaaggattatcagcagtggcgcgtcatcttgccgtattggtcgggacttgattttggcatagagataatgggatcaagaaattgtgcgagaactgatggtcttgccatgaactcccggagccttgacagggaacccctgattgcaaacaaatcaaaatccaaaatagtacagccgctaactgaaactggcggtcaggttgactatgttgagatcgtggagcaagaaagtttggtccctgtagaacagatcgacggccctgtggtcatttgcgttgcggcgtggtttggaaaggtcaggctgatcgataatatcgaaatcgactacgcgatcctgaggttttggggggattcacttgctgtctgctgtgaccttggcattgcgtttgaaataccttttgtttcgcgtgatgattcgcgtcatgtcgtacgctgtaacaatcccagagagaaaatatgcaggagtactctgactgaaggcaaatttataagtacaaactgtagaggcctgatgctgtaacaggggaaatcatgcttgttgattataaaggcaaattaaaaaaaacaaactgtagaggcctgatgctgtaacaggggaaatcatgcttgttgattacagattccgctgaaaaaaaaaaaaaaaaaaagggcggccgc

SEQ ID NO: 82400 - DNA, 998 bp, Oryza sativa
  Clone ID: PAT_MRT4530_81833C.1
gctcgtaaatggcatgtcagggcatgactatgacactgaaagaatacatctttgcctcagaaaaacggcaagagttacaagttttcacttttcagtcgcattgtacatttctaacacctcccctcagcaacaatgctatggcttcaacaactctttgaccagtactctgtatcaaaatagcttaactagctactccatctaaatgaacaggaagcgtcaacaaaatggaggccgggcactatatcatctgtacactgtttgattacctcacaacatcgcctaccaatgtcagtgtacgagaaagcttacagcaacgggtagcttcttgagttaaaaagacaaagattaacaccacaatggcatccctatgaagaactacgctgactctcgcaacctgggcaattgtgcaagctctcatggatgtaaatatcgcaatcaaggcagaagtgttggttgcattttggacagcgaacatggaggctagattgactatcagggttaataaagctttgctggcagccgtaacacttttgtcctcccttttgacctagtctatttgggtgcacggaggacacctcatcaaatggttgtacagggaagagatgatgataggaccttgccagatgtggagagctaactagtgtcagcccgcaagttcgacattctgttggaagctcacatacattgactttgcatctaggacatatgtaaccttcagcccccgactttattttcttgtgacaagagcagatggagataagatcctctgctcctctctgcggaaaacccataaaaatcaaattagctgcagcatactcagcaattgcaggtggtggaggagcatgttccagaagcaattccttgaaatgggactcatccagtgcaactgtgtaggatccgccagtctcttcacacagatatttgcagataaaaatctctgcagcaagcccaataaccgaacatcgtattttggatttcttgcattttgcaaatgtctc

SEQ ID NO: 82401 - DNA, 942 bp, Oryza sativa
  Clone ID: PAT_MRT4530_81834C.1
atggcggcgccgcgcgagccggaggtgatccgcgacaaggcggcgatgcgcgcatggtcgcgccgccgccgcgccgagggcaagaccgtcgcggtcgtacccaccatgggctacctccaccaaggccacctctccctcatctccgccgccgccgccgccgcctccgctgatcccgtcgccatcgtcgtcaccatctacgtcaaccccagccagttcgcgccctcagaggacctcgccacctacccttccgacttcgccggtgacctccgcaagctcgcctccaccggcgtcgtggatgccgtcttcaacccccctgacctctacgtccgtggcgccggtcgccgcggcgccgcctccggaggcgcgatctcctgcctggaggaggcggccggggatgggcacgagacgtgggttcgggtggagcgattggagaaggggatgtgcggggccagccgtcccgtgttcttccgaggcgtggccaccatagtctccaagctgtttaacatcatcgagccggatgttgctgtgttcgggaagaaggattatcagcagtggcgcgtcatctgccgtatggttcgtgatcttgattttgccatagagataataggatcagaaattgtgcgagaagctgatggtcttgccatgagctcccggaatgtgcacctatcacgcgaggagagggaaaaggcattatccatcagtagatcactggttgatgctagaactggcgccttgaagggaaacactgattgcaaacaaatcaaaaacaaaatagtacagacactaactgaaactggcggtcaggttgactatgttgagatcgtggagcaagaaagtttggtccctgtagaacagatcgacggccctgtggtcatttgcgttgcggcgtggtttggaaaggtcaggctgatcgataatatcgaaatcgatacacgatcctga

SEQ ID NO: 82402 - DNA, 576 bp, Oryza sativa
  unsure (1)..(576): unsure at all n locations
  Clone ID: PAT_MRT4530_81835C.1
cagaagcgcaggaagatttctacattgttnccagggttgatncattgatggatggatctatcatggtggatgntcaggagcttgagattcttggagagcttctaaatgcacattttganccagtcaactggggaaagcgaagatctttcaaggttccaagttaaattggaaagagttgatggaaccaaaagaagccctgaatttcccagatagcaggactgcacacatttatggcgttgttcctgctgagagggatacctatcagcctcatattgagtctagtgaatggtattctgggagatggtcatgcaaaggtggtgactggaagcgaattgctgatttcagccaagataagccttcacaggaagaagcttgttcttcaatgaaggctatcctctttgtcaaatgccaaaagggaatcatcttgactatataggatacaggaattgttttgattaactgtaaacaacatgtaattgtgttttcctcccctcccttttttttgagttagccaaagatgaatgaacatatgatacatgggcaaaaaaaacaaaaaaaaaaaaaaaaaaaaaaaaa

SEQ ID NO: 82403 - DNA, 294 bp, Oryza sativa
  Clone ID: PAT_MRT4530_81836C.1
atggcgggggagggggcggcgttggacaagaacggtcccgcccccactctcttgcgtgttcacccggccccggcccggattggagaatgggacgaaattagtcaccatccccggcccctccggggccccgccatccgaccaggttcccgcacacccggtgctagcgacagtcgaaaggagagtagaacaaagtgggaacctgtagccagaaggagagcaagtgaaagacgcgaggagccaacggccggcaggatgggggaaacagcatggagcatcgcatcagagaacctatag

SEQ ID NO: 82404 - DNA, 300 bp, Oryza sativa
  Clone ID: PAT_MRT4530_81837C.1
atggttgatcaagttggaggagcgaaaagggatgaagagaccaccaacctaaggaagtcgtcgtcgtccccgttctcgcggataaaatttcatccatgttgtccagccatgcgtgtccctcagacgcaagatccggaaggatcggtgatgactcaggctgcccacgctgctggacatcctcgacatcgacatctctacaaaggacaacaagtgctcgggatcaaacatgctggggaaaactggagcgacgactgcacacgcaaaatggttgagaacaacaatgttttttataaagcgtga

SEQ ID NO: 82405 - DNA, 1152 bp, Oryza sativa
  Clone ID: PAT_MRT4530_81838C.1
atggctaacaagtacgttttctacacacacaagaaaatacagaggagcaaggacgaatgcagggatattagcacaaaggacctattctgcctgaaatatttgtgcaaatctttctgcttggacgaggcacggaactggggtggaacggctggctatgtcgaccagtactggtgcaagggacaaaggtgcttcttctccaactccaacaacctcctcttcttctccggtacaagtgacaacccaaacacggaggaccgacaaattagggtcccggggtggggtggggatgggaggaggagcgagaagaaaggggaggtcaccgggattagagggatagtcatgggaggcagccgcccagcagtaggtggtagaataggcaaacggcgaggcgccagtggcggcattagagctgcggggatggaggagggcgttgggacacgacaaggagtcgccagagacgaggaagccggcggcggcaggggcatcttgccaccgacagctcaaggagggaggagagggggaggagagctggccagagggcccttgctagcgccgttgatcccttttggccagccggcaaggccatgtggtggcgtgtggggcaaaggcgttggtggaggtggccttgctggtgtggatcaggcgctgatccctcaattactcattgtctctcactggcgcgcgttcaccctaacgggatccttcgtggatattcgttctgcggtatctgccttcccctacggcggtgcatctcccgcgatatgcgagcattttagcaccaaggacctgttctgcatcaagtacctgtgcaggggtttctgccacgacgaggccgtgaacctgcgagggaagcacgcgcgcgtcatgcgtgcctggtgccatggccgcaggtgcaactgcaatgtttgccactgaatatttgccatgaatattcaggttgtcgatcgatccagtcgtctggcttgtgttcaatttaggtccagttattttcaacttattcagtcaactttcacttggggaattcgttgttaggtggttaattagttcggcggcatcatataagccagccgtgtggtcgttttttaggtttgtaacgaataatagttaatattaatatatctagtttattttgtttccaaaaaaaaaaaaaaa

SEQ ID NO: 82406 - DNA, 201 bp, Oryza sativa
  Clone ID: PAT_MRT4530_81839C.1
atggcggtgatggagggtcccaggtgctgccccgttgtggctctatatctgggacatggggcgaggatgccaggccggcgcgagggcagcggggcgtggagggccggccagcgcggcagcggcgcggcgcgcggcgaggcggcgcctactttggcgccttggtcaatagtgaggaccgggactatgctcagggaggagtag

SEQ ID NO: 82407 - DNA, 1335 bp, Oryza sativa
  Clone ID: PAT_MRT4530_8183C.1
tcagatcttgtcaatctcaacagttctacaaaattcagatcggttgtacttcaccacataacgcaacaattgacaccaacctttctcagatatatgacattcaagaatcactcgaggagcagtatttggcaattgtaccaggctgaattttgcaattacagctggccagagtacagtatataggatggcaaggagaaaatcgagcaaagaagtggagttatgtgcccttacaacggagagaacatgcagcttcattttctctgcaagtagggcttgactgattctaaaacaaccgtatatgctatcttcataatcagtgtatgaatttagtaatggttcttcttctcttgtgggtgaaccaggaggactttcaggtcctgagtcatcagtgccaactttagcaaaccacaaattgacagttgaatctgttccagcactcagaatcaactggtcatgctcaggattgtgccgaacagcccatgtccaatgcgaatgcccagggagattcttcagaggatacttaagcattctgagatcccacaaacggataccaaattcatcttctgctgttgtaattaagtgctgtttcttggggttataatccacatcccgaaaatgcgcatgctcaattgcatttgatttcttcatagaacggagatcccagcagtgaagtgaggaatcagtaattgcagcaattgaattgtgatcgtgtggatcccaagatccaccacgtaaattgggaagcatgtcagcagaccccttttgcatcaccttggctgacttatttgatgcatctatattccagaggaaaatatttctgtcatcaatactaattaacttgtcgtgcttccctagtggccaccagagaacacatcttattttgcccgtgtgctcatcaagcgtgaaaagctgctcaagtggcggcgaattcgactgcccgtgcagctccgggatcttccaaacagatgcaccatagccctcgccagacgtgtagactgtggagaagaccctatgatcgaaggggcaagacttaaggtcccagatctcgtttggatggtagaacagcccgtcgcacaccagctcgctctccgccggtgaaaaccggatcaggtgcacctcgttctcctccttgagactgagggttccggcgaggaaggtggtcgacccggcggccgcgcgcacgtcggcgatgcaccgcgctctcccttcacccatgccgtagacgatgccgctagatccgccctgcattctcgctccgtccgtcgccggcgagcaccacggtggtcgacgggcacggagatcgcggaatgcacctcgtgccgaattcctgcagcc

SEQ ID NO: 82408 - DNA, 1920 bp, Oryza sativa
  Clone ID: PAT_MRT4530_81840C.1
tggatccccgggctgcaggaatcggcacgaggatcagcgagcacctagtggtcgcatcgctagctgccatctcctggtgagatccatcgagacgcccggcacgacgacgatggtgtcgcggaggttcaagcccgtggaggagtgcagctcggatgggaggtcggagcagacggtggccgccgacttcgacggcacgctggtcaggtcgcggagcgccttcccgtactacctcctcgtcgcgctcgaggccggcagcgtgctccgcgccgtcgtgctgctgctgtccgtgccgttcgtctacgtgacctacattttcttctccgagtcgctggccatcagcacgctggtgtacatctccgtggcggggctcaaggtgaggaacatcgagatggtggcgcggtcggtgctgcccaagttctacgcggaggacgtgcacccggagagctggagggtgttcaactccttcggcaagcggtacatcatcacggcgagccccaggatcatggtggagcacttcgccaagacgttcctcggcgccgacaaggtggtcgggacggagctggaggtcggcaagaacggcaaggccacggggttcatggtgaagcccggagtgctcgtgggcgaccacaagaggcaggccgtcgtcaaggagctacgcgacgcggtgcccgacgtcggcttgggcgacagggagacggatttcgacttcatgtccatatgcaaggaggcctacctcgtgacatcaaggaagtacagcgcggtgcccaagaaccagctgctgagcccactcatcctccacgacggccgcctcgtgcagcgtccgacgccgctggtggcgctcgtcaccttcctgtggatgccgttcggcttcgtgctcgcgctcctccgcgtgtacgtcaacctgccactcccggagcggatcgtcttctacacctacaagctcatgggcatccgcctcatcgtgaagggcaacccgccgcctccccccaagaagggacatcctggcgtcctcttcgtctgcaaccaccgcaccgtgctcgacccggttgaggtcgccgtggcgctgcgccgcaaggtcagctgcgtcacgtacagcatctccaagttctcggagctcatctcgccgatcaaggccgtcgcgctgtcgcgggagcgcgagaaggacgccgagaacatccggcggctgctggaggagggcgacctggtgatctgccccgagggcaccacctgccgcgagccgttcctgctgcggttcagcgcgctcttcgccgagctcaccgaccgcatcgtgccggtggcgatcaacaccaaggagagcatgttccacggctccaccgtgcggggcttcaagctcatggacccctacttcttcttcatgaacccgcggccgacgtacgagatcaccttcctgaaccagctgcccaaggagctcacttgcagcggcggcaagtcgcccatcgaggtggccaactacatccagaagacgctcagcggccagctcggcttcgagtgcaccgccataacgcgcaaggagaagtacagcatactcgccgggaccgacggccgcgtcccttccaagaacaaggagaaggaaaagaactagcgagtcacagcctcctatcgatcggagtactccgtattcgcccagccgactagtgtcactcatggcttctatccattgtttacgatttattgttgtttttcaagaagttggtaaattacatattgtttccgagaaggatctccttggaaagaattcttttgcacttctttaataggtatcttctagctttaatagatagagatactcatacacatgtttaacgtcaggaggtatctctatattgaagaaaagtacttccattttaaaaaaaaaaaaaaaaaaaaaaaaaaaaaaaaaaaaaaaaaaaaaaaaaaaaa

SEQ ID NO: 82409 - DNA, 465 bp, Oryza sativa
  Clone ID: PAT_MRT4530_81841C.1
gaaaacaccacattattcattatatgcatacaccactatcaagcacaatgcaacagaaacaccgggagacatctactatagtatgaggtaagctagcttatactagtactgagtctccggcaaatatactgaactgctggtactgaacagagcacatggactgtatctgcgcctcatactgtctctccctgttgagacttacgcggcatattcccggctgatgctgatgcttgcccgaagagctcagcttcgacgacagcttgcggaagacatatgttctcacgacgacgcttgtacaagactaatctctgatgaagatcacgactagcattagctaccgggacatagacctgctgtattttttgatcggcaccttcaaagagatgaacaatggtgaacgctcgcgatgtacgaaccataagtgctggtaatacttcatgcccaggctcttcgctcgtggagatt

SEQ ID NO: 82410 - DNA, 3750 bp, Oryza sativa
  Clone ID: PAT_MRT4530_81842C.1
atggcacggggctccgctctgctcgatggtagcgtgctgccgccttcccgcatcgtgagcgagaggcaggccgggctgccgcgccgcttcatgccggaatctgccaccggccgggagatagtcacgctgggcgagggacgcccggcgccatgctacccggggcggtccgtcttcttcctcccttttgcaatggcagggctggttccgccattttcttctttcttcatggatgttctggagttttacgatctccagatggcgcaccttacccccaatgcggtaatgacattggccatcttcgcgcacctttgcgagatgttcatcggggtgcgcccatcccttcggctgttccggtggttcttcaccgtacagccggtgtcgcccccgtcggtggttggtggctgctacttccagccgcgggggccggtgttgaaccgctacattccctgcgtcctccgcaagaagtgggatgactggaagagcgactggttttacactcccctcgccgacgaagcgcgcctccgacttccgagccagcccccggcgcaggcctccggctggcgggcgccggtagatctgggagatggttatgacgccgtcctcgaccgcctggcgggcctgcgatcccaggggctcacaggggccatggtgtacggcgactaccttcgtcgccggattgcgccgctccagcggcgcgcccggggcgcctgggagtacaccgggtccgaagactacatgaggacccaccagggagtcagatgggactgggctcctgaggacttcaagatagtggtccaacgggtgctgaatctcagctccgtggaggcatccctcattccccaaggagtcctccccctctgcagcgatccagatcgcgcctccatcctgaccatcatgcaggcggtcggggcgtcggaggagcgggctcctcgaggccacgatggcgcgggcgggagccgcaggggggaacaatctaccccgggagggggtcgtgcttctgggccccgcgatgggggcccggggagcagccgccctgccgacgcccgggggaagaggaagcaggaaggaacccctcccccatctcctccccgagggggcggggcggcgcgtgccagcagcaggcgcccggagggggccacgccgacgtcgcagcctgagggggagcgaaagaagaagcggctccgcaagatgggggggacagaaccatcccggggaaaccttatttcccctccaaggtggtcgtttaaccgaccccctcgcagcgagatcccgtcgcgtccctcccgccattccaagtccggccagtctgaggccgaggatccggcgaccgcagaggaccggaggcgggaatctgaccggcgagaagccgcggatcgcctacgggaagccgaggaggccgctcgggaggccgcccgggctcgccaggccgaggaagccgctcgggaggaggccggactccgccaggccgaggcgacgacatcctccgagacgacccgtgaaactgaccggcaagaggccgcggatcgccttcgggaagccgaggaagctgcccaggtggccgtccgagctcgccaagctgaagaagccgctcgggaggaagccagacttcgccaggccgaggcgacgacgacttccgaggcagctcgcgacgaggccgcgggcgcatcgcttgggcccactccttcgtgcgacgctcaggccaagccaggtccgggggacatccccgagtccggcacgtccatcggcgggccgagccgcgcggcatcttctccgaggcggttctcccccacgccttccgttgccccactgaacgcagagccccttctgcaggccttggccgtcgcaaacaccacggtgttggacgggttaagtgcccagatggaggccctgcaagcagagcgggcggagctcgatgccgcatgggcgcgtgtcgaagaggggcgacgctcggtggaggccatggtggaggtgggccgcaaggcacaccgccggcacgcctcagagctcgaagcccgtcggaaggtgctgggggaggtcgccaaggaggtggaggaggagcggggggctgccctcatcgccaccaccgtgatgaacgaggcgcaggacaccctccgccttcaatacgggagctgggaggcggagctagggaagaagctcgacgccgcccggggggtccttgacgctgccgtggatagggacctggcgggcggcggagaccgccgttgccatcccggcggcgcgaagaagcccttgaggcccgtgccatggcgctggaagagcgtgcctgcgtcgtggagagggacctggcggaccgcgaggccgccgtctccatccgggaggcaacgctggcggcgcacgaggccgtctgcgccgaagaggagtccgcactccgcctccgcgaggatgcgctcaccgagcgggagcgagctctcgaggaggccgaggccgcggcgcaacggctggcggacagcctgtccctccgcgaggcagcgcgggaggagcaggcgcgccgtaatctggaaggtgccagcgccgagagggccgcactgaaccagcgggcgaaagcgactcgaggcgcaggcaaaggagctggacgcgagggcgcgcagcggcggggcggccgcgggcgaaagcgacttagccacccgcctcgcagctgccgaacacaccatcgccgatcagcagggcgctctagactcgtccgccggggaggtcgaggccctccgcttggcaggcgaggcaggcctctggggcgggaggaccgcaaagtacgccgccaaccaggggggcctcgcccagcgcctctcggagatggccgggactctccaacggctccccgaggagctcgagaggacgattaagtcatcctcgagggacctcgcccgaggagcggtggagctcgtactggcgagttaccaggccagggatcccgacttctccccatggacggcgctggacgagttccctcccgggaccgaggacggcgcgcgcgcgcaggtccgggacgccgccgaccacatcgtccacagcttcgagggttcggcccctcggctcgcgttcgccctcaactccgacgaggaggacgatgacggcggagtgggcggcagtggcgacgaggctggcgacccggctccgcccttccgtttccgccgctcaccgctcgctctcgccgtcggaatcgtgctcgcaccgtgctcctctctctccgccgtcgccgccgagctccgttccgtcgccgtcgtcgctccgctcttcctcccggctcggcgacccctccgtaggcttcgccgcatcgtcgccgaccccgtccgccgctccgcttcgcccgtcgactgccggagcaccgtcgtcatcgtcatcccgagccgcgccgccgtcttcctccgctccggccgccgctctcgtcgtcgtcgttgtcccggggtgagccgaagaccgccgttcgccttcccccttccctcctctctctcgggcgccgctccgccgcgccggtggtcgccggcggtgaccatcggggcgcgggcgcgccgctcccgtcggccgtgccggcgaggccgccctcgggcgcgccctcgcggctgccaagtgggcccggccgtcagccgcccgcgcccgcgggtgcggctgacgcgcgggacccacggcgccgaccgccgccagccgcgtgcgcccggtccaccgtggaccgagcggctgacgcgtgggccccacttcccgtggacccggtccgcgcgcccgcccctcggctga

SEQ ID NO: 82411 - DNA, 141 bp, Oryza sativa
  Clone ID: PAT_MRT4530_81843C.1
atggcgacgaaagtcgtggagaaggggcggcgggctccgacgcccgatgaggaccctagggctggggaccctgggtgcgcggaggatggcgtcgccatgatgatgatccgcgtgcgtcgcgcagggaagaagccggggtag

SEQ ID NO: 82412 - DNA, 2601 bp, Oryza sativa
  Clone ID: PAT_MRT4530_81844C.1
atggcgcacctcacccccaacgcgataatgacgttggccatcttcgtgcacctgtgcgagatgtttatcggggtgcgcccatttctccggctgttccggtggttcttcaccgtacagccggtgtcgccgccgacggcagtcggtggctgctacttccagccgcgggggcaggtgctgaaccgctacattccctgcgtcctccgcaaaaagtgggacgactggaagagcgattggttctacacccccctcgccgacgaagcgcgcctccgacttctgagccagcccccggcgcaggacttcagctggcgggcggcggtagatctgggagacggctacgacgccgttcttgaccgcctggcgggtctgcgatcccaggggctcacgggggccatggtgttcggcgattaccttcgtcgccggatcgcgccactccagcggcgcgcctggggcgcctgggagtacaccgggcccgaggactacatgaggacccaccaggggcgcaaatgggactgggaccctgaggacttcaggatggtggtccaacgggtgctaaatctcagctccgtggaggcatccctcatcccccaaggggtcctccccctctgctgcgatccagagcgcgccaagatcctggccatcatgcaggtggtcggggcgtcgagggagcgggccccccgaggccacgatggcgcgggcgggagccgcaggggggaacaatctaccccgggagggggtcgtgcttctgggccctgcgacgggggccgggggggcagccgccctgccgacgcccgggggaagaggaagcaggagggtacccctcccccatctcctccccgagggggcggggcggtgcatgccagcagcaggcgcccggagggtgccgtgccgacgccgcagccccagggggagcgaaagaagaaacggctccgcaagatggaggggatcgtgccatgccgggggaacctcatctcgcccccgaggtggtcgtttagccgacctccccgcagcgagatcccgtcgcgcccccccccccgccattccaagtccggccggtctgaggccgaggagacggcgaccgcggaggcccggaggcgggaagctgaccggcgagaagccgcggaccgcctccgggaagccgaggaggctgcccaggaggccgtccgggcgacgatgacttccaaggccacccacgacgaggccgcgggcgcgccgctcgggcccgacccctcgggcgacgcttgggacgagccagcttcgggggacgcccccgagtccggcacgtcgatcggcgggccgagccgcgcggcacccacaccgagggggctctcccctctgccttccgctgccccactgagcgcggagcccctcctgcaggccttggccgccgcgaacagcacggtgctggacgggttaagtgcccagatggaggccctgcaggcggagcgggcggagctcgacgcggcgtgggcgcgcgtcgaggaggggcggcgctcggtggaggccatggtggaggcgggccgcaaggcacactgccggcacgtctcacagctcgaggcccgtcgtagggacctggcggagatcgccagggaggtggaggaggagcgggagactgccctcatcgccaccgccgtgctcgacgaggcgcgggacgacctccgcctccaatacgggagccgggcggcggagctagaggagaagctcgacgccgccgctgcccgggaacggcgggcggcggagaacgaggcggcgtcccggcagcgcgaagaggcccttgaggctcgcgccacggcgctggaggagcgcgcccgcgccctggacgcgaaggagagagacctggcggaccgcgaggtcgccgtcgccacccgggaggcaacactggcggcgcacgaggccgcctgcgccgaagaggagtccgcactccgcctccgcgaggacgcgctcaccgagcgggggcgagctctcgaggaggccgaggccgcggcgcagcggctggcggacagcctgttcctccgcgaggcagcgcgggaggagcaggcgcgccgcaatatggaaagcgcccgcgccgagagggccgcactggatcagcgggccgctgagctcgaggcgcgggcgaaggagctggacgcgagagcgcacagcggcggggcggtcgcgggccacggcgacctagccgcccgcctcgcagccgccgaacacaccatcgccgagctgcagggcgcgctggactcgtccgccggggaggtcgaggccctccgcttggcgagcgaggtagggcccggcatgcttcgggacgccgtctcccgtctagaccgcgccgggcggcaggcgggcctctggggcgggcggtacgcgaagtacgccgccaaccaggggggcctcgcccagcgcctctcagagatggccggggccctcgagcggctccccgaggagctcgaggagacgatgcggacgacagcgacgacgaggccgacgacccgggcgcgtcggaggctcgtgcccaggtcccagcctcaaacggcgcgggtcggggctagtgcctggggagatcctcgtgtcgagactggccaggccgggagcgcggtgaccgagggttatggatga

SEQ ID NO: 82413 - DNA, 195 bp, Oryza sativa
  Clone ID: PAT_MRT4530_81845C.1
atgcgggagctgtcgtgcttcggcaacagctcggtcggcatcgccgcggcgcgctgcgccggagccaccggccttgccgtcgccttcgacgacgcgctcttgccgtcgtcgaggcgcgcctaccatgtgctgcacaagaagcgcgggagcaggtccctcgccaccgccgccgacacggccgtgggcgtccactag

SEQ ID NO: 82414 - DNA, 3111 bp, Oryza sativa
  Clone ID: PAT_MRT4530_81846C.1
atggcacggggctccgctctgctcgatggtagcgtgctgccgccttcccgcatcgtgagcgagaggcaggccgggctgccgcgccgcttcatgccggaatctgccaccggccgggagatagtcacgctgggcgagggacgcccggcgccatgctacccggggcggtccgtcttcttcctcccttttgcaatggcagggctggttccgccattttcttctttcttcatggatgttctggagttttacgatctccagatggcgcacctcacccccaacgcggtaatgacattggccatcttcgcgcacctgtgcgagatgttcatcggggtgcgcccatcccttcggctgttccggtggttcttcaccgtacagtcggtgtcgccgccgtcggtggttggtggctgctacttccagccgcgggggccggtgctgaaccgctacatcccctgcgtcctccgcaagaagtgggatgactggaagagcaactggttctacacccccctcgctgacgaagcgcgcctccgacttccgagccagcccccggcgcaggcctccagctggcggacgccggtagatctgggagatggctatgacgccgtcctcgaccgcctggcgggcctgcgatcccaggggctcataggggccatggtgtacggcgactaccttcgtcgccggattgcgccgctccagcggcgcgcccggggcgcctgggagtacaccgggtccgaagactacatgaggacccaccagagggtcagatgggactgggctcctgaggacttcaagatagtggtccaacgggtgctgaatctcagctccgtggaggcatcactcattccccaaggagtcctccccctctgcagcgatccagaccgcgcctccatcctgaccatcatgcaggcggtcggggcgtcggaggagcgggctcctcgaggccacgatggcgcgggcgggagccgcaggggggaacaatctaccccgggagggggtcgtgcttctgggccccgcgacgggggcccggggagcagccgccctgccgatgcccgggggaagaggaagcaggaaggaacccctcccccatctcctccccgagggggcggggcggcgcgtgccagcagcaggcgcccggagggtgccgtgccgacgtcgcagcccgagggggagcggaagaagaaacggctccgcaagatgggggggacagaaccatcccggggaaaccttatttcccctccaaggtggtcgtttaaccgaccccctcgcagcgagatcccgtcgcgtccctcccgccattccaagtccggccagtctgaggccgaggatccggcgaccgcagaggcccggaggcgggaatctgaccggcgagaagccgcggatcgcctacgggaagccgaggaggccgctcgggaggccgcccgggctcgccagaccgaggaagccgctcgggaggaggccggactccggcaggccgaggcgacgacatcctccgaggcgacccgtgaaactgaccggcaagaggccgcggatcgccttcgggaagccgaggaagctacccaggtggccgtccgagctcgccaagctgaagaaaccgctcgggaggaggcaagacttcgccaggccgaggcgatgacgacttccgaggcagctcgcgacgaggccgcgggcgcatcgcttgggcccactccctcgtgcgacgctcaggacaaaccaggtccgggggacatccccgagtccggcacgtccatcggcggaccgagccgcgcggcatcctctccgaggcggctcttccccacgtcttccgttgccccactgagcgcagagccccttctgcaggccttggccgtcgcaaacaccacggtgttggacgggttaagtgcccaggtggaggccctgcaagcagagcgggcggagctcgacgccgcatgggcgcgtgtcgaagaggggcgacgctcggtggaggccatggtggaggtgggccgcaaggcacaccgccggcatgcctcagagctcgaagcccgtcggaaggtgctgggggagattgccaaggaggaggcggagctggggaagaagctcgacgccgcccggggggtccttgacgctgccgctgcccgagaacggcgggcggcggagaccgaggtggcatcccggcggcgcgaagaagcccttgaggcccgtgccatggcgctggaagagcgtgcctgcgtcgtggagagggacctggcggaccgcgaggccgccgttgccatccgggaggcaacgctggcggcgcacgaggccgcctgcgccgaagaggagtccggactccgcctccgcgaggacgcgctcaccgagcgggagcgagctctcgaggaggccgaggccgcggcgcagcggctggcggacagcctgtccctccgcgaggcagcgcgggaggagcaggcgcgccgtaatctggaaggtgcccgcgccgagagggccgcactgaaccagcgggccgctgagctcgaggcgcgggagaaggggctggacgcgagggtgcgcagtggcggggcggccgcgggcgaaagcgacttaaccgcccgcctcgcagctgccgaacacaccatcgccgatctgcagggcgcgctagactcgtccgctggggaggtcgaggccctccgcttggcaggcgaggtagggcccggcatgcttcgggacgccgtctcccgtctagaccgcgccggccggcaggcgggcctctggggcgggcggactgcgaagtacgccgccaaccaggggggcctcgcccagcgcctcttggagatagccgggactctccaacggctccccgaggagctcgagaggacgattaagtcatcctcgagggacctcgcccgaggagcggtggagctcgtactggcgagttaccaagccagggatcccgacttctccccatggacggcgctggacgagttccctcccgggaccgaggatggcgcgcgcgcgcaggtccgggacgccgccgaccatatcgtccacagcttcgagggttcggcccctcggctcgcgttcgccctcaactccgacgaggaggacgatgacggcggagtgggcgacagtggcgacgacgctggcgacccgggtgcatcggagtga

SEQ ID NO: 82415 - DNA, 2987 bp, Oryza sativa
  Clone ID: PAT_MRT4530_81847C.1
atggcacggggctccgcaccgctcgacggtagcgtgctgccgccttcccgcatcgtgagcgagaggcaggccgggctgccgcgccgattcatgccggaatctgccaccggccgggaggtggtcgcgctgggcgagggacgcccgacgccacactacctggggcggtccgtcttcttcctctctttcgcaatggcagggctggtcccgccattctcttcttttttcatggatattctggagttttatgatctccagatggcgcacctcacccccaacgcggtaatgacgttggccatcttcgcgcacctgtgcgagatgttcatcggggtgcgcccatctctctggctgttccggtggttcttcaccgtacagccggtgtcgccgccgtcggtagttggtggctgctacttccagccgcgggggcaggtgctgcaccgctacattccctgcgtcctccgcaagaagtgggacgactggaagagcgattggttctacacccccctcgccgacgaagcgcgcctccgacttccgagccagcccccggcgcaggcctccagctggcgggcgacggtagatctgggaaacggctacgacgccgttcttgaccgcctggcgggtctgcgatcccaggggcttacggggccatggtgttcggcgactaccttcgtcgccggatcgcgccgctccaacggcgcgcccggggcgcctgggagtacaccgggcccgaggactccatgaggacccaccaggggcgcacatgggactgggaccctgaggacttcaggatggtggtccaacgggtgctgaatctcagctccgtggaggcatccctcatcccccaaggagtcctccccctctgctgcgatccagagcgcgccaacatcctgaccatcatgctggcggtcggggcgtcgggggagcgggccctccgaggccacgatggcgcgggcgggagccgcaggggggaacaatctaccccgggagggggtcgtgcttctgggccccgcgacgggggcccggggggcagctgccctgccgacgcccgggggaagaggaagcaggagtgtaccccttccccatctcctccctgagggggcggggcggtgcgtgccagcagcaggcgcccggagggtgccgtgccgacgtcgcagcccgagggggagcgaaagaagaaacggctccgcaagatgggggggaccgagccatgccgggggaacctcatctcgcccccgaggtggtcgtttagccgacctcctcgcagcgagatcccgtcgcgccccctccgccattcccagtccggccggtctgaggccgaggagacggcgaccgcagaggcccggaggcgggaagctgaccggcgagaagccgcggaccgcctccgggaagccgaggaagccgcccaggaggccgtccaggttcgccaggctgaggaagccgctcgggaggaggccagactccgccgggccgaggagtcagtccgggaggcggaggcggcgcacgcacgccaggcggcctgccaagcccccgacccgactccgcccgaggcgacgacgacttccgaggccacccacgacgaggccgcgggcgcaccgctcgggcccgacccctcgggcgacgctcaggacgagccagcttcgggggacgcccccgagtccggcacgtcgatcggcgggccgagccgtgcggcaccctcaccgaggcggccctcccctctgccttccgctaccccaccgagcgcggagcccctcctgcaggccttggccgccgcaaacaccacggtgttggacgggttaagtgcccagatggaggtcctgcaggcggagcgggcggagctcgacgcggcgtgggcacgcgtcgaagaggggcggcgctcggtggaggccatggtggaggcgggccgcaaggcacaccgccggcacgcctcagagctcgaggcccgtcgtagggacctggcggagatcgccagggaggtggaggagcgggagactgccctcatcgtcaccgccgtgctcaacgaggcgcgggacgacctccgcctccaatacggaagccgggcggcggagctagagaagaagctcgacgccgcccggggagtccttgatgctgccgctacccgggaacggcgggcggcggagatcgaggcggcctcccggcagcgcgaagaggcccttgaggctcgcgccacggtgctggaggagcgcgcccgcgcgaaggagagggacctggcggaccgcgaggccaccgtcgccatccgggaggcaacactggcggcgcacgaggccgcctgcgctgaagaggagtccgcactccgcctccgcgaggacgcgctcaccgagcgggaacgagctctcgaggaggccgaggccgcggcgcaacggctggcggacggtctgtccctccgcgaggcagcgtgggaggagcaggcgcgccgtaatctggaagctgccgaacacaccatcgccgatctgcagggcgcgctagactcgtccgccggggaggtcgaggccctccgcttggcaggcgaggtagggcccggcatgcttcgggacgccgtctcccgtctagactgcgccggccggcaggcgggcctctggggcgggcggactgcgaagtatgccgccaaccaggggggcctcgcccagcgcctctcggagatagccgggactctccaacggctccccgaggagctcgagaggacgattaagtcatcctcgagggacctcgcccgaggagtggtggagctcgtactggcgagttaccaagccagggatcccgacttctccccatggacggcgctggacgagttccctcccgggaccgaggacggtgcgcgcgcgcaggtccgggacgccgccgaccatatcgtccacagcttcgagggttcggcccctcggctcgcgttcgccctcaactccgacgaggaggacgatgacggcggagtgggcgacagtggcgacgaggctggcggcccgggtgcattggagtga

SEQ ID NO: 82416 - DNA, 1638 bp, Oryza sativa
  Clone ID: PAT_MRT4530_81848C.1
attaactcaaggaaaggggtcgttccttcttattctggcatgacaaaattcatgtgtatctctgccataatattaaggcactaattattgcagtaaaaagacaaaattatcagaactgagaagctttgatctttcaaaatctacagtatgtatccaaaactaaaccttacaaagataacatgaccaaaaatgcatctatggcgtctctgttaactgtatatgcagtcgtgcagatacctagacttctgatggtgtctttgcatcaatggagagcgcatgcaacccattcttgagctcatcttgcagaagatcatacacagccctgtgcctcttgagcaggctcttcccctgaaacgcctctgagaccacccgaacattaaaatgcgtctcgccattgcttcctgacaccccagcatgacccttatggaggtgcgatatgtcctcgatctggagctgcaccggcgaaagcccgcgctcaaggctctcctttatcctctcctgcctcccaccccccaaaccaccattcccttccatcacatcagctggcatttcctccaattgttcctcctgtgggctatgcacctctgaaccctcttcttctcgcgcaccgaaagccgcaaactcgggttccttctccttcgcagcaggccgttcagcgacctcttggaccacttcttggctgccaatttcctcagtggttacctcaccggtggcaacctccagggccttgcgcttcatgaggctgagcatgttgagcaggccgctgttcctggacggcgagaggctctgcctgatcccaagcagctcgatgaactcgacgggcaccatggcgacatcccgcgccggcgcgccggagaggccgagcacgagcagcgcggcgaggcccttggtgagctgcgcgtcggagtcggcctggaagctgaccctgcccggcgcgccgccctcctccggcgcagcgtggacccagacctgggagacgcatccccggacgcggttggcgtcggtcttgagcgccgggtccatgggcggcagccgcgcggcgtaggcgaggagctgcttgtaccgtgtgcgcgggtccggcacggactggaagagcgccacgatgtcgcgcagcgccgggggaagctgcgccggatcgaccccggagcccgaggcggcggcggcggcggcggcggcggagggggacggggtcggcgacgcgctggacctggcgacgaggcgctggaaggagaccggggcgcagagggtgaggaggtggggcttggagaggaggggcttggggggcttggtgaggaggcgaagggacgccgacgacgaggtggcggcggcggacgccatggatggaggagagggtggcttcccgggtttggaggtcaggcctgggcggcggtgagggcgccgcggcgaggcggcgggggcaacgggaaggcgagcgttcaggatgcggccggtgaacatcaaccggaccgcatatgccaaaagcaaggagtagcaagtgcttccatcgccggagaactctaagatggagacggaggaggaatacgccaccacctccttcgatctccagctcccgggaagcacgaccagcaccgttagcttctcccctctcccgccgcttcccctccccgcctcccccat

SEQ ID NO: 82417 - DNA, 495 bp, Oryza sativa
  Clone ID: PAT_MRT4530_81849C.1
cggtcaggaatttgctctcaggggtgcgacctcaacagcggttctcatgagcactacatattttcatgggaaaaaggaggtgtgcacaatgctgtgctcctgctgtctgcccaccaactgggggtggcgtgacgcacaaaagggcaatgatgcgcgcaatgctgccaaatgaggaatgaggctgtcagaggctgcaaagcatgtaccacgaggagatggagtgtgcgggcgcattgcactgcccctgcccaatgagccaggaggctgacccagaccgtgttgatgaaatggtgggcggaatgcctgcttgaagtgtggccacaatcgcagatgataagatattaatctgaaatgaaaatgaaatgaaaatgaaatgtgccacaccatgtggcttgtggctggctgatggtgactgtaaaagttgcttataatatcagttctgaatgctaaggacatccctcaagatggtctttctaaaaaaaaaaaaaaaaaaaa

SEQ ID NO: 82418 - DNA, 963 bp, Oryza sativa
  Clone ID: PAT_MRT4530_8184C.1
ggaaggaaatttgctcattccctgaatgattttgtaacatacagacgaaatattaatctttgctaaagtaagggaaccactcatacagtgaaaaatcgaatgaaaaacagaagctcagatcttgtcaatctcaacagttctacaaaattcagatcggttgtacttcaccacataacgcaacaattgacaccaacctttctcagatatatgacattcaagaatcactcgaggagcagtatttggcaattgtaccaggctgaattttgcaattacagctggcctgaatcacaagagtggcagatcatatgagacactggatttctgccaagatggttactgaaacattattggcttgctattgttctggggtcacaagctgtcgaatcaggccatcgcatcaactccatgtaccagagtacagtatataggatggcaaggagaaaatctacaacaccaataatatgcacaacaaacaagtaacggagagaacatgcagcttcattttctctgcaagtagggcttgactgattctaaaacaacccttccgtcataagataaagaagcaaataatgacggatcatgggagctccatgcaataccgtatatgctatcttcataatcagtgtatgaatttagtaatggttcttcttctcttgtgggtgaaccaggaggactttcaggtcctgagtcatcagtgccaactttagcaaaccacaaattgacagttgaatctgttccagcactcagaatcaactggtcatgctcaggattgtgccgaacagcccatgtccaatgcgaatgcccagggagattcttcagaggatacttaagcattctgagatcccacaaacggataccaaattcatcttctgctgttgtaattaagtgctgtttcttggggttataatccacatcccgaaaatgcgcatgctcaattgcatttgatttcttcatagaacggag

SEQ ID NO: 82419 - DNA, 2143 bp, Oryza sativa
  unsure (1)..(2143): unsure at all n locations
  Clone ID: PAT_MRT4530_81850C.1
atggatcggacgtctccagcattgatctggcactttggcacacacatggtagatgatcttctccccgtcttatgttgtgtcgtcatccgaggtgcaacagcgatagggtacctttcagttgggccgagcctgatacagctccaggctgaactggccgaaattttccgggacgtcagatgcgaaacgaaaggacaggatcagaactcagaagctgactccaccgaccttccctgccaatgccggtctacagttggagctcttgctgctgcttggaagacttcggacaagaacctaagatcatgtgccattttactggcaagccttgctgattctttcttagcggatcttgatgaactttcagacaatgaagcctatcctgaggaagaaaatgctgaggcagtgggcacggaagagattggtgatgatgatatgcctgacctcgagtctcttaattatgatgaccttgatagtgtttcaaagcttcagaaaacacaacgttacaatgacattatgcaaaaagttgaaaatgcacttcagaaaggtacagatttttccaatcaaaggtcgatcctggaggaagatccagaataccagctgattgttgattgcaatgctctatcagtagatattgagaatgagatcattataatccataatttcatacgtgacaagtataggctgaagtttcctgaactagaatcccttgttcatcatccgatcgattatgctcgtgttgtccagaagattggaaatgagatggatttaacgcttgtagatctggaagggcttttaccttctgcaattataatggtaatttcagtgacagcatcaacgacaagtgggaagccgctttccgaggagaacttggtaaaaactattgaagcatgtgagagagcccttactcttgatgctgcaaagaagaaggtacttgaatttgtagagagcagaatgggttacattgcaccaaacctgtctgccattgttggcagcgctgttgcctcaaagttgatgggaactgctggtggtttgggagcacttgcaaaaatgcctgcttgtaacgttcagttacttggtgctaagaggaaaaatcttgctgggttttctactgccacatctcagtttcgtgttggctatcttgaacaaaccgatgtattccagagtaccccaccagctctgaggactcgtgcttgcagacttatagctgcaaagtcaactctagcagcaaggattgattcgatcagaggtgatccaacaggaaaagctgggcgtaacttgttagaagaaatccgtaagaagattgagaagtggcaagaaccgcctcctgcaaagcttccaaaaccacttcctgttccagactttgagcctaaaaagaagagagggggtcggcggcttcgaaaaatgaaagaaagatatgcacaaactgatatgatgaagcttgctaaccgaatgcagtttggtgtaccagaagagagctcattgggtgatggtttaggggaaggttatggcatgcttggacaggcaggaagtggaaagctacgcgtgtcaactgcaccaagcaaactttctgcaaaaattaccaagaaattcaaggagaagagctatggtagcagtggtgcaacatcggggctgacttctagtttggcgtttacaccagttcaggggatagagttgtcaaatccacaggcccacggcaacctgcttggaagtggaactcagagcacctatttttcagagaccgggacgttctcgaagatcaaaaggacctgagctgataagcaaaagtttcttcttcccatcagcccacagacccgtcataatcctcaggatgcaccgatgaatccattttgtaatgtactccaccttatacccgaattcagcagactttcgtggtgctgtttgcaatctctagaagttcgctaacttccatacggttcaagttaattcgacatgctgcgtttgatctgaaaaaaaaaaaaaagaaaagaccatacaaagatacttgtaggtgagcccgttatctgtcatctcatctttaaagtgtaatccctcttgtttcttacaaggtgctagttttgcgtctagaatttctgaancaaagataagcatcagttgggtcaacnaaaannnaaaacggacgcgtggg

SEQ ID NO: 82420 - DNA, 3187 bp, Oryza sativa
  Clone ID: PAT_MRT4530_81851C.1
atggcacggggctccgcaccgctcgacggtagcgtgctgccgccttcccgcatcgtgagcgagaggcaggctgggctgccgcgccgattcatgccggaatctgccactggccgggaggtggtcgcgctgggcgagggacgcccggcgccacactacccggggcggtccgtcttcttcctctctttcgcaatggcggggctggtcccgccattctctatttttttcatggatattctggagttttatgatctccagatggcgcacctcacccccaacgcgataatgacgttggccatcttcgcgcacctgtgcgagatgtttatcgaggtgcgcccatctctccggctgttccggtggttcttcaccgtacaaccggcgtcgccgccgacggtagtcggtggctgctacttccagccgcgggggcaggtgctgaaccgctacattccttgcgtcctccgcaaaaagtgggacgactggaagagcgattggttctacacccctctcgccgacgaagcgcgcctccgacttccgagccagcccccgtcgcaggcctccagctggcgggcggcggtagatctgggagacggctacgacgccgttcttgaccgcctggcgggtctgcgatcccaggggctcacgggggccatggtgttcggcgactaccttcgtcgccggatcgcgccgctccagcggcgcacccggggcgcctgggagtacaccgggcccgaggactacgtgaggacccatcaggggcgcaaatgggactgggaccctgaggacttcaggatggtggtccaacgggtgctgaatctcagctccgtggaggcatccctcatcccccaaggggtcctccccctttgctgcgatccagagcgcgccagcatcctggccaccatgcaggtggtcggggcgtcgggggagcgggccccccgaggccacgatggcgcgggcgggagccgcaggggggaacaatctaccccgggagggggtcgtgcttctgggccccgcgacgggggcccggggggcagccgccctgccgacgcccgggggaagaggaagcaggagggtacccctcccccatctcctccccgagggggcggggtggtgcgtgccagcagtaggcgcccggagggtgccgtgccgacgccgcagcccgagggggagcgaaagaagaaacggccccgcaagatgggggggaccgagtcatgccgggggaacctcatttcgcccccgaggtggtcgtttagccgacctccccgcaggttcgtccccgcgcccactgcggccgtattcactctcccatttcccaaggcgagttttcactcacccgtttctttttgtcttctggtttttcttctgcctcagcgaaatcccgtcgcgccccccccgccattccaagtccggccggtctgaggccgaggagacggcgaccgcggaggcccggaggcgggaagctgaccggcgagaagccgcagaccgcctccgggaagccgaggaggctgcccaggaggccgtccgggttcgccaggctgaggaggccgctcgggaggaggctagactccgccgggccggggagtccgtccgggaggcagaggcggcgcgcgcacgccaggcggcctgccaagcccccgacccgactccgcccgaggcgacgacgacttccgaggccacccacgacgaggccgcgggcgcgctgctcgggcccgacccctcgggcgacgcttgggacgagccagcttcgggggacgcccccgagtccggcacgtcgatcggcgggccgagccgcgcggcacccacaccgaggcggctctcccctatgccttccgctgccccactgagcgcggagcccctcctgcaggccttggccgccgcgaacaggacggtgctggacgggttaagtgcccagatggaggccctgcaggcggagcgggcggagctcgacgcggcgtgggcgcgcgtcgaggagggccggcgctcggtggaggccatggtggaggcgggccgcaaggcacaccgccggcacgcctcacagctcgaggcccgtcgtagggacctggcggagatcgccagggaggtggaggaggagcgggagactgccctcatcgccaccgccgttctcgacgaggcacgggatgacctccgcctccaatacggaagccgggcggcggagctagaggagaagctcgacgctgcccggggtgtccttgacgccgccgctgcccgtgaacggcgggcggcggagaacgaggcggcgtcccggcagcgcgaagaggcccttgaggctcgcgccacggcgctggaggagcgcgcccgcgccctggacgcgaaggagagagacctggcggaccgcgaggccgccgtcgccacccgggaggcaacactggcggcgcacgaggccgcctgcgccaaagaagggtccgcactccgcctccgcgaggacgcgctcaccgagcgggggcgagctcttgaggaggccgaggccgcggcgcagcggctggcggacagcttgttcctccgcgaggcagcgcgggaggagcaggcgcgccgcaatctggaaggcgcccgcgccgagagggccttactggatgagcgggccgctgaactcgaggcgcgggcgaaggagctggacgcgagagtgcacagcggcggggcggccgcgggccacggcgacctagccgcccgcctcgctgccgccgaacacaccatcgccgagatgcagggcgtgctggactcgtccgccggggaggtcgaggccctccgcttggcgagcgaggtagggcccggcatgcttcgggacgccgtctcccgtctagaccgcgccgggcggcaggcgggcctctggggcgggcggtacgcgaagtacgccgccaaccaggggggcctcgcccagcgcctctcagagatggccggggccctcaagcggctccccgaggagctcgaggagacgatcaagtcatcctcgagggacctcacccgggggggcggtggagctccgctggaagagttccctcccggaaccgaggacggcgcgcgcgcgcaggtctgggacgccgccaaccacatcgtccacagcttcgagggtacggcccctcggctcgcgttcgcgctcgactccgacgaggagggcggtgacgatgctgcggacgacagcgacgacgaggccggcgacccgggcgcgtcggagtga

SEQ ID NO: 82421 - DNA, 552 bp, Oryza sativa
  Clone ID: PAT_MRT4530_81852C.1
agcacaatggttcattgaatagagtagggaaaacccctgaaaagcagtagccaagaaataaaaaaaaaaccactaccacgcatcggcaatacctacacacagccaagagaagattagcactgtacccgctgccgctaagcgtgaccggttaccactagaccaacaaggaagctacatcgagacctcctaacaccaagccatacgcagccaagcaccgaactcaactctagccatacctttgagattgagggggagagagtgacagaaaagaatggatcattctttcctctaaggccagccaacatggccaacttgcaaaaggtaggattgcgccacaagaggacaagatatcttcagaaagcttgcaccagctgtctgagagaatttttggcaaaaggacctcctagatgacatctccacggagaagagcgacgatgagcaatgacaccgctgtccgtcaagatcttcgggagaaccaagacagggtttacacttagtagccccaccaaaagaaggggacgactcgatattgcccaaagagaaaaacgcgct

SEQ ID NO: 82422 - DNA, 3225 bp, Oryza sativa
  Clone ID: PAT_MRT4530_81853C.1
atggcacggggctccgctccgcttgatggtagcgtgctgccgccttcccgcatcgtgagcgagagacaggccgagctgccgcgccgcttcatgccggaatctgccaccggccgggagatagtctcgctgggcgagggatgcccggcgccacgctacccggggcggtccgtcttcttcctcccttttgctatggcagggctggttccgccattttcttctttcttcatggatgttctggagttttacgatctccagatggcgcacctcacccccaacgcggtaatgacattggccatcttcgcgcacctgtgcgagatgttcatcggggtgcgcccatcccttcggctgtttcggtggttcttcactgtacagccggtgtcgccgccgtcggtggttggtggttgctacttccagccgcgggggccggtgctgaaccactacattccctgcgtcctccgcaagaagtgggatgactggaagagcgactggttctatacccccctcgccgacgaagcgcgcctccgacttccgagccagcctccagcgcaggcctccaactggcgggcgccggtagatctgggagatggctacgacgccgtcctcgaccgcctggcgggcctgcgatcccaggggctcacaggggccatggtgttcggcgactatcttcgtcgccggatcgcgccactccagcggcgcgcccggggcgcctgggagtacaccgggtccgaggactgtatgaggacccaccagggggtcagatgggactgggctcctgaggacttcaagatagtggtccaacgggtgctgaatctcagctccgtggaggcatccctcatttctcaaggagtcctccccctctgcagcgatccagaccgtgcctccatcctgaccatcatgcaggcggtcagggcgtcggaggagcgggctcctcgaggccacgatggcgcgggcgggagccgcaggggggaacgatctaccccgggagggggtcgtgcttctgggccccgcgacgggggcccggggagcggccgccctgccgacgcccgggggaagaggaagcaggaaggaacccctcccccatctcctccccgagggggcggggcggcgcgtgccagcagcaggcgcccggagggggccacgccgacgtcgcagcccgaggggagcggaagaagaaacggccccgcaagatgggggggacagaaccatcccggggaaaccttatttcccctccaaggtggtcgtttaaccgaccccctcgcagcgagatcccgtcgcgtccctcccgccattccaagtccggccagtctgaggccgaggacccggcgaccacaaaggctcggaggcgggaatctgaccggcgagaagccgcggatcgcctacggtaagccgaggaggccgcccaggtggccgtccgagctcgccaagctgaagaagccgctcgggaggaggccagacttcgccaggccgaggcgacgacatcctccgaggcgacccgtgaaactgaccggcaagaggccgcggatcgccttcgagaagccgaggaagctgctcaggtggccgtccgagctcgccaagctgaagaagccgctcgggaggaggccagacttcgccaggccgaggcgacgacatcctccgaggcgacccgtgaaactgaccggcaagaggccgcggattgccttcgagaagccgaggaagctgctcaggtggccgtccgagctcgccaagctgaagaagccgctcgggaggaggccagacttcgccaggccgaggcgacgacgacttccgaagcagctcgcgacgaggccgcgggcgcatcgcttgggcccactcactcgtgcgacgctcaggacaaaccaggccttggccgtcgctaacaccacggtgttggacgggttaagtgcccagatggaggccttgcaagcagagcgggtggagctcgacgccgcatgggcacgtgtcaaagaggggcgtcgctcggtggaggccatggtggaggtgggccgcaaggcacaccgccggcacgtctcagagctcgaagcccgtcggaaggtgctgggggagatcgccaaggaggtggaggaggagcggggggctgccctcatcgccaccactgtgatgaacgaggcgcaggacaccctccgccttcaatacgggagctgggaggcggagctagggaaaaagctcgacgccgcccggggggtccttgatgctgccactgcccgagaacggcgggcggcggagaccgaggcggcgtctcggcggcgcgaagaggccctcgaggctcgtgccatggcgctggaagagcgcgccggcgtcgtggagagggacctggtggaccgcgaggccgccgttgccatccgggaggcaacgctggcggcgcacgaggccgcctgcgccgaagaggagtccgcgctccgcctccgcgaggacgcgctcaccgagcgggagcgagctctcgaggaggccgaggccgcggcgcaacgtctggcggacagcctgtccctccgtgaggcagtgcgggaggagcaggcgcgccgtaatctggaaggtgcccgcgccgagagggccgcgctgaaccagcgggccgctgagctcgaggcgcgggagaaggagctggacgcgagggcgcgcagcggcggggcggccgcgggcgaaagcgacttaaccgcccgcctcgcagctgccgaacacaccatcgccgatctgcagggcgcgctagactcgtccgccggggaggtcgaggccctccgcttggcaggcgaggtagggcccggcatgcttcgggacgccgtctcccgtctagtccgcgccgggcggcaggcgggtctctggggcgggcggactgtgaagtacgccgccaaccaggggggcctcgcccagcgcttctcggagatggccgggactctccagcggctccccgaggagctcgaggggacgattaagtcatcctcgagggacctcgcccgaggagcggtggagctcgtactggcgagttaccaggccagggaccccgacttctccccatggacggcgctggacgagttccctcccgggaccgaggacggcgcgcgcgcgcaggtccgggatgccgccgaccatatcgtccacagcttcgagggttcggcccctcggctcgcgttcgccctcaactccgacgaggagggcgatgacggcggtgtgggcgacagtggcgacgaggctggcgacccgggtgcatcggagtga

SEQ ID NO: 82423 - DNA, 3048 bp, Oryza sativa
  Clone ID: PAT_MRT4530_81854C.1
atggcacggggctccgctccgcttgacggtagcgtgctgccgccttcccgcatcgtgagcgagagacaggccgggctgccgcgccgcttcatgccggaatctgccaccggccgggagatagtctcgctgggcgagggatgcccggcgccacgctactcggggcggtccgtcttcttcctcccttttgctatggcagggctggttccgccattttcttctttcttcatggatgttctggagttttacaatctccagatggcgcacctcacccccaacgcggtaatgacattggccatcttcgcgcacctgtgcgagatgttcatcggggtgcgcccatcccttcggctgttccggtggttcttcaccgcacagccggtgtcgccgccgtcggtggttggtggctgctacttccagccgcgggggccggtgctgaaccgctacattccctgcgtcctccgcaagaagtgggatgactggaagagcgactggttctacacccccctcgccgacgaagcgcgcctccgacttccgagccagcctccagcgcaggcctccaactggcgggcgccggtagatctgggagatggctacgacgccgtcctcgaccgcctggcgggcctgcgatcccaagggctcacaggggccatggtgttcggtgactatcttcgtcgccggatcgcgccactccagcggcgcgcccggggcgcctgggagtacaccgggtccgaggactgtatgaggacccaccagggagtcagatgggactgggctcctgaggacttcaagatagtggtccaacgggtgctgaatctcagctccgtggaggcatccctcattcctcaaggagtcctccccctctgcagcgatccagaccgcgcctccatcctgaccatcatgcaggcggtcggggcgtcggaggagcgggctcctcgaggccacgatggcgcgggcgggagccgcaggggggaacaatctaccccgggagggggtcgtgcttctgggccccgcgacgggggcccagggagcggccgccctgccgacgcccgggggaagaggaagcaggaaggaacccctcccccatctcctccccgagggggcggggcggcgcgtgccagcagcaggcgcccggagggggccacgccgacgtcgcagcccgagggggagcggaagaagaaatggccccgcaagatgggggggacagaaccatcccggggaaaccttatttcccctccaaggtggtcgtttaaccgaccccctcgcagcgagatcccgtcgcgtccctcccgccattccaagtccggccagtccgaggccgaggacccggcgaccgcagaggcccggaggcgggaatctgaccagcgagaagccgcggatcaccttcgggaagccgaggaggccgctcgggaggccgcccgggctcgccagaccgaggaagccgctcgggaggaggctagacttcgccaggccgaggcgatgacgacttccgaagcagctcgcgacgaggccgcgggcgcatcgcttgggcccactccctcgtgcgacgctcaggacaaaccaggtccgggggacatccccgagtccggcacgtccatcggcgggccaagccgcgcggcatcctcttcgaggcggctcttccccacgccttccgctggtccactgagcgcagaaccccttctgcaggccttggccgtcgcaaacaccacggtgttggacgggttaagtgcccagatggaggccttgcaagcagagcgggtggagctcgacgccgcatgggcacgtgtcgaagaggggcgtcgctcggtggaggccatggtggaggtgggccgcaaggcacaccgccggcacgtctcagagctcgaagcccgtcggaaggtgctgggggagatcgccaaggaggtggaggaggagcggggggctgccctcatcgccaccactgtgatgaacgaggcgcaggacaccctccgccttcaatacgggagctgggaggcggagctagggaaaaagctcgacgccgcccggggggtccttgacgctgccgctgcccgagaacggcgggcggcggagaccgaggtggcatcccggcggcgcgaagaagcccttgaggcccgtgccatggcgctggaagagtgtgcctgcgccgtggagagggacctggcggatcgcgaggccgccgttgctattcgggaggtcacactagcggtgcacgaagccgcctgtgccgaagaagagtccgcgctccgcctccgcgaggacgcgctcaccgagcgggagcgagctctcgaggaggccgaggccgcggcgcaacggctggcggacagcctgtccctccgcgaggctgcgcaagaggaacaagcgcgctgtaatctggaaggtgcccgcgccgagagggccgcgctgaaccagcgggccgctgagctcgaggcgcgggagaaggagctggacgcgagggcgcgcagcggcggggcggccgcgggcgaaagcgacttaaccgcccgcctcgcagctgccgaacacaccatcgccgatctgcagggcgcgctagactcgtccgccggggaggtcgaggccctccgcttggcaggcgaggtagggcccggcatgcttcgggacgccgtctcccgtctagaccgcgccggccggcaggcgggcctctggagcgggcggactgcgaagtacgccgccaaccaggggggcctcgcccagcgcctctcggagatagccgggactctccaacggctccccgaggagctcgagaggacgattaagtcatcctcgagggacctcgcccgaggagcggtggagctcgtactggcgagttaccaagccagggatcccgacttctccccatggacggcgctggacgagttccctcccgggaccgaggatggcgcgcgcgcgcaggtccgggacgccgccgaccatatcgtccacagcttcgagggttcggcccctcggctcgcgttcgccctcaactccgacgaggaggacgatgacgtcggagtgggcgacagtggcgacgaggctggcgacccgggtgcatcggagtga

SEQ ID NO: 82424 - DNA, 1479 bp, Oryza sativa
  Clone ID: PAT_MRT4530_81855C.1
actgtgaacctcagattatatattaaaccaaaataggaaatggatgtgcattataagttcatagacctaaatgacaccctagtccaagtttaagtactggtcatatatttccctctctttttttccagctttaagatagaactatccgccgttcgtaacagcctgaaattgctggtttaagaggacacatgacacaacttaactagctactgttacaacaaaattttcatctttgacttaatcaagagtagctcccttcactcatcaccttccacacgccaccaaccagtaacttacccttcagactttcagaggaaaggtcacttctgacatatctgaaatctcacgttcagatattgccggaatgcattcaacatccaattgcttctcaggatgagaatgatagccagccctttcagtatggtcatcaagctcaaaatttacatgttgctccaatgtgtcatctttcaattcatgatcgatgacatcaagtgtcggaagaacagccgttgaactaaatgagcatggtaccattcctatcgcacagggggtccaagactttgttatagaccatctgctacgtttctccaacaagattgtgttcaatgatcccccgttgccattttctgccaaacatacatccttctgtttcaactgtgacttgaacatttccagcttctctgttgccctgtcagctgattctatttctttggaggactccgtgaggatagaaattctagccaactttcccagggataacataagaagcttcctcagtttctctttcacattattgctggccatctcaaacagcagtagtgctgcatctatgagacatctttcacctatagtggacaaactcaacttctgcagaagttttgctggacaggaacattggactacatttctgtctgaagagagcactcctatctcgtgaacaagtccaatgcagcctgaatcctttatttcttttatatttgtcacaagccacagaacaagggaatataaatttccatttttgctcatgattgccatactacacagcatcgccgacatctcttcagactccagcggatcatccacagccatcacattccgggaagaagaagggattccgattcccgcagccgtatctcgacgaacgccgcggccacatctacggcgaccgggagggcgcccctgctccgccacgccgcgattttgggagtgcgcatgagtcgctgcattgtggggcccggtttccagtctcagagtcagaggcaagagaaccgcaaaacacaggacgcgctccgctcctctgccgccgccgccggagctctcacctccaggggctctcgccacgagccgccggagctcaacccgtgccgccgcacgggcgccggcggacggctggaggccgctgctgcatccttctaccgcccgcattgcttttgctccctcctcctcggctcctccctgtccaaacaccggcagtcgtag

SEQ ID NO: 82425 - DNA, 1667 bp, Oryza sativa
  Clone ID: PAT_MRT4530_81856C.1
gacgggagcctcgaccaggggagaggaggccggcggcggggtggccttggccttgggcggcggcacgggcgccttggtgggtggcgcggtggccggagccggggtggtgggtgccgaggcgggggccggggtggcggggggtggtcggcgcggcggcgggcttcttcttggaggagaccggtggtgtggtggtcggctccacccgccgtaccgggaatccatctcggaggagctcctcgagaacattgtctcccgcatctccttaccttgaaagtgttacctttgttgtctcgttgtgtgatggctccatgtgatgaagtgtcgacgacggtatatgggcccatccatttacttcgaagttttccatgtccgaaaagcttcacccgtgagttgaacaactgcactttgtcctctgctttgaacaccttgtgcttgctctgtctatcatgccatcttttggttttgtccttatagatcttggcattatggtaggacttgtccctccattcctccagcttagagagctacatcttcctgagctgtccagctccctttaggtccatattccaagtccggatagcccagtgcgccctgtgttccaactctactagtaggtgacaagtcttcccgtagacaagttggtatggtgacatgataatgggtgccttataagcagtcctatatgcccaaagcgcatcaggtagcttgttcttccatgccttccccattttattgacagtcttctacagaatattcttaatttgtttgttgcatgtttctatctgcccacttgtctggggatgatatggagtggcaatgttgtgttgagcctcaagctcttgcaaaaagcttcggaaggtcttatcgatgaaatgagaccctccgtcacttatcaccatggacacatagtcagcggccaccatactcgtactcataggactttgggaaaggttccatgaggtcgatgccccatacatcaaataactcgacttgaaggttgtatgtcagtggcatcgcatctagagtagtaatccccctatgcttctggcaccttgtgcatcttcgaacgaatttctttgggtcatcatacattgttgtctaaaagaatccactctgccagatctttgcatgtgtcctgaatgctccatagtgatctccatatggggcagcatgacacttttcaatgattttcatgccttcgtctgccggaacgcatctccgtagtacgccatctgaacagactctgtaaaggtaaggtgcatcccacaagttccagcggctctcgtagatcaacctcttcttattttctcccagtgttacatgccccgcgaccatgaagttgatgatggttacataccacgggtcggagtctgtgactttcaagtttcaacagcatgtcatctcgtagatagtcatttatcggtagctcttgcatgttagtgatttgcatacgcgacaaatgatctgcaacaaaattctccactcccttttttatccttaatttcgatgttaaattcttggagttgaagaatccacctaattagccgaggttttgcatattttttagtgagcgggtattttagtgcagcatggttagtgtaaactattaccttagctcccactaaatatgacctgaacttatcaatgacaaacactacagctaggag

SEQ ID NO: 82426 - DNA, 2871 bp, Oryza sativa
  Clone ID: PAT_MRT4530_81857C.1
atggcacggggctccgcaccgctcgacggtagcgtgctgccgccttcccgcatcgtgagcgagaggcaggccgggctgccgcgccgattcatgccggaatctgccgccggccgggaggtggtcgcactgggtgagggacgcccggcgccacactacccggggcggtccgtcttcttcctctctttcgcaatggcaggactggtcccgccattctcttctttcttcatggatgttctggagctttacgatctccagatggcgcacctcacccccaacgtggtaatgacgttggccatcttcgcgcacctgtgcgagatgttcatcggggtgcgcccatctctccggctgttccggtggttcttcaccgtacagccggtgtcgccgccgtcggtagtcggtggctgctacttccagccgcgggggccggtgctgaaccgctacattccctgcgtcctccgcaagaagtgggacgactggaagagcgactgctacgacgccgttcttgaccgcctggcaggtctgcgatcccaggggctcacgggggccatggtgtacggcgactaccttcatcgccgggtcgcgccgctccagcggcgcgcccggggcgcctgggagtacaccgggtccgaggactacatgaggacccaccaggggggcagatgggactgggcccctgaggacttcaagatggtggtccaacgagtgctgaatctcagctccgtggaggcatccctcatcccccaaggagtcctccccctctgcagcgatccagattgcgccaacatcctgaccatcatgcaggcggtcggggcgtcggaggaacgggctcctcgaggtcacgatggcgcgggcgggagccgcaggggggaacaatctaccccgggagggggtcgtgcttctgggccccacgatgggggcctggggtgcagccgtcctgccgacgcccgggggaagaggaagcaggagggtaccccttccccatctcctccccgagggggcggggcggcgcgtgccagcagcaggcgcccggagggtgccgtgccgacgtcgcagcccgagggggagcgaaagaagaagcggctccgcaagatgagggagaccgaaccatgccggggaaaccttatctccccccaaggtggtcgtttagccgacctcctcgcaggttcgtccccgcgcccactgcggccgtattcattctcccatctcccaaggcaagctgaggaaaccgctcgggaggaggccaaactccgccgggccgaggagtccgtccgggaggcggaggtggcgcgcgcacgccaagcggcctgccaagcccccgacccgactccgcccgaggcgacgatgacttccgaggccacccacgacgaggtcgcgggtgcaccgctcgggcccgacccctcgggcgacgtttgggacgtgccagcttcgggggacgcccctgggtccggcacgtcgatcggcgggccgagccgcgcggcgcccataccgagacggctctcccctctgccttccgctgccctactgaaagcggagcccctcctgcaggccttagccgtcgcgaacaccacggtgctggacgggctaggtgcccagatggaggtcctgcaggcagagcgaacggagctcgacgcggcgtgggtgcgcgtcgaggaggggcggcgctcggtggaagccatggtggaggcgggccgcaaggcacatcgccggcacgcctcagagctcgaggcccgtcggagggagctggcggagatcgccagggaggtggaggaggagcgggagactgccctcatcgccaccgccatgctcaacgaggcgcgggacgatctccgcctccaatacgggagccgggcggcggagctagagaagaaactcgacgccgcccgaggagtccttgacgccgccgctgcacgggaacggcgggcggcggagaacgaggcggcgtcccggcggcgcgaagaggcccttgaagctcgcgccaaggcgctggaagagcgcgcccgcgcgagggagagggacctggcggaccgcgaggccgcctgcgccgaagaggagtccacactccgcctccgcgaggacgcgctcaccgagcgggagcgagctctcgaggaggccgaggccgcggtgcagcggctggcggacagcctgtccctccgcgaggcagcgcgggaggagcaggcgcgccgtaatctggaagacgcccgcgccgagagggccgcactggatcagcgggccgctgagctcaaggcgcgggtgaaggagctggacgcgagggcgcgcagcgacagggcggccgcgggcgacggcgacctagccgcccgcctcgcagctgccgaacacaccatcgccgatctgcagggtgcgttggactcgtccgccggggaggtcgaggccctccgcttggcaggcgaggtagggcccggcatgcttcgggacgccgtctcccgtctagaccgcgccgggtggcaagcgggcctctggggcggacggactgcgaagtataccgccaaccaggggggcctcgcccagcgcctctcagagatggccgggaccctccagcggctccccgaggagctcgaggagacgatcaagtcatcctcgagggacctcgcccggggggcggtggagctcgtactggcaagctaccaggccagggacccggacttctccccgtgggcagcgctggacgagtttcctcccgggaccgaggacgacgcgcgcgcgcaggtccgggacgctgccgaccacatcgtccacagcttcgagggtacggccccccggctcgcgttcgccctcgactccgacgaagagggcggtgacggcggtgcgggcgacagcggcgatgaggccggcgacccgggcgtgtcggaatga

SEQ ID NO: 82427 - DNA, 6258 bp, Oryza sativa
  unsure (1)..(6258): unsure at all n locations
  Clone ID: PAT_MRT4530_81858C.1
agcataaaatcgacgaaggtgttcaatattccaagaattgttgaggagagtaccgtcttcgcgcttgagtcgataagaacctggccgagtgacttcagcaattatgaacggtccttcccatgagggagataatttatgccgatcctgtgttgtttgaattttcctcagaaccaggtcgccgactaaaaaggctcgcgatcgaacattccgattatgataacggcgcaacccttgcaaatattgagtcgactgaattaaagctgcttctcgggcttcttctagtcggttgatgtcgtctactcggccctcttcatagccctcctcgttgaagttccgaaatcgtagtgattcaaattccacttcacttggcaacattgcttctgcgccataaaccaaaaaaaacggcgactggccggtagcccgactaggagtagtgcgtaaagaccaaagtacggacggcagctgatctacccacttgccagcatagggacgtagtcggtcaaaaactcatgctttgatcccttgcagtatcatgccgttagcacgctcgacttgtccgttactcatagggtgtgccacggaggcgtaacaaattttaatgccgaagtctttacaaaagtctttaaatgctccgccagtgaattgagtgccattatcagtgatgatccgattaggtaccccaacccgatgcacaatgttgatgaaaaaatctcaggctttatctgctgtgatcgtgatgaccggtttagcctcaatccacttggagaatttgttgatagccacaaagagatgcgtgtaaccgccgactgcccttttaaacgggctgaccatgtcaagcccccagaccgcanatggccgggacaacgggatggtttgcaactcttgggcttgccggtaagctttgccgacaatggtccgtgcagtggcatggttaccacaaataccagaatgtatatccttcaacaactgtctcccttcttccaaagacacacagcgctgcagtattcctgacggacttttcttgtacagctcaatctcatgaataatgtaaagtctgctgcgcctggaaatacgctcggcttcatttttgtcttgaggtagttcttgtttgctcaaaaattttataaacggttctctccagtcggcttcgatcatgcttacgccttgaatatccatggcttcgactgtctcttttctgggcatggtcggttcgtagaggtgttcgacaaacacatctgaaggagctgcttcccgttttgaaccaaaattggccagtctgtcggctgcctcattgttatgtcggaggacatgggtgagctcaagtccatcgaatttattttccaacttgcgtacctcttgtcgataagcggtcatattatcatctagacatgaccactctttcatgacttgattgacaaccagctgagagtctccacggatgattagtcggtgaatacctagagatattgcaatccttagtccatggagtagcgcctcgtattccgccacgttatgggacgcagaaaaatgtatccacaatacgtagctcaatctttctccagtcggggagattaaaacaaccccagctccagtgcctgtaagcctcttcgacccatcaaaatgcatagtccaatattccatcttttcctctggcatgtcttcttggcactcggtccactcggcaaggaaatcagctaaagcttgtgacttgatcgaagttcgtggcttgaatgatatgtccaaagacatcaattctaaggcccatttcgcgatccgtccgtttgcttcgtggttatgaagtatatccccgagtggaaacgatgtgactaccgtgaccgggtgactttgaaagtagtgagataatttcctgacggtaattaagacaccatatagtaacttttgaacttgaggatatcttgtcttggagtcggctaaaacaacctgggaggtcgccgacacatataacagtagcggctcttgtggatgtggcgaggccaaaactggtggagtggtgagaagtttcttgaagtcttcaaaggctttctgtgcttcgggtccccactggaaattgtcagtcttcttcagcagcttgaagaaaggcatcccccgctcgccgagtcgtgagacgaaccggctgagcgccgccatgcaactagtcagcttttggacgtctttttgggagcttggcggtttcatgttgaggatggcgttgattttctccgggttggcctgtatgcctctttgagataccataaattcgagcaatttccctgatggtactccaaagatgcacttttccgggtttagtttcatcttgaaagcacgaatgcttataaaagtttcttctaaatccgcaatcaggtcatccttctgcttggtcttgacgactacatcatcaacataagcttcaacattgcgaccgatctggtcaatgcgaggtaacccaaaagggtctttgggacatgatttgttgaggtcggtataatcgacacacatgcgccattgttccatctttttccgaaccaggactgggttagccagccagtcgggacgaaggacttccttaatgaagcctgctgctaacagcttggttaattcctccttgatcgcatccttcctgttctgtgcaaaacggcggagtcgttgcttgatgggtttggtgtcttccttaacatgtaaagagtgctcaatcacctctctggggatacaaggcatatcggatggtttccacgaaaaaatatctttattattcaccccgggtggaccactcggtcgggatgatccgagcggtcgaacttttgctatctctgaccaccgaagatattggggcgtgttaggctgaaccgcattgatctcccgttctgttagcttctgttttctcttagattcataagccaggggtccgccgaagatgtgattaagttctttgcgatgatgtgcgttcttaacgtattgctccgcgaactgtttgtagacgaagcaatctttggccacgtggttggagttgggatgatgcgggcattgggagttcattatcttgtcgaaggtgttgacacgggaatgttgtcgggaagacggagaggtggtcgccacaagttcttcgggcttacgcttgcgatccttgtggttgttacttccactccctcctgcggtcggcgtatccttctttggcttccaagtggtgcccgactgcttggacgctgtgatagcatcttcggctttagcatactcattggctttttcaaacatctgtttgaccgtcttgggaggtttgtgtccgaacttgccgactaggtcctcgtggagaatgcctttagtaaaggcggcggtgatgacatcgtcggtgatgtcggagatcttgttgcgttgctcagagaagcgtcgaatgtaatctcgaagaaattctctagacttctgaacgatgttgtagagatcgaagtgtgtaccgggccgttcaaaagtaccttggaagttggcgatgaagtggtcgcgtagctctgcccatgatccgatcgtgccgcggggtagcccgtgaagccatgaccaggcagaatccgctagggccacaggtagatagttcgccatggctttgctgtctcctcctgctgcgcggattgcgagaccatagacagtgagccaagactcagggttggcggtaccgtcatatttctcgattccagtcggcttaaagccggatggccaatccactcgacgcagatcgcttgtgaaggcagcaactccgtccacgtcgtcgtcgtagcgatccggtgaatgatggcctcttgctgcacggcgctggttgatagtgtcacgaagagcgatggggcgtcttcgatgtggggcgtgtggtcgttcaactcggctctccctatatcgctcgggaggcgagcgaacggactgttcatcatgtcccctgctcctgcgactagattcggcgccagcaatgctgaggcttggctggtgatagtcagtcggggtgcgggtgcttgcggagttggctggaaccgaggcagcgatcatggtcttcgtctggttcaagatgttgactacatgatcagcttggttcgcctccttaagggagttggcaagggcctccgtctccaaatttttgcggcccagttcgtcatccttggcccgaagacggcttttgaacccatcaagtcgagctcgcacggttcgctccgttgagcagtgagccgcgaggatccgaacagccaggctttttatagcagagcacccctcgtcgaactcattcagttcggtgaacaagctcggggcgctggcgggcagtacaagattgcttaccccctccacaaaatgaaggaggtccgctcgcgtctcgaagtcgccaggggcgaagcggggtacccaaagcgaatattccgaagcggacgtctcagcgaccgctctctttcccttcgcctccatcagcggcgatgcaaccggctgatgcggaggactgccgaatactttcgccgcggccgtcacaatcctttccgcagaagccgaagccccagcggcggtactaccgtccactccagcggcgccaagtggaggaatgggggcggccaaaagatccaggctgcgaccagcgggcgaagtcggagccccgtcggaggactcgtcgtcgctaaaaacgcgagcgacatcgacgagtcctttctttctagccacctttttgacaggacctcccttcgccgccgcgcccgaagagaacgcaactagggccttcgccccttccaaatccttccgacgaaggggggagctgttcgactccaccccggtttcgttgtgaccaggacctggggtacaagccccgtcggaggactcgtcgtcgctaaaaacgcgagcgacatcgacgagtcctttctttctagccacctttttgacaggacctcccttcgccgccgcgcccgaagagaacgcaactagggccttcgccccttccaaatccttccgacgaaggggggagctgttcgactccaccccggtttcgttgtgaccaggacctggggtaggagtgtacccgggggtgtcggcgcggtcttcgactgcctcacccgtggccttatcagccacagcctccacctcctcctcttcctctctttcctcctcgccgtcatgttcttcggcatcatcctcgtcatcggcgtcggagtcagacgaaggaggaacccttcgcttcttaggggcaagcttcacttgtccacgcatccgcttttgcgaaggccctgcctcgtcgtcggccttttggggattcgcccggggaggcagttcgccattgtaaacccagttcgcccgcccagccgcttgacgcgttaacagctgactatactcaacgaccgaaacatcgccgatcatcctgcgggcttcggcttcggcctggtcgagggtcaacactgtaaaagtagagcgtgaagtgtttgccccctcaggaagtatcaggttcggcaaaccgtcgacttcttcgccttgttcaaccgcgacttgccatgactgggagaggggaaaaatgcgaagcatacaaaattcctccaccaagtcacggcagctaaggcgggagcaaaccttccgcagtagaacgaaccgcgcctccatggcgccgtccacagcgatattgggtctccggttcggcgcaatcgccctatgccggcaccgaagggctttcgctaattcagaaccagcctcgaaggggatggtgtggtagaaccaccttgccatccaatggcggtcccacttcgacatagcagcgttcaccgggcagagatcggaccactcggggcgaacgttgaagttcacgctctcgaacacgttttttttcgttccagccagggtaatcaccgtcttcgagttcatggtggcgaaaaatatggcgccaaagagctcggcgttgggctcaaacccggaagtccggcacgcccagtcgaagatagcgatccgaacaagcgctgacgggctcagctgcggaagttccacctggaagaggcgaaggatctccggcaacaacacgttgcagggaaaccgtagccctgcctcaaaaaatacggcgaacaccaccgtccggttgtcgacaggcttcggcaccacggttttccctggggcgaaagcctgcccctcaaacaacgctccggagctgaccagcttcgccagcttgatgtcgtccacaagagagacccctagaaaggcggtgctgtcgtcatcgactcggccgggatctggccctttcgccgaagtagggtttggcctacgtggggccat

SEQ ID NO: 82428 - DNA, 3132 bp, Oryza sativa
  Clone ID: PAT_MRT4530_81859C.1
atggcatggggctctgctctgctcgacggcagtgtactgccgccttcccgcatcgtgaatgagaggcacgccggactgccgcgccgcttcatgccggagtccgccaccggtcgggagattgtgatgctgggcgaggggcgcccggcatcagactacccggggcggtccatcttcttcctccccttcgcaatggctgggctggtcccgccattttctcatttcttcatggatgtcctggagttctacgatctccagatggcgcacctcacccctaatgcggcgatgacattggccatcttcgcacacctgtgcgagatgttcattggggtgcgcccctctcttcagctgttccggtggttcttcaccgtgcagtcggtgtcaccgccatcggtggttggcggctgctacttccagccacgggggccggtgttgaaccgctacatcccctgcgtcctccgcaagaagtgggacgactggaagagcgactggttctacacccccctcgccgacgaagcgcgcctccgacttccgagccagcccccggcgcaggtctccagctggcgggcgccggtagatctgggggaggagtacgacaccgtcctcgaccgcctggcgggcctgcgatcccaggggctcaccggggccatggtgtacggcgattacctccgtcgccggattgcgccgctccaacggcgcgcccggagcgcttgggagtacactgggcctgaagattacatgcggacccatcagggaaccagatgggattgggctcctgaggacttcaagatcgtagtccaaagggtgcttaatcttagctccgcggaggcgtctcgccttcctcaggagatcctccccctctgcatcgatcccgaccgcgtctccattctatccattatgctgggggttggggcctcagaggagagagcccctaagagccacgatggcgcgggcgagagccgccgggggaaacgatctgccccaggagggggtcgtgcttctgggccccgcgtcgggggctcggggaccagccgtcctgccgacgccccggggaagaggaagctgggaggaacacctcccccatctcctccccgagggggcggggcggtgcgtaccagcggtcggcgcccggagggggccgcgccgacgtcacagcccgagggggagcgcaagaagaagcgcctccgcaagatgggggagacggaaccagcccggggaaacttaatttcccctccaaggtggtcattcaaccgaccccctcgcagcgatgtcccgtcgcattcctcccgccaccccaagtccggccagtccgaggccgaagatccagcggccgcagaggagcggaggcgggagtctgaccggcgtgaagccgcagcccgccttcgggaagctgaagaggccgcccgggaggccgcccgggttcgccaagcggaggaagctgctcgggaggaggccgcccgggcccgccaagccgcagaagctgcccgggaggaggccgcccgggctcgccaggctgaggcgacagcgtcacttgggcccactccctcgggcggccctcgggcgacatcctccgaggcggctcgcgacgaggccgcgggcgcatcgcctgggcctacctcaccgggcgacgcccaggaccgaacgggcccgggggacatccccgagctcagcgtatcctccggggggccaaaccgcgtcgccttttctccaaggcggcttttttcctcatcttccgtcgccccggtgagcgccgagcccattatgcaggccttggccgccgcaaacaccgcggtgctggatgggttcaacacccaggtggaggccctgcgtgcagaacgagcggagctcgaggccgcatgggcgcgcgtcgaggaggggcggcgctcggtggacgccatggtgaaggtgggccgtaaggcccatcgccgccacatctcggagctcgaagcccgcaaggcggcgctggcggagatcgcccgagaggtgaaggaggagcgagaggccgccctcgtcgccaccaccgcgatggtcgaggcgcaagacgccctccgtcttcagcacgcaagctgggaggcggagctgaagagcaagctcgacgccgcccaaggggttctcgactccgccgctgcccgagagcggcgggcaacggaagccgaagcggcgtcccggcggcgcgaggaggcccttgaggcccgtgccatggcgctggaagaacatgccggcgccgtggagaggggcttgatggaccgcgaggccaccactgctctccgggaggcgacgctggcggcgcacgaggccgcctgcgccgaggaggagtccgcgctccgccttcgcgaggatgcactcgccgagcgggagcgggctctcgaggaggccgaggccacgacgcgacggctggcggacagcctctccctccgcgaggcggcgcaagaggagcaggcgcgccgcaaccttgaaagcgtccgcgccgagagagccgcgctggagcagcgggctgctaacctcgaggcacgggagaaagagctggccgcgggggcgcgcatcggtggggcggctgcgggcgaaagcgacttagccgctcgcctcgcggctgccgaacacaccgtcgctgacatgcagcgcgcgctggactcctccaccggggaggccgaggcccttcgcttggcgggcgagattgggcccggcatgctttgggacgcggtctcccgcatgaagcgcgccggtcggcaagcaggcctctggggaggccagacgacggtgccccccaccaatctggaaggcctcgcaccgcacctcaacaggatggcttgggttctcgagcgactccccgaggagctcgagaagaccattaaggcatcctcgagggacctcgcccggggggcggtcgaactcgtgctggcgagttaccaggcccgggatcccaacttctccccatggatggcgctggaggagttccctcccgggaccgaggacgaggcgcgcgcgcgggtcggggatgctgctgaccacatcgtcaacggcttcgagggctcggcccctcggctcgcgttcgcccccagctccgacgaggaaggcgacaccagcagcgaggacggcggtggcgacgaggccggcgacccgggcgcatatgaatga

SEQ ID NO: 82429 - DNA, 1717 bp, Oryza sativa
  Clone ID: PAT_MRT4530_8185C.1
atggccgccggaggaggaggagatgcagacatgcggggaggcatggcggtggcagccagaggaggaggacgtccgccgtgcgctgctcccctcggtagcggcggcggcacgggggtcctgggagtcgccgaggtcgacgtcgacgtcgtccgcggccacggccatggcgttcctgtccgcatccggcgtgcaccacagaagcggcggcatggggagtggcgcctcagctgctgcaacggtggcgtcaatggggggaagggaagcgaaagctcctcgctccggtgggctgccgctgacgagctcggtggtgtaaaatcaagtacagaaatcacaaatgccagcaacacttctacaggaagacaagagcatgttcaaccagtgccattggcaatgaaaaggaagcttcttgcattgctccttccagtttacattcacatcaaggaaccaaatagctgcgaggccgctactgaggcattgcaacggtgtgtggggacgggcgtgggcggcggtgcatgggcgatgggcgcggcgttgcagcggcgcgtggggatgggcgtgggcggcggcgcgtgggcgatgggcggcagcgtgcgggtacacgcggaagacatcggcgcgtggggatgggcgtgggcggcggcgcgcggggacaggcggcgccgacgagggagtcgcgtgatgcggcggcggcgggcggcgctgaggagggcgttggacagtgccgggggcggacgcagcttggggggcaggatggcgacgggcgtgggcggcggcgcgcggggacgggcggcgccgacgagggcgccacgtgatgcgccggcggcggacggcgccgaggagggcgttggacagcaccaggggcggacgcaacttggggcagcgggatggcgacgggagatggcagaggctgctcggggtcgtgggttagcgccgtccggcggtgatgacggcgagcaggatggggaagacgctccggtcgaaggcggcggaggtgtcaccgccgcgcctcttccgcttcttcatcacaaccctgcaagtttgattcgtggcggagctccggcgaggccgccgccgtgggcgctgttggtgcgtgccgcctccccctgcgccaagttggccgcccatcccagcgccgagctcgttgctcgtggccgtgggtggggtgaggacgtcatcgccggtggaggtagaggaggcaaggagggaggtttggggtgggggaagaatatgacaagtgggcccgagggcatttttgaccttttacactgtttatctctcctattgaaccagaaattaatattttattggctgcggtgtcccctggcaaataaccacattttgagagtgtctttccccaaaagtgactttgtgcagtgtcctacagctaaaaccacgaagtcgcgatgtcctgtagcaaaatttgcctatttttttttgtccatgtgattttctttttctagtgtaaaacttagtatctcttggtacctctagtactataaggtacaaaatttgtactaataattttggtgtcactagttttatttccattgctccaaccagaaaacaaatcgatacaaaatcaccattccaactttgcacactgcgtgggaaaaaacaacatgtggtttccgtcatcggttttctctcatttatttcactagggaagattgaagcggaatcggatcgtgggaggacacagtcagtagttgtttgttcc

SEQ ID NO: 82430 - DNA, 153 bp, Oryza sativa
  Clone ID: PAT_MRT4530_81860C.1
atgcacgggcagcagctagccagtcagaccaccatcggctccagtcaaaccgccggcggcccggttagaccggcgttagctctagcggctctagatcgtcaagccaaggcacacatcccggctcaccaaccgcccggtcattacctctcttga

SEQ ID NO: 82431 - DNA, 573 bp, Oryza sativa
  Clone ID: PAT_MRT4530_81861C.1
atgggcatgacaaggtcgctcgctcgctggttctttgcattgcggtggtggcgcgcggcagcgtgcgcgcgtgaccggcgtggcggcgaactggtcggcgacggcgacgttctacggcgggagcgacgtttctaccagcgcgcgtttacattaagaattagattaggattggatcaatattccatcggtgacttcgacttggagtaccatacggatttcaactttacatttgcacccatttataccctcatcctccacgatttgcctttccactcccacaacaaaaacataatgcctctcataccgttttcggtgcctccacatatggagcaaccggaagcaccattgaccgcagaagagcgtgaaaagaaaatacgtgaacaaattgagtattactttagtgaaaacaatttatgttccgacgtgtatttgaaggggtggatgaaccaacaaggttgggttccgttgacattggttgctggtttccctagagtccaggctctaactaccgattacgagaccgtacagaggtctgtgctatcgtcgactgaagtagaattgcagcaatgttaa

SEQ ID NO: 82432 - DNA, 761 bp, Oryza sativa
  unsure (1)..(761): unsure at all n locations
  Clone ID: PAT_MRT4530_81862C.1
gggccaccagatttggaatataatctgatagagaaatcctacgctatatttgtttttatgctgttggtaacctgttctccactagtttgatgaaaaaaagggagaaaactggagaacagtaattttggatattgatgctgcttagcgctgctgttttgtcaatatttcaacctgcatttctgtttctccagtgctgatttgtcataattttctatttgagccatgccaatcgcttctttgttatgcttcattccttttcacacctttgacctttgattgttgaacgtttgcagaactacactggtgatagactcaattttggactagctgctgagcaggcaaaatctgaacggctataagcatggagcatggttattggttggagtacggtcgcggccctcccaggtggtggaagtggccatgagccaacccatgctgcaggggctggccctgggatgttgacagctgccgtttctggagatgttttcacttctccgcccgttgattctattttagctgctattcgagctgtaactggtcccatggggtgccttctaatagtaaagaactacactggtgatagactcaattttggactagctgctgagcaggcaaaanctgaaggctataagatggagatggttattgttggagacgattgtgcccttncctncacctcgaggaatagcttggtagaagagggtttagcagggactatccttgtgcacaaaggttgctggggctgcttcaagatgcttggc

SEQ ID NO: 82433 - DNA, 2219 bp, Oryza sativa
  Clone ID: PAT_MRT4530_81863C.1
atgaggcttcccgagttctttaatttgtgtttcatcgggttcggcggtctaaccagcgacataccggcagtcaggccggcggcaggcggcggtcagaccgacggaggagaggcgccgccaccgtcgctgccgcgcgcgaggagctcgacggccggtgctttctctgagctaagccaaatcgagtgccaagtccaagaaaggcacgagaggaggaggaggaggaggaagaagaagaagaagaagaagaagaagaagaagaagaagaagaagaagaagaagaagaagaagaagaagaagaagaagaagaagaagaagagcagtcagggcacggggatcagtggcacgccaatgggggcagcttcttcttcttcttcgatgcagcatctgttcctgctctgccgcctcctcggcttctgctttgcgttcacggcgagccagcagcagcagtcggactcgtgcagcagcgccggcgtcgcggtcgcgcatctcgccttccgctgcctgaccgtctggaagcaggaggacttcgtcctgcgggtgtttgagttggctatatagccatcttcctctccttcctcatggcgtcatcctcatctgctgttccctctgctccggcgctctcgcagccggtgacagagaagctgtcccgcagcaacttctcgctgtggcgagctcaagtcctcgcgacactgcggggagcccagatggctgggttccttgatggaaccaaggagaagccatctccgactatgatcgtgaagaaggacgagaaggacgtcaccgtcgtcaatcctgcccatgctgaatgggttgcacaagaacaacaggtgctaagttaccttctgctttcactctcacgagaagttctctcccaggttgtagctgtcagcactgccgctggcgtgtgggaggcaattgagggcatgtttatgtcccagtccagggcgcgggccatcaacacaagaatggctctcgctacaacgcagaaaggcaatctttccgtgatcaactacgtcaacaagatgcgcggcctagcggatgagatgaccgccgccggaaaaaagctcgacgatgaggatctagtatcctacatcctcgccgggcatgacttcgattacgacccagtggtttcagcggttgcagcccgcgtggaaccaatctctgtctcagagttgatcactcaactgatcagcttcgagcaacgcctggagcttcgtcaagggatggcacaggcgaacgccgccatgcgtgggcgcggcaatggtggacaacgtggccgcggccgcggcaacgccaatcctggtggacgcggccctgctcaaggtggtcgcggcgggtttggcggcaatcaagaacgacccaagtgccaactctgtggcaagcttggtcacacagtgatcaagtgcttcaaacgcttcgacacctccttcaccggggaggaaaaagctgcaaatgttgccaccacttcgtatggtatcgataccaattggtatgttgataccggcgccacggaccacgtcaccggcgaacttgacatgctgacggtgcgggacaaatacaccggaaatgaacaagttcacgccgtgaacggagcaggtcgagtttatatttcccaggacgtcacttttgatgaaactgtgtttccgtttaaagaacttcatcctaacgccggcgctcgcctccaggcagagattttactcctccctgagaacctgcaccagatcgatccatcctcctgcgacaatccacagcaagattattcactggaacgtccttttatgggcgctctgcctgctggcgggagcacgggcacaggcgcgctctccggcgccgattcgcctgcatctgtgcctctggatcgggggcacggtggtgctttggagacgccgccgcacgaggacgtgggatcttcaccgagctcagtcgacactgcttctcctgcgccgtgtctaaaggatggagtctacgccaactggatgtgcagaatgctttccttcatggagttctggaggaagaggtctacatgcggcaaccaccaggtgtcacgcaagctgttggacattcggttcatcagtactagtgatcagttagcagatggatttacaaaggctctgccagtgcgtcaacttgctgtaacaaccacatgtaatcgccacgcctgggggctgttcccggctatattaacacagaaccgtggtgctgagaggcatccacgttaa

SEQ ID NO: 82434 - DNA, 2028 bp, Oryza sativa
  Clone ID: PAT_MRT4530_81864C.1
atgatcattcccatcgtcctgcagctgctcatcatccttggcaatggcatggcgatggtggccgcccagccatggcacacctgcggcgccagcaactacaccgccgacagcatgtaccggctcaacctcgacggcatgtcggcgtcgctctttcccgaaggcgccggcggctccggcggcggcatattcgtcaggggctcctccggcgccgacccggacaaggtctacgccgtcgcgctctgccgcggcgacgtcgacgacgcccccgcctgcagctcctgcttcgacgccgcgttcaggcgcgcgatgcagctgtgcccgcgcagcaaggacgccaccatctactacgacgagtgcctcctccgcttctccgacacggacatcctcaacatggactccgtccgccgtctcaacacctcggaaatagtccatggcgcgcttgtcctgatgaacctcacctcggagcccatgctacctggccggtctacggcgacggcgaacttcaccggattcttgaagacgatgctgaccgacgtggtagggcaagttctctccacgaggaggcactacgcggcgatccgcatggagatggacgacgggagcagcagtagcaccaccgcagtgccgcgggagttctactgcttggcgcagtgcgcgccagacttgattgaagatatatgctacagctgcctcacgaatttcagcgatcggccggtggcgagcttccctgggcggcaaggatggcgtgttcttggtctgtggtgtaatctgagggataccattgctagcgttcaggacgggatcgtcatcctctcccagcctcacgcacttacggataagaatggccacaaccaggtttcgtttcatggcggtgttgtggctgagacagcctatttcgtgtccaccatcaaaaatgaacaaaagttcagccaagtagccacccctattttagatcaagtccttaaattttataggctgaaaaggttagagcctttacctaggtacgatacgaagaagttctacactggcgcgcccacgtggagctccgggtcgtcggcgtcgaatgctattgttccaagtccagcaccgcagccagcctcgctgccaccaccaacgccaaaacacaagagtaagatgaacacgcaagaagatgaagcactaatttggggactagaaggaaggagttcagaattcacagtttacgacttttcccatgtattagaggccacagatgaaacaagaagagctttagtagattggaataaacgccttgcgataataaatgggatagcacaaggacttctatatttgcataagcactctcggttgcgtatcattcatagagatctcaaagcaggcaacattctattggaccatgaaatgaaccctaaaatttcagattttgggcttgcaaaaatatttagcacaaatgatactgaagggaatacaaaaaggatcgtcgggacctatggttatatggctccagagtatgcttccgagggccttttctcaatcaaatctgatgtattcagcttcggtgtgctaattctcgagactgtcagtggaaaaagaacatcaagttttcatcggcatggagactttatcaaccttcttggacacgcatggcagatgtggaaagatgaaacatggcttcaactcgtagatacatcattagtaatagagtctcatacaccagagatggcacgatgtattaacattgctttgctttgtgtgcaagagaatgccgcagatcgacccactatgtcagaggttgttgcgatgctaaccagcgagagtatgaccctacctgagcctaagtaccctgctttttaccacatgagggtgacaaaggaagagccatcaactgttattatggaaatcatgcaagataacttggttggaatgattccgaacaaggagggagtgacgatggtcaacatgcttgatctgcatgaagtggttaacatgaagcaagtggtcagtctcggatctgtcatcatcctcgatgatcttggaggcatcacatga

SEQ ID NO: 82435 - DNA, 216 bp, Oryza sativa
  Clone ID: PAT_MRT4530_81865C.1
gtgcgatttccagggcagagcagattgtcggatcggcggcgactattggaactaagaaaataaacgttgctgagaccttcctttcggattctaagagtaagatcaatctaagtttgtggttgtacgaattcctttcggaatatgggggaggccttgggcatatcattattctagtcggactctcaatgctcatgtcccccacaaaagggcagccga

SEQ ID NO: 82436 - DNA, 654 bp, Oryza sativa
  Clone ID: PAT_MRT4530_81866C.1
ctacctcgccgtcgccatcctcgcctcgccgctgatgtcaccaccgcctccacaaacagccgccgtcgccgccttcaccagcatacggctggctgccgcccgatgccatgtgtgccactgccgccatcgccagccgacaccgcagctgccaactaccgcgaccgccgtcgccgtcgccaactgccgctgctgccgtcgccgcaccgccgccgcaccgccgccgtcgtcgccgcacagccgccgccaactgccgccggccaccctccagatccggccgagaggcgcggatctgggggacaccgccgccgccgccgccgaggagcaccgcgccgtcgccaccacaagctcacacgggaccaccaccaccatcttcgtgcccgcggccggttccttccccgctaccatcgccatccccgccgccgcccggcgccgcgcgcccctgccttcgccgtcgccatccccgccgccgtggccgccgtcctccccgccgccagtcgccgccccgccagatccggccggagcggcctggatctggcggtcaccgccgtcccgcctggcggctccccggtccctgaacttgtaccgctgtatcatcccggtccctaaactcgcaaattgatcgttcagatcctcaaacttgttcgactgtgtcat

SEQ ID NO: 82437 - DNA, 482 bp, Oryza sativa
  Clone ID: PAT_MRT4530_81867C.1
gaaaaaaaacccaattttgaaaaaataattatttgggaaaagttgaaaaaccaaaaaggtttaaactttaaatttaaccccgggacaaaaaagtttcttaaaaaggggaaaaacggccatttttttaaagttaaaacctttccttaattaaaaccaaaataattttttttttaaaaaaaaaaccttttaaatttttccaactaaaaaagggggggggcccccaaaaaaattttttaagggggttttaaaccgtggggttaaccccccaaaaatcccggggaaaacctttgggggggccaatttgaacaattccccccaaaaagtggggaaattttttttccaacaacaacccgtggggaagtttttcaaaatacccccttgtaaagggttaatcaaggaggcttcctccaaattgaaacaggccccccgtgggaaaaccttcccggaactctcttagggaaaatgtaaacccgttggcgggt

SEQ ID NO: 82438 - DNA, 261 bp, Oryza sativa
  Clone ID: PAT_MRT4530_81868C.1
atgggtgatgggggcaatggtgatgagactgacatagtgcatgagctcaatctgaagtaccagaagttgcaacaagagaatgaagtggagaagaagaaaaaccagcgtggtcaggatgtgaggctagctagtgatgtaaatgcattggggctgcatgagttggaggcattcgacagtaacctcaatgtaatagatgcattgtcgattcaaatgatgtggttaagaatgccaagcaaacagttgagccccagactcagatga

SEQ ID NO: 82439 - DNA, 420 bp, Oryza sativa
  unsure (1)..(420): unsure at all n locations
  Clone ID: PAT_MRT4530_81869C.1
atgaaaaccggtgggcccnggtggctttcnanggaaacncgggaaggtccnttcanttncgcggtatcagctaaaaatataccagccatgcatgcttccctgccaactcattgccaactaaattccaagaacgagaatagttctctcatcaatgtccaccacctagatgattcaatggtaaattatgtttttataatttcgatgcattgaccaataaaaatcattcttgttgaattagcgggacgattattcctgcngtatacatggccacatgggcatgaagattttcctagtattataaatcnagttttttnccaagggccctgacngctgataatcanctgatatgagtnttttactgtgggaaacaaacncctgaaacttgctgnaatnatatgttntttgcctnatttctccnca

SEQ ID NO: 82440 - DNA, 1097 bp, Oryza sativa
  unsure (1)..(1097): unsure at all n locations
  Clone ID: PAT_MRT4530_8186C.1
ttttttttttttttttttttttttttttttttttttttttgtcttgctgcctaagccctggagtttgggtcctaaccttgcctcgcaacgcggcctatgtctgacgattccaaaataagcacacccgaggcaacccagctgccttcttctgtattgtctccgacccctaaacaccttttgctggcctctccccctcctccgactcccccccgctcccccctcgcccgccagctcacccaaccacggccccaaccccacccctccctcccccgcgccctccccccacccgaccaaccagcgtcgccgtcaacggcgctcgccgcccccgggctatcgccaccgaagccagccgccggtggggccaggcggccgcgggcacccgaggccgggcccagccatgcccccaagggccgcgccccgcctgtgccgccgtgccgccaagggccgcgccgcccctgtgctcctcaactaaccggagatcgtgcacgtgcttccccgcccggcttcggcagcccccgacgacgtgagagccaccacggcgctcgggacggcgatggacgaccccagatccgccggatccggcggcagccgcggcggcgcctcgccaacaagcgaccggactcgatcgggatagccggatccggcagctatgacatcaccgaccatgccagagaaaggtgcagcgatggggaggggaatatggacccacgctgagagagagaggagatatgttttagcctcaggttccccctttccctcctctctcccgtgctactgtctgcgcccatccgggatttggacctgccacctgcatgcatgatctggccagtggaggaggtgcgaagggtgagtagaggcagcacaggaagaaacgagagaagaggagaggagaagacacctagagactggctgtgaggattgggatgggcggctgaaacatagtaacaatcaacttatgtatctaccgtcccctccactttctcttntcttgttctttttctatttgtttagatgaaatttctgggctgtagcacaaattnaaatcataccttcaaagatacatatgtatgttgattaataaaaaaaaaaaaaaaaaa

SEQ ID NO: 82441 - DNA, 412 bp, Oryza sativa
  Clone ID: PAT_MRT4530_81870C.1
tcgcttcgttgttgggttcgtggccatccatcagatcgatctatatgatgtcctggtcactggcgtgattccacgatcgaagaaatcgatctcatctgatcggcggcagcaggcgcgtgtcgtcgcgtcgtctcgccgatttaaagcggggtcatctgtcgactccgagcagccggcgtccacctaccaatctaccggcgtcatacacacgtcgggactcaggagatcaatctaccagcgcacgcccacgtcgggagaaaagaaagtcaggaagcggaagccaccgttcctgccctgttcatgggaacacaaattcacgttccaaattgctatgttcacaaagccaagtctaccaggagggtttgacaaattgtaccagcagattcaggattttattcccaaggcgagttag

SEQ ID NO: 82442 - DNA, 687 bp, Oryza sativa
  unsure (1)..(687): unsure at all n locations
  Clone ID: PAT_MRT4530_81871C.1
gacccacgcgtccgacanaaatatagcaacttcttcaccaacattccattcccaaccaatcacaaccctccaccattcacttttcccacctacctccacttttcaaccaattacaacctcttcctatttaattctacacactttcttaataaccgtgtctaactctaaaactacttatattctgggatggagggagtaacaaaaagaataaatattacgcagcagcattaaaactggctataattatgttctggttatgttgttattcctggagttgtttatcttggtctccaaatataatctagagaaagtttatatgtatgttaccttgacagcctttgggaagataaggattcccttcatatccttcagagcatttgcacaggagccattcctgatggcccagtcatggatgacaggaacacctctgttggccctcccattgacaaacctgaggtgcccaacgaggtcttgctgcctgaagctgtaccatccggcctccacaagcatggcgtagaagcatgggttgaattcccacaccgcgctctggttcatcaccaagatcgctgcgaagtccttcaggtctgggatgaagggggtctcgcagcagcccatcccagtgcagggagcaccgttggatgtggctgtgatgctctggcagtaggagtagcagccagccacatatag

SEQ ID NO: 82443 - DNA, 243 bp, Oryza sativa
  Clone ID: PAT_MRT4530_81872C.1
tttgtttgccataggcaaaactatgctaatgtgagttctcacttatgtgacgagagtgccagacaatgagcgagagtgcaaactgagaccatcgctgaggctcaacgaataatactacacgaaccaccggatatggatgatcccgcaactaggctacacgttgtatattgcagacatatgaggcagaaatttggggatcatttaaaactgagtgagcacggtggaatctctggctcaatggga

SEQ ID NO: 82444 - DNA, 639 bp, Oryza sativa
  Clone ID: PAT_MRT4530_81873C.1
atgccacacggtgaggaagaaggggaggaggatgctggatgcagcagcacacgcacccgcagagaaggcggacttgggagcaccgacgggcgcgccccggcgtcggcgtcgtcggaaatggccgcagttggtggcggccgagtggtcaaggaggagcagcgccaccgctcgtcctgttcagatcgaggaggagcaacgccacagtcgtcgtcctctaggcccttgtccgacgccgctcttcgtcgcaccgccgcggccctccacccgcaaccgccaccacggcaaatcccttcacgcctcgacgcagccgtcctccctccctcccttcgtggcccgccgccgccgcccctcgtcgagccacggcagcggcccctcctcgacgcgccgctgcggcccacccaccgccgctacctccacccgcagctggtgtcgccatcctccctccgcgagctggcgccagcgcggattccctccctcggaggcccgccgccgccctccatgagccgccgctcctcacgctacctccacccgcagccggcgtcgccgtcctccctccgcgagccggcgccggcgcggattccctccctcagaggcccgccgccgctacccctccgtgcgtcgctgcccaagcacacagga

SEQ ID NO: 82445 - DNA, 1692 bp, Oryza sativa
  Clone ID: PAT_MRT4530_81874C.1
atgaagcctggaatatatctgaccgggaccgacgtgtcgtctccaggagccggcacgccgtctccggttagggacgagcgccaagaggctctcatccagatgacgggacggggcgaggactcctcctccgccggcgtcatggcgcggggctccgcaccgctcgacggtagcgtgctgccgccttcccgcatcgtgagcgagaggcaggccgggctgccgcgccgattcatgccggcgtctgccgccggctgggaggtggtcgagctgggcgagggacgcccgtcaccacactacccggggcggtccgtcttcttcctccctttcgcaatggcagggctggtcccgccattctcttctgtcttcatggatgttctggagttttatgacctccagatggcgcaccttacccccaacgcggtaatgacgttggtcatcttcgcgcacctgtgcgagatgtttatcggggtgcgcccatctcttcggctgttccagtggttcttcaccgtacagccagtgtcgccgccgtcggtagttggtggctgctacttccagccgcgggggccggcgctgagccgctatattccctgcgtcctccgcaagaagtgggactactggaagagcgactggttctacacccccctcgccgacgaagcgcgcctccaacttccgagccagcccccagcgcaggtctccagctggcgggcgccggtagatctgggagatggctacgacgccgttcttgaccgcctggcgggtctgcgatcccaggggctcacgggggccatggtgtacggcgactaccttcgtcgccggattgcgccgctccagcagcgcgcccggggcgcctgggagtacaccgggtctgaagactacatgaggacccaccagggggtcagatgggactgggcccctgaggacttcaagatagtggtccaacgggtgctgaatctcagctccgtagaggcgtccctcatcccccaaggagtcctccccctctgcagcgatccagatcgcgccaacatcctgaccatcatgatggcggtcggggcgtcggaggagcgggctcctcgaggccacgatggcgcgggcgggagccgcaggggagagcaatctaccccaggagggggtcgtgcttctgggccccgtgacaggggcccggagggcagccgccctgccgacgcccgagggaagaggaagcaagagggtaccccctccccatctcctccccgagggggcggggcggcgcgtgtcagcagcaggcgcccggagggggccgcgccgacgccgcagcccgaaggggagcggaagaagaaacggctccgcaaggtgggggggactgaaccattccggggaaaccttatctccccccaaggtggtcgtttaaccgacctcctcgcagcgagatcccgtcgcgcccctcccgccattccaagtccggccggtctgaggccgaggatacggcgaccgcggaggcccggcggcgggaaactgatcgccgagaagccacggatcgccttcgggaagccgaggaggctgcccaggaggccgtccgggctcgccgggctgaggaggccgctcgggaggaggccagactccgccgggccgaggagtccgcccgggaggcggaagcggcgcgacagttttttttttttccgaggccttcgggcccccttcttgtatagactaacttaa

SEQ ID NO: 82446 - DNA, 1618 bp, Oryza sativa
  Clone ID: PAT_MRT4530_81875C.1
ccacaagggtgctcggacgcgtgggcgctgcccaccccaatccggcagcacagcagcagcagaagcagctcggatccctcctgcaatggcgaccgcgtgcccgccgctctcgctgcagccggcctacctctcggggaggtccgcgcgcgcgcgccgcccgccgcccgccgtccgctgcagcgccgtcggagaggttatggcggagacggcggcggtcgggacggcggaggagccgctgctggtgagcgcgatcaaggggaggaaggtcgagagaccgccggtctggctcatgaggcaggccgggaggtacatgaagagctatcaattgctctgcgagcgacatccttcattccgtgaaagatcagaaaatgttgaccttgttgttgagatctctctacaaccatggaaggttttcaagcccgatggagttatcctgttctcagatatccttacaccgcttcctgggatgaacataccttttgacattgtgaaaggaaaaggtccagtgatatttgatcccttgagaacagcagctgctgtgaatgaggtcagagaatttgttccagaggagtgggtcccatatgttgggcaggctttaaacattttgcgggaagaggttaacaatgaagctgccgtgttgggctttgttggagctccctttacattggcatcctattgtgttgaaggaggttcatcaaaaaacttttcaaagattaagaaaatggccttctcagaaccagagattctgcataatttgctacagaaatttactacgtccatggctaactacattaaataccaagctgacaacggagcacaagctgtccaaatttttgactcatgggctacagaactcagcccagttgattttgaggagtttagcttgccttatctgaagcagattgtggatagtgtcaaagaaacacatcctgaattgcctctgatactatatgcaagtggatctggtggactgctggagaggcttccactgacaggtgttgatgttgttagcttggactggacggttgatatggctgaggggaggaaaagattgggatctaacatagcggttcaagggaatgttgaccctggcgttctttttgggtcaaaagagttcataagcaagcggatttttgacactgtgcagaaagctggtaatagtgggcatgtattgaaccttggtcatggcattaaggtaggcactcctgaggaaaatgttgcccatttctttgaggttgcaaaagggatcagatactgaaatacctaggctattcgatgcattcctttctccctagtccccaccggcagaagttgtagattctgctgcttgaggatagatgcaggaagccatgtctagcgtagaatacctgaagagcacatcttttgcgatttctgtgttttgcgatcaaatttttattttattgttagtcttgtaaggttatcacttgaggtgtaagaaagttcctacttgtttatagcaagtatatattctaatcaaatctgtaaccccgagattatcaatttgtatcggtaagaaataaatattgtatttgaaaatgttttttttcctaaaaaagaagcaggatgtaatgttaccttctaaaaaaaaaaaaaaaaa

SEQ ID NO: 82447 - DNA, 1692 bp, Oryza sativa
  Clone ID: PAT_MRT4530_81876C.1
gcacgaggctcaaaacctcgtcaagaacctgaaacaaaaattctctctcgcctcgcgcgaaatctcgcgtgcgatccaccgcggggacaagctctagatctctctcctacgatccaccacgcggagaagctctcgatctctctccttcgatcgatagtttcgtcgcgctaagtcggtggtgatctgatctccgcgttctttcgggggagtttcttgcgaggtttttctgggccgagctcgcccatggaggcgccgggctccggctcggtcccaacggcgaagcgccgccggctcgtgccacggcctccgccggtgccgcttgaggtggccggcgcgagggggccgtacatgccgccgctatgtattaaatccaagaacccgtccgcgaaatgctacggtgacagattcatacctgataggtcagcaatggacatggatatggcatatttcctcctgacagaacctaagaaggagaaggaaaatactgacatgctatcaccagctgaagaagcttacaagaggcttcttgccgagaaactcctgaacaacagaagccggattcttgcattcaggaacaaaccaccagaacctgaaggaattgtgcaacagctattatatgaaactttgacttccagtcagacaaagcctgctaggaagtgtagacacataccccagtcttctgagaggacgttagatgcccctgggattgttgatgacttctatcttaacatattggactggggatgcaaaaatgtgatgtccattgcgcttgggaacaccttgtacctctggaattcagctgatggatctattatggaccttgtaacaattgacgaagatgatggtcccatcactagtgttagctggtcttgtgatgggcagtggattgccgttggcctcaactcttctgacattcagctgtgggacaccagctctaatcgcatgctgagaacacttcatggtgtacaccaatcaagggttggttcactggcctggaacaagaacatactgacaactggtggaatggatggaaacattgtaaacaatgatgtcaggatgagatcccatgttgttcatatatatcgagggcatgaggatgaggtatgtgggttgagatggtcaggaagtggccagcaattggcaagtggtggcaacgacaacctggtgcacatatgggatgtatcaatggcatcttctaatctatctctaggtcataaccggtggcttcatagatttggcgatcatttagctgcagtgaaggcccttgcatggtgtccgttccagagcaatttgcttgcatctggtggtggtggagatgatcggtgcatcaggttttggaatacacacactggtttatgtttgaattctgttgatactggatcacagaattcacttgcattgtggaaatacccttcaatggttaaattggcagaacttgaagaccacactgctcgtgttctttgcctggctcagagccctgatggatttacagtagcctctgttgcagcagatgagactctaaggttatggaaaatttttgaaacttctgaagatgccaaacccgtattcaagacatttgtccttgtcttccaggataatgtgagagttggaccgtggggaactgactgttcatattttcaggatctcatagcattagttgtaaccatggtcaccggctcacagaaactgtaa

SEQ ID NO: 82448 - DNA, 2970 bp, Oryza sativa
  Clone ID: PAT_MRT4530_81877C.1
atggcacggggctccgctccgcttgacggtagcatgctgccgccttcccgcatcgtgagcgagagacaggccggactgccgcgccgcttcatgccggaatctgccaccggccgggagatagtctcgctgggcgagggatgcccggcgccacgctacccggggcggtccgtcttcttcctcccttttgctatggcagggctggttccgccattttcttctttcttcatcgatgttctggagttttacgatctccagatggcgcacctcacccccaacgcggtaatgacattggccatcttcgcgcacctgtgcgagatgttcatcggggtgcgcccatcccttcggctgttccggtggttcttcaccgtacagccggtgtcgccgccgtcggtggttggtggttgctacttccagccgcgggggccggtgctgaaccgctacattccctgcgtcctccgcaagaagtgggatgactggaagagcgactggttctacacccccctcgccgacgaagcgcgcctccgacttccgagccagcctccagcgcaggcctccaactggcgggcgccggtagatctgggagatggctacgacgccgtcctcgactgcctggcgggcctgcgatcccaggggctcacaggggccatggtgttcggtgactatcttcgtcgccggatcgcgccactccagcggcgcgcccggggcgcctgggagtacaccgggtccgaggactgtatgaggacccaccgggggtcaaatgggactgggtccctgaagacttcaagcgatccagatcgcgccaacatcctgtccatcatgatggcggtcggggcctcagaggaacgagctcctaagggccatgtcggtgcgagcgggagccgcaagggagatcaatctaccccaggagggggttgtgcttccgggccccgtgatgggggctcggggtgcagccgccctgccgacgcccgagggaagaggaagcaagagggtacttcctccccatctcctccccgagggggtggggcggcgcgtgttagtagcaggcgcccggagggggccgcgccgacgccgcagcccgagggggagcggaagaagaaacggctccgcaagatgggggggacagaaccatcccggggaaacctcatttcccctccaaggtggtcgtttaaccgaccccctcgcagcgagatcccgtcgcgtccttcttgccaattcaagtccggccaatctgaggccgagaatgcggcgaccacggaggctcggaggcgggaatctgaccggcgagaagccgcggatcgcctacgggaagccgaggaggccgcccaggtggccgtccgagctcgccaagctgaagaagccgctcgggaggaggccagacttcgccaggccgaggcggcgacgacttccgaggcagctcgcgacgaggccgcgggcgcatcgcttgggcccactccctcgggcgacgctcaggacaagccaggtccgggggacatccctgagtccggcacgtccatcggcgggccgagccgcgcggcatcctcaccgaggcggctctcccccacgccttccgctgccccactgagcgcagagcctcttctgcaggccttggccgtcgctaacaccacagtgttggacgggttaagtgcccagatggaggccttgcaagcagagcgggtggagctcgacgccgcatgggcacgtgtcgaagaggggcgtcgctcggtggaggccatggtggaggtgggccgcaaggcacaccgccggcacgtctcagagctcgaagcccgtcggaagatgctgggggagatcgccagggaggtggaggaggagaggggggcggccctcatcgccactaccatgatgaacgaggcgcaggacgacctccgccttcaatacgggagctgggaggcggagctagggaagaagctcaacgccgcccggggggtccttgacgctgccgctgcccgagaacggcgggcggcggagaccgaggtggcatcccggcggcgcgaagaaacccttgaggcccgtgccatggcgctggaagagcgtgcctgcgtcgtggagagggacctggcggaccgcgaggccgccgttgctattcgggaggtcacactggcggtgcacgaagccgcctgtgccgaagaagagtccgcactccgcctccgcgaggatacgctcaccgagcgggagcgagccctcgaggaggccgaggccgcagcacagaggctagcggagagcgcgtccctccgcgaagctgcgcaagaggaacaagcgcgtcgcaatctggaaagtgcccgcgccgagagggccgcactgaaccagcgggccgctgaactcgaggcgcaggcaagggagctggatgcaagggcgcgtagcggcggggcggccacgggcgacagcgacttagccgcccgcctcgcagctgccgaacacaccatcgcggatctgcagggcgcgctggattcgtccaccggggaggtcgaggcccttcgcctggcaggcgagatagggcccagcatgcttcgcgacgccgtgtcccgtttagaccgcgccgagcggcaggcgggtctctggggcgggcggactgtgaagtacgccgccaaccaggggggcctcgcccagcgcctctcggagatggccgggactctccaacggctccccgaggagcttgaggggacgattaagtcatcctcgagggacctcgcccgaggagcggtggagctcgtactggcgagttaccaggccagggaccccgacttctccccatggacggcgctggacgagttccctcccgggaccgaggacggcgcgcgcgcgcaggtccgggatgccgccgaccatatcgtccacagcttcaagggttcggcccctcggctcgcgttcgccctcaactccgacgaggagggcgatgacggcggtgtgggcgacagtggcgacgaggctggcgacccgggtgcatcggagtga

SEQ ID NO: 82449 - DNA, 1321 bp, Oryza sativa
  Clone ID: PAT_MRT4530_81878C.1
atggcgaccgcgtgcccgccgctgtcgctgcagccggcctacctcccggggaggtccgcacgcgcgcgccgcccgctgcccgccgtccgctgcagcgccgtcggagaggttatggcggaaacggcggcggtcgggacggtggaggagccgctgctggtgagcgcgatcgaaggggaggaaggtcgagagaccgccggtctggcttatgaggcaggccgggagagctatcaattgctctgcgagcgacatccttcattctgtgaaagatcagaacttgttgaccttgttgttgaaatctctctacaaccatggaaggttttcacgcccgatggagctatcctgttctcagatatccttacaccgcttcctcggatgaacataccttttgacattgtgaaaggaaaaggttcagtgatatttgatcccttgagaacagcagctgctgtgaatgaggtcagagaatttgttccagaggagtgggtcccgtatgttgggcaggctttaaacattttgcgagaagagattaacaatgaagctaccgtgttgagttttgttggagctccctttacgttggcatcctattgtgttgaaggaggttcatcaaagaatttttcaaagattaaaaaaatggccttgtcggaaccagagattgtggatagtgtcaaagaaacacatcctgaattgcctctgatattatatgcaagtggatctggtggactgctggagaggcttccattgacaggtgttgatgttgttagcttggggacggttgatatggctgaggggaggaaaagattgggatcccggccgggagttcaagggaatgttgaccctggcgttctttttgggtcaaaagagttcataagcaagcggatttttcacactgtgcagaaagctggtaatagtgggcatgtattgaaccttggtcatggcattaaggtaggcactcctgaggaaaatgttgcccatttctttgaggttgcaaaagggatcagatactgaaatacctaggctattcgatgcattcctttctccctagtccccaccggcagaagttgtagattctgctgcttgaggatagatgcaggaagccatgtctagcgtagaatacctgaagagcacatcttttgcgatttctgtgttttgcgatcaaatttttattttattgttagtcttgtaaggttatcacttgaggtgtaggaaagttcctacttgtttatagcaagtatatattctaatcaaatctgtaaccccgagattatcaatttgtatcggtaagaaataaatattgtattcgaaaaaaaaaaaaaaaaaagcggcc

SEQ ID NO: 82450 - DNA, 3135 bp, Oryza sativa
  Clone ID: PAT_MRT4530_81879C.1
atggcacggggctctgctctgctcgacggcagtgtactaccgccttcccgcatcgtgagcgagaggcacgccggactgccgcgccgcttcatgccggagtccgccaccggtcgggagatagtgatgctgggcgagggacgcccggcaccagactacccggggcggtccatcttcttcctccccttcgcaatggctgggctggtcccgccattttcttctttcttcatggatgtcctggagttctacgatctccagatggcgcacctcacccccaatgcggtgatgacattggccatcttcgcgcacctgtgcgagatgttcattggggtgcgcccctctcttcagctgttccggtggttcttcaccgtgcagtcggtgtcaccgccgtcggtggttggcggctgctacttccagccgcgggggccggtgttgaaccgctacatcccctgcgtcctccgcaagaagtgggacgactggaagagcgactggttctacacccccctcaccaacgaagcgcgcctccgacttccaagccagcccccggcgcaggtctccagctggcgggcgccggtagatctgggggaggactacgacgccgtcctcgaccgcctagcgggcctgcgatcccaggggctcaccggggccatggtgtacggcgattacctccgtcgccggattgcgccgctccaacggcgcgcccggagcgcttgggagtactctgggcctgaagactacatgcggacccaccagggagccagatgggattgggctcccgaggacttcaagatcgtggtccaaagggtgctgaatcttagctccgtggaggcgtctcgcattcctcaggagatcctccccctctgcagcgatcccgaccgcgcctccattctaaccattatgatgggggtcggggcctcagaggagagagcccctaagggccacgacggcgcgggcgagcgccgccggggggaacaatctgccccaggagggggtcgtgcttctgggccccgcgtcgggggctcggggagcagccgccctgccgacgcccaggggaagaggaagctgggaggaacacctcccccatctcctccccgagggggcggggcggtgcgtgccagcagtcggcgcccggagggggccgcgccgacgtcgcagcccgagggggagcgcaagaagaaacggctccgcaagacgggggagacggaaccatgccggggaaacctgatttcccctccaaggtggtcattcaaccgtccccctcgcagcgatgtcccgtcgcattcctcccgccaccccaagtccggccagtccgaggccgaagatccagcggccgcagaggagcggaggcgagaatctgaccggcgtgaagccgcagaccgccttcgggaagctgaagaggccgcccgggaggccgcccggattcgccaagcggaggaagccgctcgggaggaggccgcccgggctgaggaagccgctaaggaagaggccgcccgggctcgccaggctgaggcaacagctgctgctggcgcgccaactgggcccactccctcgggcaaccctcaggcgacagcctccggggaggctcgcgacgaggccgcgggcacatcgcctgggcccacctccccgggtgatgcccaggatcaaacgggtccgggggacatccccgagcccagcacgtcctccggggggccgagccgcatcgccttctctccaaggcggctcttctcctcatcttccgtcgccccgctgagcgccgagcccattctgcaggccttggccgccgcaaacaccgcggtgctagatgggttcagcgcccaagtggaggccctgcgcgcggaacgagcggagctcgaggccgcatgggcacgcgttgaggaggggcggcgctcggtggacgccatggtggaggtgggccgtaaagctcaccgccgtcacgtttcggagcttgaagcccggaaggcggcgctgacggagatcgctcgtgaggtggaggaggagcgagcggccgccctcatcgctaccaccacgatgattgaggcgcaagacgccctccgccttcaaaacgccagccgggaggcggagctgaaagaaaagctcgacgccgcccagggagtccttgactccgccgctgcccgagagcggcgggtaacagagactgaggcggcgtcccggcggcgcgaggagtcccttgaggcccgtgctatggcgctggaagaacacgccggcgccgtggagaaaggcttgacggaccgcgaagccgccgctgctctccgggaggcgacgctggcggcgcacgaggccgcctgcgccgaggaggagtgcgcgctccgcctctgcgaggacgcactcgctgagtgggagcgagctctcgaggaggctgaggccacgaccaaacggctggcggacagcctgtcccttcgcgaggcggcgcaggaggagcaggcgcgccgcaatcttgaatgcgtccgcgccgagagagccgcactggagcagcgggctgctgacctcgaggcgcgggaaaaggagctgtacacgagggcgcatatcggtggggcggccgcgggcgaaagcgacttagccgcccgcctcgcagctgccgaacacaccgtcgccgatatgcagcgagcgctggactcctccaccggggaggccgaggcccttcgcttggcgggcgagattgggcccgacatgctttgggactcggtctctcgcatggatcgcgccggtcggcaagcgggcctctggaaaggccagacgaggatgcgccccaccaatctggaaggcctcgctccgcacctcaacaggatggcctgggtcctcgaacgactccccgaggagctcgagaagaccatcaagtcatcctcgagggacctcgcccggggggcggtcgaactcgtgctagcgagttaccaggcccgggaccccaatttctctccctggatggcgctggaggagttccctcccgggaccgaggacgatgcgcgcgcgcgcgtccgggatgccgccgaccacatcgtcaacggcttcgagggctcggcccctcggctcgcgttcgcccccaactccgacgaggagggcaacaccagcagtgcagacgatggtggtgacgaggccgtcgactcgggcgcgtcggaatga

SEQ ID NO: 82451 - DNA, 1653 bp, Oryza sativa
  Clone ID: PAT_MRT4530_8187C.1
atggcgaagcagcagcccgtcctgatcaggctacttcagtgtaggaatatggccgaacactatcacgagctggagaaagatttgaagctccatgacgtgctcctcctcctgcaaatcctcccagcagttcgccaagatttgggatggattcgtctctacatcaacaatgctgcggaccaggacaacactcaacttctgcaccaacagtggaatgcgcagttggcgatcaaccctcctgccaaagatttacagcacatcctcttcctgacctatttgccacgaggacctgggaatcagcaaaaagttctgagggagacctttaacaaccacaagtgggagctcaaagaaaagatcaagagcaacaatacgagccatgtcgatatatgcaaactgttatatgcaaagaaaaataaatctcagaaagacgacgtcgacgctacatttaaacttaacatgatcgagctctcattgagtgaagatccgaactcgctgccttgcattgctctctgcctggtatatcaaagcaacaaatcccccatgctctaccttattcaatcacttgtacatcgtttgcagattcaagtacgaccaagtgcccaaatcgaacagaagaaaatagtcaagaattctacattgatcattaattggcacactctatcagatgctgataatgggaaatactctgaagatgaagatgactataaacgttcacacaagtacctgatgaagggcaaatataaagttgttgatgaacatagttataacaacattcaaagcgccattaccttgcgtgacactattgttcgtcgtttggatacatggctgcaacaacaccaggacatagcaagcacaatcgaggcactccttccatttcagaatgaccttgacgattttatactggaaaagatgaatgatatgctatcagtagtacatagaatgcttgtgaaaagaaaaggtaccctcaagggctcccaggtgtttgaagagaataagagggcatgtttacgtcaggagcctgctattgaaagttctcagattaaagacttctcaaatctcgatatttttacaaccactaaacatcaaattttgaatacttcacaagtttcacaaaatgaagcagtaattactcaacagagtcagtctgctgtcccggttgacatgaagcaatatgatttctatgcccgcaaccaacaacagtttccagtaaaccttcctgattttcggccggaagctttgaatgcattatatgtgcttcaaactggcgaagtaataaccattcacggtcaaagtcagcgatatcctcaggcaagctccatccctataaatgaagctcagcaaggagaggcattgcagtgtctggagcaggcttggctagaagaagtcatcaaatttccagagtttaaagaacttttgaaatcattctccaaatatgatgatcaggagaatgactttccaagcgagatgagaattaatgagttaccatcatccccgtctgtgatggctgcctacaattcgcaagatgagattcttgatccggaggtgccaccacttcttggatcctttgctgttaaactgacagagactgagccactggattcttacaatgacctgaaagggcactttgaagacattgagaactgggaagcttcataa

SEQ ID NO: 82452 - DNA, 2004 bp, Oryza sativa
  Clone ID: PAT_MRT4530_81880C.1
ttttgattgaggataataagagattagttgagctctatgaacatgctatcgccaatggtgaggtgaatcaagatgggggccatcctgccattcctcaaattgaaggtgtgaatgagcagcaaagcagccattcttatggaggggctgctgcgaatggggtgctgccagatgacaagccagagagtgcaacaattttgccagcagacaactcatccagtgaggtatcggactccaagataatggatggacagtgcaatcacaaggataatttttcaagaagtgaattgacagatttgcaacttcaactggacgagatgcatgaagaaaatgataaacttatgggtctgtatgagaaagctatgcaggaaagagatgaattcaaaaggaaattttttgagggtagcaattctttaactacagtagatactcaatatgaagatgttgaaatgcgtgatgcaacagatgatgaagatctagaagtaaaacatgtacatgactctgcaatatcaacgtttaaagaaatcctgcggcttgttcgtgtcaaactgaagaatgtccacgacaagcttgtaactacccaggatgcagtagagtattttaaacttcttgaaatggctagtactaaggcagaagaactttcagcaagcattcagcaccattgcctagaactgaagcacgaccaggaagacatgaatgcccttaaggctgaactgtcacaatcacaggagagtaaagaagctttggaaagcaagtatttctcgcctgtggcatcatgctggaacttggacttgaaaaccaaagcccttgttgggtccaagtttgatgtcagcttggaattattgaatcaaaagaaggaacaactgagtcacctccaaactctcaaaaaagaattttctgttgcatctacaaaagcacgtgaatctgaaaccgcgttgagaagcaaaatcgacggtcttaaagtaaaactccgctctttcgaagctcagagaaaggaggcagaaagggtcctttttgctattgataatatcgacacttccactcctacattgtcgaagcctgtgaattttggtaaggcatctgagctgctgagatctgaggaggagcgaacaaagcttttatctgaacttaagaagtcccgtgaacagcttatcatggtgcagaaagaaattaaaagcatgaacagacacgatgatatcgattgtaagattgcatctcttgaatcagaagtagaaaattgctgcctgaccctgctggaagctgacgtcgagaagtttgtacgtgataataccttgacagagatttggaaggaagagcagaaagacatggattgcctgctggttgattaccaagagtgcgtttttaaagtcaacttgaaggaggagaagatcagggcatgtgaggagtccttgcagcatcaaacaaggtccctggatgacatgaactcgaagctaaatcaagcgatgcgtgatctgggtgagcatctgcgagacagaaccccttgcgatttggatgcatccatgttgcatgtttctgacaaggttaagggggatcttgatgcaatggcgcttcatgttgctgaagctgtgcagctcttgcttgtccagggtgagaaccaaacaaatccgtgagcctgctcaactagaaccagctttccttcactgatgcaataaccgacaggctagtctgtccaagcctcatctgtgcacatccttgttttcaccacaacacaagggatcaggcgtctctttctgtcaattcgcttctacatgatggaagaagtcgtgaatcaggatgcgctcaaaactgttttgtgcgaccacctatctctggtggttgtgccaagtcatcaacagcaacaggcccttatgtaagctatgtatttcttttagtttgcacttgaaattgcaattcagctactggttcaacaaggttttgaattcaaggaagtgatttaccgtgccttttgttattctctagatttgtactgtacgaaacaatgaacat

SEQ ID NO: 82453 - DNA, 4398 bp, Oryza sativa
  unsure (1)..(4398): unsure at all n locations
  Clone ID: PAT_MRT4530_81881C.1
atggcgtggctcacgggcggtggcgacctcctctccgccagatctggcaggaggggaggcagcggcggcggtggagccctcccctacgccagatccggcggggggaagaaattggtcgatagttcaatcaccgagcatttcaacgtgaagctctacgcgtgtccaaatcttgcttttagcctcgacttcatcaccaacgacttcggcaagatttctctcctcgactcggattcgaaccagtcggggagaggccaggtctccatcccgttcggtatcccgaactcggctgagatctactccaagatcatctcaaccaagtcggctccaaaccactcggacgagatccaatctactccaacacaacctgatcaagacgatggggcctatcccttaatcctgatgaaactccccgacgacttagccgtcgtcttcaccacacgggcgtccgctccccgtaggcctaggcgggatccagcttcggctccgatccagcctagctccagggaagtcggcgtcatactccaacctctcgggacggtttcgacggaagaattggatggctacctcagctcccccggtgtcgattctcgaccgacggagatcgtagagtacgacgacttcggctaccactacgactaccgcaacctcgacaacttcgacgaaggcaacgaagataactacacgcctctcttcttcggcgttttcatggccgacaacgagacggaagaacagcgtcaagcccgagaagcagaagaacagcgcgagcgcgaacgggccgcgaaggaggctgaggatcggcgacagcgcgccttggaggccgggcaacgagcacgagaacttattgggcaacaagacgttgaggggacggcggtttttcgcaccccccagcagaacgcggttgcagcgatcacccttctcgacaccctcctcaaggaagtcgcactcaatcaagccaatcacctcgtcaacatcttaaatcagaccaagaccatgatcgccgcttcggtcccggtgaactccgcaagcgtccgtacgccgactggcagccgagttccccctctccgatctcaagactatcatcaaccaagcctcagcgtcgtcggcgcgggatccagtcgcaggagcaaggatcacaacgagcgtcccatcgcagncgacntgcgtcgagtgatttggcaagcgggctcaaagcngactgaaatcaagaagtatgacggcaccactaacccggagtcttggctcaccatctacagcctcgcaattcgcgcagcaggaggagacagcaaagccatggcaaactatctgcctgtggccctagcggattctgcccggtcctggcttcacgggctaccccgtggcacaattagaacttgggcggaacttcgcgaccacttcatcgccaacttccagggtacctttgaatgccctggcacacagtttgatctctacaacgttgttcaaaagactatcaagcagatgttcgaaaaagccaacgagtatgccaaagccgaagatgccattaccgcgtccaagcagtcgggcactacttggaagccgaacaaagatacgccgaccacaggggggagtggaagtaccaatcacaaggatcgcaagtgtaagcccgaggaacttgtggcaactactacaccatcctcccgacaacgttcacgcgtcaacacttttgacaagatcatgaactcccaatgtccacatcatccaaattccaatcacgcggccaaagattgcttcgtctacaaacagtttgcagaacaaaacaccaagaatgcacgaaaggcctccgacggagatcaaagcatgtcaaaaaagaaggacgatgacgacgatgccccgataggttttcgagaccgtcgtaaggagctcaaccacatctttggcggacctctggcttatgaatctaaaagaaaacaaaagctgactgaacgggagattaacgctgttcagcccgatacgccccaatatcttcggtggtcggagacaacaatcaagttttaccgctcggatcatccagaccgagtggtccacccggggcggtaccccctggtactagacccagtggttcgcaacgtcaagcttcgcagatccctcatcgatggcggcagtgcactcaacatcctcttcgccaaaaccctggacgacatgcagatccctcgcacagaattgaaaccgagtaatgcgccctttcacggagtcattccagggctatccgctacaccactcggccagatcactcttcgggttaccttcggtactcgggagaacttccgcacagaaaacgtctgcttcaaagttgctgatttcgatacagcgtatcatgacatactcgggcgcccggcgttagccaaatttatggctgtcccgcactatacctacataatgataaagatacctggtcctcgaggagtcatatccctgcagagcaacatcaaacaagccgataggaaggatacgatcaaggaagaactccctaagctgttagcagcaggcttcatcaaggaagtccttcatcccgactggctggccaactcaatcctggttcagaagaaaacgggacaatggcgcatgtgtgttgactacactaacttcagcaagtcctgtcccaaagatccttttgggttgcctcgcattgaccaggtagttgactcaatagccggctgcgagcttctcagctttttggattgctactcaggttaccatcagatccgactaaaggaatccgactgcttaaagactttattcatcacgcccttcggggcatactgctacatcaccatgcctttcggattaaagaatgcaggagcaacttatcaacgcatgatccagagatgtttttcaactcagattggtcgcaacgttgaagcttatttggatgatgtagtcgtcaagaccaagcagaaagatgatttgatcacggacctagaagaaacctttgcaagcatccgcgctttcaggatgaaattaaaccctgaaaagtgcatcttcggagtaccattagggaaactacttggatttatggtgtctcatagaggcatacaagccaacccacagaaaatcaatgccatcctcaacatggaaccgccaagttctcagaaagatgttcaaaagctgattggttgcatggcggcgctcagccggttcgtttcacgactcggcgagcaggggatgccctttttcaagctgttgaagaaaacagacagtttccagtggggacccgaagcccaaaaagcctttgaagacttcaaaaaactcctcactaccccaccggtcttagcttcaccgcatccgcaagagccgctgctgctatatgtgtcggtgacttcccaggtcgtcctggccgactccaagacaagatatcctcagattcaaaagctattgtatggcgttttaattaccatcaggaagctatctcattacttccaaggtcactcggttacagtggtcacgtcgttcccactcggcgatatacttcataatcgcgaagcaaatgggcggatcgcaaaatgggccctagaattgatgtccttggatatatcgttcaagccgcaaacttcgaccaagtcccaagccttagctgactttgtcgccgagtggaccgagtgccaagaagttatgaaacagtggtcctgccttgatgacaacatgaccgcttatcggcaagaggtacgcaagttggaggataagttcgttggactcgaactcacccatgttcttcggcacaataacgaagcagctgacaggctagctaattttggttcaaaacgcgaagcagctccttctgacgtgtttgttgaacatctttacgaaccaaccgtaccaaggaaagaaacaatcgaggccacggacgctcaagacgtaggtatgattgaagccgactggagagagccccttataagatttctgaccaaacaagaattcccagaagataaagatgaagcagagcggatctccaggcgcagcaggctctatattattcatgagaccgagccgtacaagaaaagtccatcaggaatcctgcaacgctgtgtgtctttggaggaggggagacagttgttaaaggatatagattctggcatctgcggcaatcatgctgccgcacggaccattgttggcaacgcttatcggcaaggtttttctggcccacagttgtgtccgatgctgacaagattgtgcagacatgtgaaggttgtcaatttttcgccagacaaactcatctaccagctcaagagttgcagactatcccgttgtcttggctgtttgcggtttgggggcttgacatggtcgacccgtttaaaatggcagtcggcggttatactcacctctttgtggctattgacaaattctccaagtggattgaagctaaaccggtcatcacaaacatga

SEQ ID NO: 82454 - DNA, 2940 bp, Oryza sativa
  Clone ID: PAT_MRT4530_81882C.1
atggcacggggctccgcaccgctcgacggtagcgtgctgctgccttctcgcatcgtgagcgagaggcaggccgggctgccgcgccgattcatgccggaatctgccaccggccgggaggtggttgcgctgggtgagggacgcccggcgccacactacccggggcggtccgtattcttcctttccttcgcaatggcagggctggtcccgccattctcttctttcttcatggatgttctggagctttatgatctccagatggcgcacctcacccccaatgcagtaatgacgttggccatcttcgcgcacctgtgcgagatgttcatcggggtgcgcccatctctctggttgttccggtggttcttcaccgtacagccggtgtcgccaccgtcggtagtcggtggctgctacttccagccgcgggggccggtgctgaaccgctatattccctgcgtccttcgcaagaagtgggatcactggaagagcgactggttctacacccctctcgccgacgaagcgcgcctccgacttccgagccagcccccagcgcaggcctccagctggcgggcgccggtagatctgggagacggctacgacgccgttcttgaccgcctggctggtttgcgatcccaggggctcacgggggccatggtgttcggcgactaccttcgtcgccggatcgcgccgctccagcggcacgcccggggcgcctgggagtacaccgggcccgaggacatcatgaggacccaccaggggcgcaaatgggactgggaccctgaggacttcaggatagtggtccaacgggtgctgaatctcagctccgtggaggcatccctcatccctcaaggggtccttcccctctgctgcgatccagagcgcgccaacatcctgaccatcatgcaggaggtcggggcgtcgggggagcgggccccccgaggccacgatggcgcgggcgggagccgcaggggggaacaatctaccccgggagggggtcgtgcttctgggccccgtgacgggggcccggggggcagccgccctaccgacgcccgggggaagaggaaacaggaggataccccctccccatctcctccccgagggggcggggcggtgcgtgccagcagcaggcgcccgaagggtgctgtgccgacgtcgcagcccgagggggagcgaaaaaagaagcggctccgcaagatgggggggaccgaaccatgccggggaaacctcatctcccccccaaggtggtcgtttagccgacctcctcgcagcgagatcccgtcgcgcccttcccgccattccaagtccggccggtctgaggccgaggagacggcgaccgcggaggcccggaggcgggaagctgaccggcgagaagccgcaaaccgcctccgggaagccgaggaagctgcccaggaggctgtccgggctcgccaggctgaggaagccgcttgggaggaggccagactccaccgggccgaggagtccgtccgggagacggaggcggcgcgcgcacgccgggcggcctgccaagcccccgacccgactccgcccgaggcgacgacgacttccgaggccacccacgacgaggtcgcgggcgcaccgctcgggcccgacccctcgggcgacgctcaggacgagccagcttcgggggacgtccccgagtccggcacgtcgatcggcgggccgagccgtgcggcatccttaccgaggcggctctcccccatgccttccgctgccccactgagcgctgagccccttctgcaggccttggccaccgcgaacaccacggtgttggacgggttaagtgcccagatggaggtcctgcaggcagagcgggcggagctcgacgcggcgtgggcgcgtgtcgaagaggggcgacgctcggtggaggccatggtggaggcgggccgcaaggcacaccgccggcacgcctcagagctcgaggcccgtcgtagggacctggcggagatcgccagggaggtggaggaggagcgggagactgccctcattgccaccgccgtgtttaacgcggcgcgggacgacctctgcctccaatacgggagccggggggcggagctagagaagaagctcgacgcgtcccggcagcgcgaagaggcccttgaggctcgcgccacggtgctggaggagcgcgcccgcgccctggacacgaaggagagggaactggcgggtcgcgaggccgccgtcgccatccgggaggcaacgctggcggcgcacgaggccgcctgcgccgaagaggagtccgcactccgcctccacgaggacgagctcactgagcgggagcgagctctcgaggaggccgaggccgcggcgcagctgcgggaggagcaggcgcgcctcaatctggaaggcgcccgcgccgagagggccgcactggatcagcgggccgctgaattcgaggcgcgggcgaaggagctggacacgagagcgcgcagcggcggggcggccgcgggtgacggcgacctagccgcccgcctcgcagccgccgaacacaccatcgccgagctgcagggcgcgctggactcgtccgccggggaggtcgaggccctccgcttggcaggtgaggtagggcccggcatgcttcgggacgccgtctcccgtctagaccgcgccgggcggcaggcgagcctctggggcgggcggaccgcgaaatatgccgccaaccaggggggcctcgcccagcgcctctcagagatggccgggaccctccagcggctccccgaggagctcgaggagacgatcaagtcatcctcgagggacctcgcccggggggcggtggagctcgtccgggacgccgccgaccacatcgtccacagcttcgagggtacggcccctcggctcgcgttcgccctcgactccgacgaggagggcggtgacggtggtgcggacgacagcgacgacgaggccggcgacccgggcgcgtcggcgtga

SEQ ID NO: 82455 - DNA, 3183 bp, Oryza sativa
  Clone ID: PAT_MRT4530_81883C.1
atggcacggggctccgcactgcttgatggtagcgtgctgccgccttcccgcatcgtgagcgagaagcaggctgggttgccgcgccgctttatgccggaatctgccaccggccgtgatatagtcacgctgggcgagggacgcccggcgccagactacccggggaggtccgtcttctttctcccctttgcaatggcagggctggttccgccattttcttctttcttcatggatgtcctggagttctacgatctccagatggcgcaccttacccccaacgcagtgatgacattgggcatcttcgcacacctgtgcgagatgttcattggggtgtgcccatctcttcggctgttccggtggttcttcaccgtgcagtcggtatcgccaccgtcggtggtcggcggctgctatttcctgccgcgggggccggtgttgaaccgctacatcccctgcgtcctccgcaaaaagtgggatgactggaagagcgactggttctacacccccctcgccgacgaagcgcgcctccgacttccgagccagcccccggcgcaggcctccagctggcgggcgccggtagatctgggggatggctatgacgccgtcctcgaccgcctcgcgggcctgcgatcccaggggctcaccggggccatggtgtacggcgactacctccgtcgtcggattgcgccgctccagcggcgcgctcggggcgcctgggagtacaccgggtccgaagactacatgcggacccaccagggagtcagatgggattgggctcccgaggacttcaagatactggtccaacgtgtgctaaatctcaactccgtggaggcgtccctcatcccccacggtatcctccccctctgcagcgatccagatcgcgcctccatcttgaccattatgacggcggtcggggcctcagaggagcaggctcctaagggccatgacggcgcaggcgggagccgccgaggggatcaatctacccccggagggggtcgtgcttctgggccccgcgtcgggggctcggggagcagccgccctaccgacgcccgggggaagaggaagctgggaggaacacctcccccatctcctccccgagggggcggggcggtgcgcgccagcagcaggcgcccggagggggccgcgccaacatcgcagcccgagggggagcgcaagaagaagcggctgcgcaagatgggggagacagaaccatcccggggaaacctaatttctcctccaaggtggtcatttaaccgaccccctcgcagtgatatcgcatcgcgttcctcccaccatcctaagtccggccagtccgaggccgaagatccggcggccgcagaggcacggaggcgggaatctgaccggcgagaggccgcagaccgcctacgggaagctgaagaggccgcccgggaggccgcccgggctcgccaggctgaggataccgctcgggaggaggccgcccgggctcgccaagccgaggataccgctcgggaggaggccgcctgggctcgccaagccgaggataccgctcgggaggaggccacccgggctcgccaaggcgaagaagccgctcgggaggaggccgcccgggttcgccaggctgaggcgatggcggcttccgaggcagttcgcgacgaggccgcgggcgcctcgcttgggtccaccccttcgggtgacgcccaggaccaaacaggtccgggggcggctcgcgacgaggccgcgggcgcgtctattggcgggccgagccgcgcggcatcttctccaaggcagcccttccccacgccttccgtcgccccgctgagcgcagagccccttctgcaggccttagccgccgcaaataccgcagtgttggatgggttaaatgcccaggtggaggccctgcaggcggagcgtgcggagctcgacgccgcatgggcacgtgtcgaggaggggcggcactcggtggaggccatggtggaagcgggccgcaaggcacaccgccggcacgtctcagatcttgaggcccgcaagacggcactggcggagatcgctcgagaggtggaggaggagcggggggctgccctcatcgccaccactgtgatgaacgaggcgcaggactccctccgccttcagcacgggaactgggaggcggagctgaagaaaaagctcgacgccgcccagggggtccttgatgccgccgctgcccgagagcagcgagcgacggagaccgaagcggcgctccggcggcgtgaagaggccctcgaggcgcgcgccatggcgctggaggagcgcgcctgcgtcgcggagaaggacctggcggaccacgaggccgccgtcgcctcccgggagacaacgctggcggcgcacgagtctgcctgcgccgaggaggagtccgcactccgcctccgcgaggacgcgcttaccgagcgggagcgagctctcgaaaaggccgaggccgaggcgcaacggttggcggacagcctgtccctccgtgaggcagcgctgacggagcaggcccgccgcaatttggaatccgtccgcgccgagagagccgcactggagcagcgggctgccgacctcgaggcgcgggaaaaggagctggacgcgagggcgcgcatcggcggggcggctgcgggcgaaagcgacttagccgcccgcctcgcagatgccgaacacaccgtcgccgacatgcagcgcgcgctagactcatccgccggggaagccgaggccctccgtttggcgggcgagatagggcccggcatgctctgggatgcagtctcccgtctggatcgcgccggtcggcaggcgggcctctggaaagggcagacaataaagcctgccgccaacctgggaggccttgcccagcgcctctcgaagatggccggggctctccagcagctccccgaggagctcgagaagaccatcaagtcatcctcgagggacctcgcccaaggagcggtggagctcgtcctggcgagctaccaggccagggaccccaacttctctccgtggatggcgctggacgagttcccacctgggactgaagacagcgcgcgcgcgcaggtccgggatgccgccgaccacatcgtccacagcttcgagggctcggcccctcggcttgcgttcgcccccaactccgacgaggagggcgatgccagcggtgcagacgacgtggaagacgaggccggcgacccgggcgcatcggattga

SEQ ID NO: 82456 - DNA, 2607 bp, Oryza sativa
  Clone ID: PAT_MRT4530_81884C.1
ctttttcaaaaccccatttcattccaacctttcaaatccgccatcaccacctttttttccccacacacacacacacacacacacacacatatacacattgacacatagcagtagtgtgtgtagtactagtacaaacacacacaacacaagcttctctcttcccttcttggttttgcccaagaaacgaaaaccaaaaccaaacccaagaactctcctcaaaagaaccacctcacttcatagctctcacaaggctcacgcacacatagagcttgtgagagcttcttctttctctctctcttgtccttgtggtagctggtgcttaaaggaggaggaggtgaggaggaggcgcaatgtcggagcagccattgccgcagcctcggagcagcatgcgggaggcgctggagaaggaggacaaggagaaggcggcggcggccaaggagaaggccgccgtccccaagaacggcggcaacgggggaggaggcaagaacggcggcggtaacggcggcggcaacggtggcgccggcgcccagcccggggaggagacgacgagggagattcaggtggtgagggaggcgtaccggagggagccggcggcgccggcgtacgtgatgccggaggagccgccggccatggtggagctcgtcgggtggtacctctacggcttctgctcctacttcatcacccacctgctgctccccgtgctgttcccggccatcatcacccaggtcgccttccccgcctccgacttcaccccggacaccaagtacatcgtcaagggcgccacctgctccatccatgagatgtccatgtaccagaggctgaccaagcattcgattgccattgatggatcccggctgtccccgttgggctggagtggcctatcatgggcgattggaatcctcattgcggctccgatcctcacccaggctgcacaccaccttgaccgtggccagtatcagtcgctcatcctcattgccgcgacatcgtttggctcattcttctgcctcctcactggcttcttcaagacagtctgggtgttcctcttctacatcctgttcattggtgcatccatcattgttgctgaggctgtgcatacacgcaatcttggactcatgatccgtggccttgcagcacatgactctggcaagcaccttgtccttcgccgtcgtgctgctgccagtcagctcaccctgtattgcactgccattggtggcattggggctgcgctcatggctgctttcatgtaccacatgcttcggcgcactgaccagctcacaggcctttgggtcgtctccatcttcagtggccttatctggttcattggtatctgccatggtctcttcacaaaccgacccagcagctcatcgcccaccacagcatttgagcctaacttcttcaccaagctcagctacagcatgacccttgtgcgatacccacaggccatcggaagcttggttgcagtgttcctttcatctttcgccacaatgtgcatcttcaccagtggcacattgtatgctattggtggtgtttgcatcaagccagtccttgtgctcgtgctctggatactctacttcctgttcccgttgatctcacttccgctgctgcacccaatccagatcatcatccgtgctgatgctgttcgcatgcagctgcttgggttcatcatctgcctatttgtgtctggtgctggtttctacttcaagagccacaggtggagagccgctcacatcattgtgatcgctcttgtccagagcacagccaatggtgtgctgtactcatttggtcgcattctgctgctcgatgcctcgccaccagggaaggagggtgcttttgcggtgtggtatgcatttgtacgctgcattggtgctatgattggcttcgctgctgcatccgctgggcctgggcgtgctggaggatcgtttgctgctgcgttcctaggcagcttcctcggcatcattgttctgatctttggtaatgtgagcaacatcggggcgctgaaggctgctgggcatctgaagggaatggaagacgagaagaggctgggcatggagaaaggggaaggcatgagtgcggttgccgattccggcgagggaagggggagggtatgatgatgattaaatgggcttgtgggaaggaaagattggaaaattgctgtggaggttgtgtttgtgagagggatttgttcttctttcttgtttctttcttgttcatgtttcagtgacactgttaattcggtgctttgccccccttggatgcatgatgatgatgacatagtggtagaggaagtgtgctagttgttaatgtgttattctttgcttggaagacaattgtaactgatgatatggttctttgttcatcgccaccgaaattctctctggcagtcatgcttcgtggttgcttttctgttgaaaatgtgattgtcaaagtgaaataaaacccttatataatatttctattgcattgtgcaaacaaatttgcgcaatcttgtcacctgatttctggagggtgaaatgcaagatactattgtcactatttcctgtcaaaacaagaattattaaaaataagtccgggagctggaaactgaccggtgtaccaggcaacattgtt

SEQ ID NO: 82457 - DNA, 1956 bp, Oryza sativa
  Clone ID: PAT_MRT4530_81885C.1
atggggaaggaggggaagcggcgggaggaggaggggaggcggaggaggaaggggaaggggaagggggcgggggagatggtgctgcaggaggaggaggaggacgcggcgcccgcgatggggtgctggatccgcatcccgcgccggctcggcggcggctgcatgtcgtcgcgctccaaggtcgactcctccaccaccaccagcggcggcggcggcggcggcagcgctcgcgtcggcggcgaaagcaaatcagcgaatgatggttgtcgagaccattcagttcaaccaatggcctctggttccacaacatccagtaacactggaagcatctcaccttcgtccatagtcggagaggaacttaaactagctttccaactccgtaggtttacatttaatgaacttaagtgtgccacaagaaacttccggcctgagagtctccttggtgaaggaggttttggctgtgtctttaaaggttggattgaggagaacggaactgctcccgtaaaacctggcacaggattaacggttgctgtcaagacacttaaccatgatgggctgcagggccataaagagtgggtggcagaagttgattttcttggaaaccttcaacatccacacctagtgaaattggttggttactgcatcgaagatgaccaaaggttgctagtgtatgaatttatgcctcgtggaagcttggagaaccatctttttaggaggtctttacctctcccatgggccatcagaatgagaatagcacttggtgctgctaagggccttgcttttcttcatgaagaagctgaaaggccagttatctatcgggatttcaaaacttcaaatattcttttagacgcggactacaatgcaaaactctctgattttggactagctaaagatggccctgagggtgataaaacacatgtatctactcgagtcatgggaacttatggatatgcagctccggagtatgtcatgacaggtcacttgacatcaaagagtgacgtgtacagctttggagtggtgctactggagatgatgtcaggcagaaggtcaatggacaagaataggccaaacggtgaacacaacctggttgaatgggcgcgtccttatcttggagaaagacggcgattctataggcttgtagacccccgtctggaggggaacttctccataagaggcgctcagaagacagctcagctggcctgtgcctgccttaaccgggatcccaaggccaggcctctcatgagtcaagtggtcgaagtcctcaagcccctcctgaacctcaaagacatggccagctcctcatacttcttccaatccatgcagcaggagcgtgccgcaagcctcggcaacccaattggcagccaaagcatgaaggcacagggcaccttcgcgcgcaacgggcagcagccaatgaggagcctctcctatggcccgcacgcctccccgtaccggcagtccccaaggcccaacaacggcaaactgcaatgagagagtccttggtgctcattctgccatccattcaacaatgatcagtgcaagactggacttcctatccaacctgggtgcattggtggtgcacccaaccaacctaccatggcacctgggagcaccctgtgtcgtggaggaaaccgggtttccagaacgactagaactgcgcgcaaacgtgtacaatgtgcaaactttcatcttgtcgcttaagcttctacatttccaattctagcttacccttgacttgggagagggggtggatcaaaccgggtttttcttttgcttttcttctgaacaaatgctcagactgaggtgcttaggtttgccccttcctggagaatgctgggtttgggctcttactcgcactgtcatcacctgtcggtcgccttcgccttgtaattaatcgccatgtggagaatggcaaaaaaaaaaggggaggcaattggtcgtcatcaaaaaaaaaaaaaaaaa

SEQ ID NO: 82458 - DNA, 6822 bp, Oryza sativa
  Clone ID: PAT_MRT4530_81886C.1
atgactggcttcgtcttggagctgcggggcatgtgcgtggtcctggggtatccacacggagtggactaccaggccaggccgcttccggagcaggagggtgacgatgcagagccccacgctgcttgggaagtcactgcagtgatcctcgctggttctcccgagcggacctcgctgacagtcaccgcgggtggagactctttccccgccgcttgccagaacgccgctctcctcgccatcggcactcttcaccagcgctacccggacgagttgcagcactcgccctaccgctaccaccctcgtcgcggaggagcccgcgaccacgccaccttccgggatgctagttcggaggatgacgctaccatcgtgcacttggcgcgcatggtggaggcatacgacgcggctcgtatcgacttccatcagatggtgcgccgtgggatggtcgagaacaacatgaagatcctggagctgcgtcaggagaacctgcagctcaagaaggacctagacgcggtggaggcgcagctgcatcagctcaagatcgcccagggagaggtctgccgccccaagcgtcgccgcgtctgccgcagccagaagatcaccgcccgcaagagcacctccaggcccgagcttgttcgtcagtccctagcgtggacctgcttcgtcgagaccccccgtgccgagcccgcgcccgtggttccccaggagggggaagcctccggcattggtagcacggaggatgcgctgttgctcaccttccgtcctggcccgtcgcagcggagaaatgctgttaccggtgatggcaaccaacccgaaggcagcaaccacaaccaccaaggcaacccacctccacctcctcctcctcctccgccaccaccaccagacaccaacgccattctcacccaaatcctcgcccagcaagctaatatgatgactgctttcctccaccacctccaaaatccgccacaacttaatgctccaccaccacccccacaacactctagactcgccgagtttctccgcatctgcccacctaccttctctagctccaacaaccccgtggatgtgttggattggttgcatgccgtggggaaaaagctagacactgtgcagtgcagcgatgaggagaaagtcatcttcgccgcccaccagctgcagggacccgcatctctatggtgggaccatttccaggctacacagccagagggacagcctattacttgggcccgcttcaccgccgctttccggagaacccatgtgcccgccggagtcgtggcccttaagaaaagggaattccgagagttgaagcaaggcaaccgctccgtgatggagtatttgcacgagttcaacaatctagcccgttacgctccggaggatgtgcgggaagatgaggagaagcaagagaagttcctggcaggaatggaccctgagctgtccgtccgtctagtctccggggattatccggatttccaacgtctggtggacaagagcatccgcttggaagccaagcacaaggaactggagtcgcacaagcgccgcttggcgaatttccgcaaccaacagggtgctaaccaaagggtccgctacaccaatccctatccagggggatcctcctcgcagcagcagcaacctcgctccgcgcctcgacctcaattcgtggtgcgcgtcccacagccgcagcagcagcagaatcagcaagggactcgtgcaccccgtcctcctacgccagccgtgcagcccgttcaaggccgcagggacgctcaaggtcagcagcgtctgtgcttcaactgtttcgagcccgggcactttgcggataaatgcccgaagccaaggcgtcagcaaggccaagcgcctccccgctccaacaacggcgggaaggatgtcattcgaggtcgtgtgaatcacgtgacggccgaggacgtgctgacaactccagacgtcatcgttggtacgttcctcgtccaatccatccctgctactattttgttcgactctggagcttcccactcgttcatatctgtgccattcgtggggagaaatcagttgggggtagaaaggcttagaaaccctctgctcatcaccacccctggcggggttatgacagcaaagtattatagccctgccgttcctatagaaatccaggggattccttttccctcggatctgattctgctagacacaaagaacttggatgtgatccttgggatgaattggttggctcaattccaaggagtagtggactgcgcgagacgcactgttactctgtaccgaggaccagaacaaccggttgttttctttgcacccccaacctctgtcagaagttcagaactgcatcagatagaactgtcagaaatccccatagtcagagagttcggagacgtgtttccggaagaactacctggtatgccgcccaagcgagagattgagttccggatagatcttgctccaggaaccactcctctgtacaagcgaccctaccgtatggcagcaaatgaactggccgaagtaaagaaacagttggaagagttgaaagaaaaggggtacatacgtccgagtacttccccatggggtgctcctgtgatttttgtggagaagaaagacaagacgaaaaggatgtgcgtcgactacagagctctcaatgaagtcaccatcaaaaacaagtaccctcttccccggatcgatgatctgttcgatcagcttaaaggtgccaccgtattctccaagattgatctccgttccggatatcaccaattacgtattcgtgaagaagatattccgaagaccgcattcactacgcgatatggactgtatgaattcacggtgatgtcgttcggcttaaccaatgctcctgccttcttcatgaacttgatgaacaaagtgttcatggaatacttggataaattcgttgtggttttcatcgatgacattctgatatactcacaatcagaggaagaccatcagcaccatctccgtctggtgttgggaaagttgcgggaacatcaattgtatgccaagcttagcaagtgtgagttctggttgtccgaagtcaaattcttggggcacgtgatatctgctaaaggagttgctgtggaccccgaaacagtgaccgccgtcaccgattggaagcaacccaagacagtcactcagattcgcagtttcttaggtttggcaggatactatcggagattcatcgagaacttctccaaaatcgctcgacccatgacacagttgttgaagaaagaagagaagtttgtgtggagcccgcaatgcgagaaggcgttccaaactctcaaagaaaagctggacggtcatgtggtagcctatgcttcacgtcagctacgacctcatgagggcaactaccctacgcatgacttggaattagccgcagtggttcatgctctaaaaatctggcggcactatctcattgggaaccgctgtgaaatatatactgatcataaaagtttgaaatacatcttcactcagtcagatctgaatcttcggcaaaggagatggttagaactcatcaaggactatgatgtgggaattcactatcaccctggtaaggccaacgtggttgccgacgctctaagtcgaaagagccattgcaacactcttaacgtccgtggcattccacccgaacttagtcaacagatggaagccctgaacctaagcatagttggtcgcggattcttggctgcgttagaagccaagcccaccttgctcgatcaaatccgcgaggctcagaagaatgatccggacatgcatggactcctcaagaatatgaaacagggtaaggccgctggtttcacagaggatgaacacggaaccttatggaacggaaagcgggtatgcgttccagatagcagagaacttaaacagctgatacttcaggaagctcacgaaagtccttactccattcacccgggcagtaccaagatgtacttagacttgaaggagaaatactggtgggtcagcatgaagcgggaaattgcagagtttgtggccctatgtgatgtgtgccagcgtgtcaaggcagaacaccaacgaccggccggacttctccaacctctccaagtgccggaatggaaatgggatgaaattgggatggatttcatcaccggcctcccaaaaacccaaggtggatatgactctatatgggtaatagtggatcgattaaccaaggtagctcgattcattcctgtgaagaccacctatggagggaacaaactagcggagctctacttcgctaggatcgtgagtctccatggcgttcccaagaaaatcgtatctgataggggaagccaattcacctctcacttttggaagaagctccaagaagagcttggtacccgactaaatttcagcaccgcgtatcacccgcagacagatggacagaccgagcgtctaaatcagatcttagaagatatgctccgcgcatgtgtcctagatttcgggaagacttgggataagagtctcccctatgccgagttctcctacaataacagctaccaagccagcatacaaatggcaccctatgaagcgttgtacgggcgcaaatgccggacaccgctattgtgggaccaagttggagaaagccaagtgttcgggactgatatcctgagagaagctgaagctaaagtcagaatcattcgggataatctaaaggtggcacagtctcggcagaaaagttatgcagataaccgtcgccgtgatctggaattcgcagtggatgattttgtgtaccttcgggtcacgccattgcgaggtgtgcacaggtttcagacaaaagggaagctcgcacctcggtatgtgggtcccttccgtatcatcgctcgacgtggagaagttgcttaccagctggagttgcccgcctccttgggcaacgtgcatgatgtgttccatgtgtcgcaactcaagaaatgtcttcgagtgccatccgagcaggccgactcagagcaaattgaagttcgcgaagacctgacgtatgtggagaagccagtgaaaatcctggacaccatggagcgcaggaccaggaaccgtgtaatccgtttttgcaaggtccagtggagcaaccacgccgaagaagaagctacttgggagcgcgaagacgagctgaaggcagcccatcccgatctcttcgccaccgcccgggctgaggaagccgctaaggaggaggccgcccgggctcgccaggctgaggcaacagctgctgctggcgcgtcaactgggcccactccctcgggcaaccctcaggcgacagcctccggggaggcacgcgacgtggccgcgggcacatcgcctgggcccacctccccgggcgacgcccaggatcaaacgggtccgggggacatccctgagcccagcacgtcctccggggggccgagccgcatcgccttctctccaaggcggctcttctcctcatcttccgtcgccccgctgagcgccgagcccattctgcaggccttggccgccgcaaacaccgcggtgctggatgggtttagcgcccaagtggaggccctgcgcgcggaacgagcggagctcgaggccgcatgggcacgcgttgaggaggggcggcgctcggtggacgccatggtggaggtgggccgtaaggctcaccgccgccacatctcggagcttgaagcccgcaaggcggcgctggcggagatcgcccgagaggtggaggaggagcgagaggccgccctcatcaccaccaccgcgatgatcgaggcgcaagacaccctccgccttcagcacgcaagctgggaggcggagctgaagaaaaagctcgacgccgcccaaggggtccttgactccgccgctgcccgagagcggcgggtaacggagactgaagcggcgtctcggcggcgcgaggaggcccttgaggcccgtgccatggcgctggaagaacacgccggcgccgtggagaggggcttgacggaccgcgaggccgccgctgttctccgggaggcgacgctggcggcgcacgaggccgcctgcgccgaggaggagtgcgcgctccgcctccgcgaggacgcactcgctgagcgggagcgagctctcgaggaggctgaggccacgaccaaacggctggcggacagcctgtcccttcgcgaggcggcgcaggaggagcaggcgcgccgcaatcttgaatgcgtccgcgccgagagagccgcactggagcagcgggctgccgacctcgaggcgcgggaaaaagagctggacgcaagggcgcgcgtcggtggggcggctgcgggcgaaagcgacttagccgctcgcctcgcggctgccgaacacaccgtcgctgacatgcagcgcgcactagattcctccatcggggaggccgaggccctccgcttggcgggcgagatggggcccgacatgctttgggactcggtctcccgcatggatcgcgccggtcggcaagcgggcctctggaaaggccagacgaggatgcgccccgccaacctggaaggcctcgctccgcacctcaacaggatggcctgggtcctcgaacaactccccgaggagctcgagaagaccatcaagtcatcctcgagggacctcgcccggggggcggtcgaactcgtgctagcgagttaccaggcccgggaccccaacttctccccatggatggcgctggaggagttccctcccgggaccgaggacgatgcgcgcgcgcgcgtccgggatgccgccgaccacatcgtcaacggcttcgagggctcggcccctcggctcgcgttcgcccccagctccgacgaggagggcgatgccagcggtgaggacgacggtggcgacgaggccggcgacccgggcgcgtcagaatga

SEQ ID NO: 82459 - DNA, 3144 bp, Oryza sativa
  Clone ID: PAT_MRT4530_81887C.1
atggcacggggctctgctctgctcgatggcagtgtactaccgccttcccgcatcgtgaacgagaggcacgccggactgccgcgccgcttcatgccggagtccgccaccggtcgggagatagtgatgctgggcgaggggcgcccggcaccagactacccggggcggtccatcttcttcctccccttcgcgatggctgggctggtcccgccattttctcatttcttcatggatgtcctggagttctacgatctccagatggcgcacctcacccccaatgcggtgatgacattggccatcttcgcacacctgtgcgagatgttcattggggtgcgcccctctcttcagctgttccggtggttcttcaccgtgcagtcggtgtcaccgccgtcagcggttggcggctgctacttccagccgcgggggccagtgttgaaccgctacatcccctgcgtcctccgcaagaagtgggacgactggaagagcgaccggttctacaccccccttgccgacgaagcgcgcctccgacttccaagccagcccccggcgcaggtctccagctggcgggcgccggtagatctgggggaggactacgacgccgtcctcgaccgcctggcgggcctgcgatcccaggggctcaccggggccatggtgtacggcgattatctccgtcgccggattgcgccgctccaacggcgcgcccggagcgcctgggagtacactgggcctgaagactacatgcggacccaccagggagccagatgggattgggctcccgaggacttcaagatcgtagtccaaagggtgctgaatcttagctccgcggaggcgtctcgccttcctcaagagatcctccccctctgcagcgatcccgaccgcgtctccattctaaccattatgatgggggtcggggcctcagaggagagagcccctaagggccacgacggcgcgggcgagcgccgccggggggaacaacctgccccaggagggggtcgtgcttctgggccccgcgtcgggggctcggggagcagccgccctgccgtcgcccaggggaagaggaagctgggaggaacacctccgccatctcctccccgagggggcggggcggtgcgtgccagcagtcggcgcccggagggggccgcgccgacatcgcagcccgagggggtgcgcaagaagaagcggctccgtaagacgggggagacggaaccatgccggggaaacctgatttcccctccaaggtggtcattcaaccgaccccctcgcagcgatgtcccgtcgcattcctcccgccaccccaagtccggccagtccgaggccgaagatccagcagccgcagaggagcggaggcgagagtctgaccggcgtgaagccgcagcccgccttcgggaagctgaagaggccgcccgggaggccgcccgggttcgccaagcggaggaagctgctcgggaggaggccgcccgggctcgccaagccgaagaagctgcccgggaggaggccacccgggctcgccaggctgaggcgacagctgctgctggcgcgtcacttgggcctactccctcgggcggccctcaggcgacatcctccgaggcggctcgcgacgaggccgcgggcgcatcgcctgggcctacctcaccgggcgacgcccatgatcaaacgggcccgggggacatccccgagcccagcgcatcttccggggggccaagccgcgtcgccttttctccaaggcggctcttctcctcatcttctgtcgccccgctgagcgccgagccccttctgcaggccctggccgccgcaaacaccgcagtgctggatgggttcaacacccaagtggaggccctgcgtgcagaacgagcggagctcgaggccgcatgggcgcgtgttgaggaggggcggcgctcggtggacgccatggtggaggtgggccgtaaggcccaccgccgccacatctcggagcttgaagcccgcaaggcggcgctggcggagatcgcccgagaggtggaggaggagcgagaggccgcccttgtcgccaccaccgcgatgattgaggcgcaggactccctccgccttcaacacgggagctgggaggcggagctgaagaacaagctcgacgccgcccaaggggttcttgactccgctgctgcccgagagcggcgggcaacggaagccgaagcggcgtcccggcggcgcgaggaggcccttgaggcccgtgccatggcgctggaagaacacgccggcaccgtggagaagggcttcacggaccgcgaggccgccactgctctccgggagacgacgctggcggcgcacgaggccgcctgcgccgaggaggagtccgcgctccgccttcgcgaggatgcactcgctgagcgggagcgagctctcgaggaggccgaggccacgacgcaacggctggcgaacagcctctccctccgcgaggcggcgcaagaggagcaggcgcgccgcaaccttgaatgcgtccgtgccgagagagccgcgctggagcagcgggctgccaacctcgaggcacgggagaaagagctggccgcgagggcgcgcatcggtggggcggctgcgggcgaaagcgacttagccgctcgcctcgcggctgccgaacacaccgtcgctgacatgcagcgcgcgctggattcttccatcggggaggccgaggccctccgcttggcgggcgagatggggcccgacatgctttgggactcggtctcccgcatggatcgcgccggtcggcaagcgggcctctggaaaggccagacgaggacgcgccctagcaacctggaaggcctcgctccgcacctcaacaggatggcctgggtcctcgaacgactccccgaggagctcgagaagaccatcaagtcatcctcgagggacctcgcccagggggcggtcgaactcgtgctggcgagctaccaggcccgggaccccgacttctctccctggatggcgctggaggagttccctcccggaaccgaggacgacgcgcgcgcgcgcgtccgggatgctgccgaccatatcgtcgacggcttcgaggggtcggcccctctgctcgcgttcgcccccagctccgacgaggagagcgacgccagcgatgaggatgacggcggcgacgaggccggcgacccgggcgcattggaatga

SEQ ID NO: 82460 - DNA, 2670 bp, Oryza sativa
  Clone ID: PAT_MRT4530_81888C.1
atggcacggagctccgcaccgctcgacggtagcgtgctgccgccttcccgcatcgtgagcgagaggcaggccgggctgccgcgccgattcatgccagaatccgccaccggccgggaggtggtcgcgctgggcgagggacgcccgacaccacactacccggggcggtccgtcttcttcctctctttcgcaatggcggggctggtcccgccattctctatttttttcatggatattctggagttttatgatctccagatggcgcacctcacccccaacgcgataatgacgttggccatcttcgcgcacctgtgcgagatgtttattggggtgcgcccatctctccggctgttccggtggttcttcaccgtacagccggtgtcgccgccgacggtagtcggtggctgctacttccagccgcgggggcaggtgctgaaccgctacattctctgcgtcctccgcaaaaagtgggatgactggaagagcgattggttctacacccccctcgccgacgaagcgcgcctccgacttccgagccagcccccggcgcaggcctccagctggcgggcgacggtagatctgggagacggctacgacgccgttcttgaccgcctggcgggtctgcgatcccaggggctcacgggggccatggtgttcggtgactaccttcatcgccggatcgcgctgctccagcggcgcgcccggggcgcctgggtgtacaccgggcccgaggactacgtgaggacccaccaggggcgcaaatgggacttggaccctgaggacttcaggatggtggtccaacgggtgctgaatctcagctccgtggaggcatccctcatcccccaaggggtcctccccatctgctgcgatccagagcgagttttcactcacccgtttctttttgtcttctggtttttcttctgcctaagcgagatcccgtcgcgccctccccgccattccaagtccagccggtctgaggccgaggagacggcgaccgcggaggcccggaggcgggaagctgaccggcgagaagccgcggaccgcctccgggaagccgaggaggctgcccaggaggccgtccgggttcgccaggctgaggaggccgctcgggaggaggctagactccgccgggccggggagtccgtccgggaggcagaggcggcgcgcgcacgccaggcggcctgccaaacccccgacccgactccgcccgaggcgacgccgacttccgaggccacccacgacgaggccgcgggcgcgccgctcgggcccgacccctcgggcgacgcttgggacgagccaggttcgggggacgcccccgagtccggcacgtcgatcggcgggccgagccgcgcggcacccacactgaggcggctctcccctctgccttccgctgccccactgagcgcggagcccctcctgcaggccttggccgccgcgaacagcacggtgctggacgggttaagtgcccagatggaggccctgcatgcggagcgggcggagctcgacgcggcgtgggcgcacgtcgaggaggggcggcgctcggtggaggccatggtggaggcgggccgcaaggcacaccgccggcacgcctcacagctcgaggcccgtcgtagggacctggcggagatcgccagggaggtggaggaggagcgggagactgccctcatcgccaccgccgtgctcgacgaggcgcgggacgacctccgcctccaatacgggagccgggcggcggagctagaggagaagctcgacgctgcccggggagtccttgacgccgccgctgcccgggaacggcgggcggcggagaacaaggcggcgtcccggcagcgcgaagaggcccttgaggctcgcgccacagcgctggaggagcgcgcccgcgccctggacgcgaaggagagaaacctggcggaccgcgaggccgcctgcgctaaagaggagtccgcactccgcctccgcgaggacgcgctcaccgagcgggggcgaactctcgaagaggccgagcccgcggcgcagcgactggcgaacagcctgttcctccgcgaggcagcgcgggaggagcaggcgcgccgcaatctggaaggcgcccgcgccgagagggccgcactggatcagcgggccgctgagctcgaggcgcgggcgaaggagctggacgcgagagcgcacagcggcggggcggccgcgggccacggcgacctagccgcccgcctcgcagccgccgaacacaccatcgccgagctgcagggcgcgctggactcgtccgccggggaggcgggcctctggggcgggcggtacgcgaagtacaccgccaaccaggggggcctcgcccagcgcctctcagagatggccggggccctcgagcggctccccgaggagctcgaggagacgatcaagtcatcctcgagggacctcgcccggggggcggtggagctcgtactggcaagctaccaggccagggaccctgacttctccccgtgggcagcactggaagatttccctcccggaaccgaggacggcgcgcgcgcgcaggtccgggattccgccgaccacatcgtccacagctttgagggtacggcccctcggctcgcgttcgccctcgacttcgacgaggagggcggtgacgacagtgcggacgacagcgacgacgaggccggcgacccgggcgcgtcggagtga

SEQ ID NO: 82461 - DNA, 1158 bp, Oryza sativa
  unsure (1)..(1158): unsure at all n locations
  Clone ID: PAT_MRT4530_81889C.1
atggaggaggcggcggcggaggtgccgtcctacttcctgtgcccgatctcgctggagatcatgagggacccggtgacgctggcgacggggatcacctacgaccggagcagcatcgagcggtggatgttcggcggcggcggcggcgacggggggaaggggacgtgcccggtgacgcggcggcagctggcgccggcggagcgggagggcgacgcccaaccacacgctgcgggggctcatccaggcgtggggacgacgacgatgctcggcggcggcggcaggcagcggcagctccccgcgctccgggagatcaaggccatcgccgccgagagcgaccgcaacaagcgctgcgtngaggccacgcccggcgccgtcgagttcctcgtctccgtcgtcgtccagagccatgccgccgcctccacctcagccagctcggacgacgacgacctgttcgactcggtgatcgattcccccatgtcgacgagctcgccggaggaggaggccctgggcgtgctctactccctcaagccgtccgagcccaccctgcgccgcgtcctcggcaaggacaatggcgtcggcttcctcgacaccctcgcctccgtgctccgccgcccgagctaccccggtaacgtcggagatcccccgggagcggatgatgccggtaagccccaagctggtgaagnaggtggtccgggtggtgtcccacggcgtgtcgtcgaagccggtgaaggcggcgctgcacgtgctgtgccggctgtgcccgtgggggcggaaccgcgtaaagcccgtaaagccggcccggtgccggcgctggtggagctcctcctccacgaggagggcggcggcgggcggcggcgcgcggcggagctggcggtggtggcgatcgaccaccctgtgcgggtgcgcggaggggaggtcggagctggtggcgcacccggcggggctcgccgtggtgtccaagagggcgatgcgggtgtcgccggcggccaccgagagcgccgtgcgcgcgctccacgccgtcgcgaggaacgcggcgacgccggccgtgctgcaggagatgctcgccgtcggcgtggtggcgaagctgctgctggtgctgcaggcggacggcggcgagcgcgccagggcgagggcgagggagatgctcagggcgaacgctag

SEQ ID NO: 82462 - DNA, 156 bp, Oryza sativa
  Clone ID: PAT_MRT4530_8188C.1
atggcgatggccggcccggcaccggcggtccaaggcggcgaccgacaaccggcaaagggtgtctcaccgaagcccgtccgccggttgccgtcgtcctcccgtggcttgccatcgccgttcgctgtcatcttcctccgcgccggccaccctcggtga

SEQ ID NO: 82463 - DNA, 371 bp, Oryza sativa
  Clone ID: PAT_MRT4530_81890C.1
aaaaatgatatttagtctcggtaggtgtcaccgactgggagtaaagatcaaaaagtttcactggctttttaaccgggacttaaaaatctttttagttctggttcctattgaaactaggactaatgtgattttttgccaaccggacaactctagcaaatatggcaaattaagtcgttatggatatgggtgtttgtgttggggggggattgataggagtgccgcgagacagactgtcgaatatccccgatggcttcgttttgaggtcgatgacactgaccggttgtctcaatctagtgaggcccaggatcacagttgacaactgttgcgaagacggcatgccctccttgatggtttagctaggtcatttcttc

SEQ ID NO: 82464 - DNA, 1329 bp, Oryza sativa
  Clone ID: PAT_MRT4530_81891C.1
atggaggaggcggcggcggaggtgccgtcctacttcctgtgcccgatctcgctggagatcatgagggacccggtgacgctggcgacggggatcacctacgaccggagcagcatcgagcggtggatgttcggcggcggcggcggcgacggggggaaggggacgtgcccggtgacgcggcggcagctggcgccggcggagcgggaggcgacgcccaaccacacgctgcggcggctcatccaggcgtggtgcgccgcgcacgccgtcgagaggttccccaccccgcgcccgcccgtcgactcctgccgcgtcgccgcgctcgtcgacgaggggacgacgacgatgctcggcggcggcggcaggcagcggcagctcgccgcgctccgggagatcaaggccatcgccgccgagagcgaccgcaacaagcgctgcgtcgaggccacgcccggcgccgtcgagttcctcgtctccgtcgtcgtccagagccatgccgccgcctccacctcagccagctcggacgacgacgacctgttcgactcggtgatcgattcccccatgtcgacgagctcgccggaggaggaggccctgggcgtgctctactccctcaagccgtccgagcccaccctgcgccgcgtcctcggcaaggacaatggcgtcggcttcctcgacaccctcgcctccgtgctccgccgcccgagctaccgttcgcgcgcgtatgccatcctcctcctgaaggcggtgacgtcggcgatgccgccggagcggctgatggcggtgagccccgagctggtggaggaggtggtccgggtggtgtccgacggcgtgtcgtcgaaggcggtgaaggcggcgctgcacgtgctgtgccggctgtgcccgtgggggcggaaccgcgtgaaggcggtggaggccggcgcggtggcggcgctggtggagctcctcctcgacgaggagggcggcggcgggcggcggcgcgcggcggagctggcggtggtggcgatcgaccacctgtgcgggtgcgcggaggggaggtcggagctggtggcgcacccggcggggctcgccgtggtgtccaagagggcgatgcgggtgtcgccggcggccaccgagagcgccgtgcgcgcgctccacgccgtcgcgaggaacgcggcgacgccggccgtgctgcaggagatgctcgccgtcggcgtggtggcgaagctgctgctggtgctgcaggcggacggcggcgagcgcgccagggcgagggcgagggagatgctcagggcgaacgctagggtttggaaggactcgccatgcttgcaagctcaccttaaggcttcttacccctcctga

SEQ ID NO: 82465 - DNA, 3207 bp, Oryza sativa
  Clone ID: PAT_MRT4530_81892C.1
atggcacggggttccgctctgctcgatggtagcgtgctgccgccttcccggatcgtgagcgagaggcaggctgggctgtcgcaccgcttcatgccggaatctgccaccggccgggagatagtcacgctgggcgagggacgcccggcgccagactacccggggcggtccgtcttctttctcccctttgcaatggcagggctggttccgccattttcttctttcttcatggatgttctggagttctacgatctccagatggcgcacctcacccccaacgcggtgatgacattggccatcttcgcgcatctgtgcgagatgttcattggggtgcgcccatctcttcggctgttccggtggttcttcaccgtgcagtcggtgtcgccgccatcggtagtcggtggctgctacttccagccacgggggccggtgctgaaccgctacatcccctgcgccctccgcaagaagtgggacgactggaagagcgactggttctacactcccctcgccgacgaagcgcgcctccgacttccgagccagcccccagcgcaggcctccagctggcgggcgccggtagatctggggaatggctatgacgccgtcctcgaccgcctggcgggcctgcgatcccaggggctcacaggggccatggtgtacggcgactacctccgtcgtcggattgcgccgctccagcggcgcgctcggggcgcctgggagtacaccgggtccgaagacttcacgaggacccaccagggagtgagatgggactgggctcctgaggacttcaagatattggtccaacgggtgctgaatctcaactccgtagaggcggccctcattccccaaggaatcctccccctctgcagcgatccagaccgcgcctccatcctgaccattatgatggcggtcggggcctcagaggagcgagctccaaagggccacgacggcgcaagcgggagccgcaggggggaacaatctaccccgagagggggtcgtgcttctgggtcccgtgacaggggtccggggagcagccgccctgccgacgcccggggaaagaggaagcagggaggaacacctcccccatctcctccccgagggggcggggcggcgcgtgccagcagtaggcgcccggagggggccgcgccaacatcgcagcccgagggggagcgcaagaagaagcggccccgcaagatgggggagacagaaccatctcggggaaacctcatttcccctccaaagtggtcgtttaaccgaccccctcgcagcgagatcccgtcgcgtccctcccgccattccaagtccggccagtctgaggccgaggatccggcggccgcagaggccctcaggtgggaatctgaccggcgagaggccgcgggtcgcctacgggaagccgaggaggccgcccaggaggccgcccgggcccaccaggccgaggaaaccgctcgggaggaggccgcccgggcccgccaggccggggaagccgctcgggaggaggccgcccgggcccgccaggccggggaagccgctcgggaggaggtcggatttcgccaggacgaggcgatggcgacttccgaggcagctcgcgacgaggccgcgggcgcgtcgcttgggcccactccctcaggcgacactcaggcgacaacttccggggcagctggcgtcgaggccgcgggcgcgtcgcttgggcctactccctcgggcgacgctcaggaccaaccgggtccgggggacatccccgagtccggcacttccatcggcggcccgagccgcgtggcatcctctccaaggcggctcttccccacgccttctatcgccctactgaacgcagagccccttctgcaggccttggccgccgcaaacaccacggtgttggatgggttaagtgcccaggtggaggtcctgcaggcagagcgggcggagctcgacgccgcgtgggcgcgtgtcgaagaggggcgacgctcgatggaggccatggtggaggtgggccgtaaggctcaccgccggcacgtctcggagcttgaaacccgtaagaaggtgctggcggagattgccaaggaagtggaggaggagcggggggctgcccttattgccaccaccgtgatgaacgaggcgcaggacaccctccgccttcaatacgggagctgggaggcggagctagggaagaagctcgacgccgcccagggggtgcttgacgctgccgctgcccgagaacagcgggcggcggagaccgaagcggcgtcccggcggcgcgaagaggcccttgaggcgcgcgccatggcgctggaagagcgcgcctgcgtcgtggagagggatctggcggaccgcgaggccgccgtcaccatccgggaagcaacgctggtggcgcacgaggctgcctgcgccgaagaagagttcacgctccgcctccgcgaggacgcgctcaccaaacgggagcgagctctcgagggggccgaggccacggcgcaacagctggcggtcaacctgtccctccgcgaggcagcgcaggaggagcaggcgcgctgcaatctggaaggtgcccgcgccgagagggccgtactgaaccaacgggccgctgagctcgaggcgcgggcgaaggagctggacgcgagggcgcgcagcggcagggcggccacgggcgaaagcgacttagccgcccgcctcgcagctgccgaacgcaccatcgccgatctgcagggctcgctggactcgtccgccagggaggtcgaagccctccgcttggcaggcgaggtagggcccggcatgctttgggacgccgtctcccgcctagattgcgccggtcggcaagtgggcctctggagagggcggaccgtaaagtacgccgccaaccagggaggcctcgcccagcgcctctcgaagatggccggggctctccaacggctccccgaggagctcgagaagacaattaagtcatcctcgagggacctcgcccaaggagcggtggagctcgtcctggcgagttaccaggccagggaccccaatttctctccatggatggcgctggatgagttccctcctgggaccgaggaccgcgcgcgcgcgcaggtccgggatgccgccaaccatatcgtcaacagcttcgagggctcggcccctcggcttgcgttcgcccccaactccgacgaggagggcaatgccggtggtgcagacgacagtgacgtcgaggccggcgatccgggcgcatcggattga

SEQ ID NO: 82466 - DNA, 262 bp, Oryza sativa
  Clone ID: PAT_MRT4530_81893C.1
aattaaggcctttcagcaccaccgtcccattggcaggggtaatttcatgcatagtgcaaaacaccatattttataaagtgtataagaccattcaagatggattgatttctaatacctactgctgtattaatatacagttaaaatttgcttatggggccttattccataataatgattttaaaagccatgttttattacccattgacactttttagatcacttagttattaaggttagtattactaatttccacctatttttt

SEQ ID NO: 82467 - DNA, 226 bp, Oryza sativa
  unsure (1)..(226): unsure at all n locations
  Clone ID: PAT_MRT4530_81894C.1
cgagatatcaaagatcttccttgcaaaagatatgcttccgcaccttgaatgcatatctataagagcattgaggaccaataatggttccatcaaagcccttctgcagttcaattgctgtnacacattctgccaaatctgcctttccaagctgtgaacatgctgagataagtgccaacatggttactgcatcagttttaacatttagggaactgtatttgccctgaag

SEQ ID NO: 82468 - DNA, 435 bp, Oryza sativa
  Clone ID: PAT_MRT4530_81895C.1
ttccagagagagccgagagaagagaaaggagaaggcgaggggggcggcggcgctccggtgactggagggtggcgacgtcggcggccacgcgtgttcccgagcagcacgcatccgaggagggtggtggccggcagagggagttagggaagaggccggaacggctagcgtaaaagcttgcttcggttggttagaggaggtggcggttgtggttgctatggggtgggagagaagggggaaaggggaaaaacggattcacctcgccgaggcaaagccaatggcgcgagggtttggacggcgccgattacttcgtgacgacggagggcgttggcggcggcgtgcgcgtgcacggcatgcgcgcttgcgggaggaggaggggcggctcagctatgggccgacttgggccgcgcgagagagaagaagaattcggcccaaagt

SEQ ID NO: 82469 - DNA, 933 bp, Oryza sativa
  Clone ID: PAT_MRT4530_81896C.1
atggccgtcctgtggaccgtctccctcctctactcctacatcctcctcttcttcctccgccgcggcgcccccgtccctcgcctccgacctatgcccgagcccgacgacgacgccgctcgtcgccgccgccgccgccccgtctgcgtgattactggggcgacgtcggggctgggcaaagcggcggcggcggcgctggcgcgggaggggtaccacgtcatcctcgctgggcgttcttcacaattgttatctgagactgttcaacaaattcgggatcaacaacctgatgcccatcttgaagcatttcaaatcgacttgtcatcctacaagtcaataaagaagtttgaaacttcactgaatcagtggatcaaggactcaaatatggagcactctattcagcttttggtcaataacgctgggatcctagcaaagtcatatcgaattacagaggacggtcttgatgaaatgattcaggcaaactacattggtccatttgtcctgaccaacattctgttaccattgctcaagaacagctcaacaccttctcgggtggttaatctaacgtctttcacacacagatgtgtgtcagaaattaacttgtctgagaaaggattgagcggagtaagggctgcggatccaggtgtagtacagacaggcataatgcgggagcttcctccatgtctttcttggcttgcgctttctgttctgcgcctcctgaatctcctacaacaacctgatacgggagttgatgctgtccttgatgccgctttggcaccacctgactcatctggaaagtatttctttggagggaaaggaaggaccataacgtcttctcagttgtcatacaacgttgaagtggccaagaagctatgggcagaatctttagcattgttcaatgagctacagaatagagtatgtgaactgaggactagctga

SEQ ID NO: 82470 - DNA, 672 bp, Oryza sativa
  Clone ID: PAT_MRT4530_81897C.1
atggacgtggacatggagaggccgccggcggcgacggcgcagggcgtgcggcccaaccccgtcgtggagaggaagctcggagagctggacgcctgcctcgccgacgcgatgtcctcccgcccgcggcggagcgacgtcgacggcagcctcttcgcggagattcaggccaagaccgacttcctaaagacgcttatcgccgcggagggggagtgccacggcggcgcgctgccggagcacctggaggaggccaaggcgcgcttcgccgtcctcaagggcgcgttcgacaagtgggcgcggcgcgacgacgcggcggcgccagcggaggaggagcagcccgacggggcggccggctcggggtccgagtgctcgtgcaccgagtcatgcttcggggtcgaggtcaccggctgcctggaggcgacgtccgacgtcgagcgcgaggccgtggaaatggcgacgctcggcgccacgttcaacgccgagcgcagggccggacacaagccgtcgccgtcgccggcggctgcgacaaggaacgctgctcggcggcgcggatggaggcggagcgctgcttgctgcggtgcagccggcgccgtggcggtgctcgcgctcgccatcggggtggcgattgagtttgcgtcggtggctcgccaaaacgtttacgttgttccgacctga

SEQ ID NO: 82471 - DNA, 896 bp, Oryza sativa
  Clone ID: PAT_MRT4530_81898C.1
atggcttccttgctgtggcacagatgcacaacaagcctgtcgcacaacaagccaggagcaacacgtctcccctgctgctgctaccagccgacgtgcttcacgcggctgcgatacgagcaacgctgcgcacgcagcagcagcatgctctgctgcggcgtcgccaccagcaggctggagcacaatgatcaccactccggcggccgtgccccgtcgtcctcctccatttgccaaagttctaagaccatcgacacagttggtaaggttgtcgtaaggccattcacagtgcagttcctcatcaaagattgtaagtttgggcccacacttttgtgttctgcacgcgccaccaagaagggggagagagaggaccggaagagagacgacgaggaagaggggaatgggaagggagccagatccgaccggaggagctcaaaacctgccatcgccggggagctcgtcgactgtccctccaatttgcgccgccgagcttcaccgccgacgccgccgctgcttcggaggaggagaggaggggaggggtggatatggccgttccaccaccctcgctgcccgtccgccgctcccgcaccaccgacgccgacgctgctttgggggagctcgaaggagaggggtggatccggccgtcctaccgtcatcgccccccgtccgccactcccgtaccgcctactccagcgctgctttggccgtaccgccgacgccagcgttgcttcggaggagctcgaaggagagggtggatctgaccgccccaccgccctcgccgccctggaggatgtcctcatcagcccgtccgccactcccgcatcgcggacgccggcgctacttcggggagctcgcaggagcgccgatgcccggcccaccgacctcgccaaccctagtgctag

SEQ ID NO: 82472 - DNA, 1929 bp, Oryza sativa
  Clone ID: PAT_MRT4530_81899C.1
atggcgcaggtttaccggttctgtggcaatcctaacgaggatgcaaacactgctattggaaagacattcttcttaaagacggtcagaggtaccaccgagctgattgagaagatggtctcaaatatgggttggagcgaggaacgactccgaatccgtcaatacggtatgcacaccgtcaagaggacggaaatgctggccactcagttggatcttcttattaagagactggacaacaatgagaaggacgccaagcagggtgctgttaaggccctggactcacatgacatgctggcacccaagaagccaggaacacaggtcggtcaacctgcgttcccagtttcgaagaagccattgaccgcaccaaaaacaaaggagctcgccgccgtcggtcaacccgagccgccgctcgttccccgtcgtcgccggaagtcgtccgacgtcgtttgtcgttgtggtgagtaccgttgggttcgtctcgtcgtcctctacgtgttcttgccctccaattccgcagccggccgctctatctccggcgaggtcgccatcgtggatgcaatgtggaaatccaaatatgcaattggaaaggaattgagcccttcacttaggtccctgcattttgctgccattctcacccgcctgcatataaagggtgtccagcctcatcgtgagaaacccaagtcccgagaggaactcgagcgccaccagttggaagcaggaggcatcccacttgatccagaggaacgggtgtgcgcgttcccccagtgtacgtcgtgcggtgcttgccagcgattctcattggcactgtgccaggaagaaccaccggtgctgtgccgtggtgcctgggtccaaccgggtgcatctcccgttggctcccagtccgcctcgtacatctgcacaggtatcgatgaggatgactcctcatgctcttgccttggtctgttgcgtgtcttcctgtggggcccgcctgtcatccctatcctcgcgccgctcccgccgcccgcccgtgccctagcgccgccgccgccgccgcggattccgccgcatcccgccgtccccgcgcgcaataaagtggggggaatcattccccgtgattccctctcccttttcccccacttttccctctctctctccctcggattcgctcggaatctttcccctaaacctcgtcggcatcaatggcggccgcatctttcgcggccgtttccccctcgcccggccgctctctccccctcccgacgctatttaatcgttccccgtgcctccctcctccgtttccgccgctcgccgctcactctccccttcggaatcgagcccgcgccgtcgtcctctctctccgccgtcgccgccgagctccggttcgccgctgtcgtcgccccggacctcctctcgtctcggcgtctcctcctttggcttcgccgcgtcctcgtcgacctcgtccgctcctccgtttcgcccgccgaccgccggagcaccgccgtcctcgtcgacccgaaccgcgccgccgccttcctccacttcggtcgccgtttccgtcgccgccgtcgacccggggtgagccgaagaccgccgcttcacttccctcttctctcctctctctcgggcgccgctccgccgcgccggtggtcgccggcagtgaccatcggggcgcgggcgcgccgcctcccgtcggccgtgccggcgaggccgccttcgggcgcgccccgcggctgccaggtggggcccggccgtcagccgctcgcgcccgcgggtgcggctgacgcgtgggacccacggcgccagccgcgtgcacccggtccaccgtggaccgagaggctgccgcgtgggtcccactcccgtggacccgacgctgcagctttggaagatccgctcttcgtggaagttgaagccggcgtttgggaaagtgagcaaggcaagtcacatcatccttga

SEQ ID NO: 82473 - DNA, 604 bp, Oryza sativa
  Clone ID: PAT_MRT4530_8189C.1
tggcgggccttccagttgcaggaggctcacgtccacgcgcaccctcgtcgacggcgaggacgccccagcccagcagccaccagccatcagcaggcgcccagcagccctggtcatgtgcaagctgccacggcgcgcccttcacccacgccgagttcctgcatccacagccaggcaggcaccagacctgggccagcaacgtcaccaggctacccagtggcttggcgacgagatggagctgacatccatcccaggcagccaggcaggcccccaatcatgtaggttcagccagcggaggtggccagccagtcgtcgtcgacgacgacgacgaccgcggagtggcgtctgcggcggcgagcaacgcatggtccggggagagctttgatctgatgcagtgtgtccgttttcaatgccagtcttcgctcttagctacttgcagttgactgctgtctcagtctgactgtcaagtttatctttaattttcgcaagtttactttcatgtttctaaattatcagttgtaatcgtcgatcgatgtaatagctctagatctcccggatcataatatgaaaactacatctttgttttttaagaaaaaaaaaaaaaaaa

SEQ ID NO: 82474 - DNA, 517 bp, Oryza sativa
  Clone ID: PAT_MRT4530_818C.1
ttcggcagaggaaagggtgttggagagcgttgatctaacaagcaatttgataaagcttgattgaagaagactcaatgcgggtggcctttggacgcaaccttcagtggccctccctcctcctgggctttcttcccccaaaggacgtcggtgggctctcatccaaacagcaacaagaccaagttagcttcttgatggcttcatatgggtgggcttggattttcacagcctttcgttggccattcatctaattcggcatgcttgtggctgtgtgacgagtggttgttgataagttggggtgttagctttaggttgtttaggttgttggctgggtaattttgcaggtgtagttcgtcaatcgttatatttagggatgttatcctttgtattccctgtgtattttctttttctatcttccagggcccctgcgcttgcgcgggaaaagcctgccctgtgtaagatcattttgaaagcttactaaacttcagtccaatctttttcattagcaacaagaaaagct

SEQ ID NO: 82475 - DNA, 669 bp, Oryza sativa
  unsure (1)..(669): unsure at all n locations
  Clone ID: PAT_MRT4530_81900C.1
ggacccttggccncggccaccttcctcaagtgtgtggacccaaagcaacttacgacgagatggatccgctctacaagttgctcacaccactgctgcagctcaatgactccatccagaatgatcgtatccaccggtacctcagcagcgtctcgggctttttgcacaagctcttcttccatcgccagaagttccctatgttcagttactacggtatcaagtatgtgttgaccactttggcggctaccaacctggatggaacccctgcaactccggcttcgaagtacttggcagagcacaagcaggagatcggctggtttactcagtgggtggctcaccatgtgaagacgacgcaagcggcgaagcccccatctccagaagaacctgaggacgacgagggcagcacctcctccgggtcggctggtgcgtcaaatgtctgggctgcaaacgcttgcagatgtgcaaagattcttcggaatcgctgacagtggtcccatgggtgatgagtctgattttgacgaggtcgatgctgaggaagagcttctgtcagcccccgaagatatggaggactagagacttcgcagcttttttctgtaggctctcaatgaacaatatttatgggcagttttttttatgaataaataacaagaaccttgaaaaaaaaaaaaaaaa

SEQ ID NO: 82476 - DNA, 702 bp, Oryza sativa
  Clone ID: PAT_MRT4530_81901C.1
atggcggccgagatctccgcgcccgtttccttctcctccggccgctctctccccctcccgtcgctatataatcgatccccgagctccgctcctccgtttccgccactcgccgctcgctatttccgtcggattcgtgctcgcgctgtcgtcctctctctccgccgtcgccgccgagctccggttcgccgccgccgtcgccccggacttcctcccgtctcggcgtcacctccatcggctacgccgcgtcctcgtcaacctcgtccgctcctccgtttcgcccgccgaccgtcggagcgccatcgtcctcgtcgtcccgagccgcgccggcaccttcctccacttcggccgccgttcccgtcgtcgccgtcgacccgtggtgagccgaagaccgccgcttcgctccctcttctctcctctctctcgggcgccgctccgttgcgccggtggtcgccggcggtgaccatcgaggcgcgggcgcgccgcctcccgtcggccgtgccggcgaggccgccttcgggcgcgccctgcggctgccaggtggggcccggccgtcagctgcccgcgcccgcgggtgcggctgacgcgtgggacccacggcgccagccgccgccagccgcgtgcacccggtccaccgtgaccgagaggctgacgcgtgggccccactcccgtggacccggtccgcgcaccctctctctcggctga

SEQ ID NO: 82477 - DNA, 186 bp, Oryza sativa
  Clone ID: PAT_MRT4530_81902C.1
atgaaggagggggagccggctgaacaagaggataggtcgactcaacaacgacttgggccggctggctacatgtgggttgcgtgttatcttttgcatttgcacgaatgggcgcgtgttagacccgtccccatcgggcagttcagtttagggctggatgatgaattatcatacacgcttcccgtaccc

SEQ ID NO: 82478 - DNA, 519 bp, Oryza sativa
  Clone ID: PAT_MRT4530_81903C.1
atggtctcaaatatgggttggagcgaggaacgactccgaatccgtcaatacggtatgcacaccgtcaagaggacggaaatgctggccactcagttggatcttcttattaagagactggacaacaatgagaaggacgccaagcagggtgctgttaaggccctggactcacatgacatagcaacaacgggtatcgtccataaggagatcaaggatggagcattgctccatggggaagatcaagtacggaccaaacccacaaggaggtcaaggtctaccccgaaagacggacagtttcagcaatttcatgatgaatttcctaaagatcaagaagaaatgaggatccgtcgataccttaggctggcacccaagaagccaggaacacaggtcggtcaacctgcgttcccagtttcgaagaagccattgaccgcaccaaaaacaaaggaggtatggcaggttaaagagaagacacctgttcctgtacctttgaaactgggctgtcacgccctaaaaatcgcctaa

SEQ ID NO: 82479 - DNA, 913 bp, Oryza sativa
  Clone ID: PAT_MRT4530_81904C.1
atggcgacggtgcgcggcggctcggggcgcgaggcggcaacgcgcggtgacggtggcgacagagacagggggaaaaaggaggagctggccgggagagagggcgcgcggaccgggtccacgggagtgggacccacgcggcagcctctcggtccacggtggaccgggtgcacgcggctggcgccgtgggtcccacgcgtcagccgcacccgcgggcgcgagcggctgacggccgggccccacctggcagccgcggggcgcgcccgaaggcggcctcgccggcacggccgacgggaggcggcgcgcccgcgccccgatggtcactgccggcgaccaccggcgcggcggagcggcgcccgagagagaggagagaagagggaagtgaagcggcggtcttcggctcaccccgggtcgacggcggcgacggaaacggcgaccgaaaccatagaagaatcttgtgcaggtacatcttacaggaagacacgcaacagaccaaggcaagagcatgaggagtcatcctcatcgatacctgtgcagatgtacgaggcggactgggagccaacgggagatgcacccggttggacccaggcaccacggcacagcaccggtggttcttcctggcacagtgccaatgagaatcgctggcaagcaccgcacgacgtacactgggggaacgcgcacacccgttcctctggatcaagtgggatgcctcctgcttccaactggtggcgctcgagttcctctcgggacttgggtttctcacgatgaggctggacaccctttatatgcaggcgggtgagaatggcagcaaaatgctgatgctcagttcgtcaacatcaataacctgatgcaacaatagcaggctgatcttcaagcatactttcgcttccaagggttcaatccctaccagggacct

SEQ ID NO: 82480 - DNA, 524 bp, Oryza sativa
  Clone ID: PAT_MRT4530_81905C.1
cccgggctgcaggaattcggcacgaggctcaaatctggactcttctcttcttctttttttaaaaaaatgtaataagtttgaagtgctgatgttatatccccaatccatgcatgttgtgttgcttgcatcactaggcatcctagcatcatggattgagtaactacaattttggttgcggcaagtatttctgaaataacctattaccctgaataggatttatctgtacaatttaattaggtagcaaagatacagaatgcagtctactactactaacttgaaggcctgcacttcttaacctgtacattcttggatctgcaaatcttgcactaatttgcctaaggacactcaaacaacattataatttgttgcacaacaccatggacattaaaactgaatactattataagaatggtatcttgaatattttgtagtattgaaaaccacattctgaacattagttcaagttcagaaattcgcattcttgcaatgtatcttacctatttcagtacatgcaccatgttttt

SEQ ID NO: 82481 - DNA, 325 bp, Oryza sativa
  Clone ID: PAT_MRT4530_81906C.1
gggacaagtaaataaacatgattataaagtatatcacgtactctggaagaaaaaaaagagagagaagtgatgtgtattcgtcttgatatgctcgctttggtttcgcattgttcttgtttgtcctagcttaggacaaagattaaagtaaagcagttcgagttatactaacaagcttcctgaatatgggaaacacgcaagcattccccttcttttctatctatccacctcactgaatttggattgttctttatcagttaataaagatggcacgaaaagttgcagtttaaaaaaaaaaaaaaaaaaaaaaaaaaaaaaaaaaaaaaaa

SEQ ID NO: 82482 - DNA, 435 bp, Oryza sativa
  Clone ID: PAT_MRT4530_81907C.1
atgaccgcccggagattgcccgcctcgacaaggccgacaacccactgctctgctaccttcagtccctcctccatctccctcgagttccacatccctgacgactggatctgcgagaaggacgaggctgttgagcatcaagaaggcatggcagagatcttgaggcacacgaagaaggcaccagccaccaaggaggttcttctgtcgtttccgccgtcgccggaaaaatctggaatagtagttgatggttctttcatatttgttttcgagtgtaggaagttgacttcagatggccctgctttccattttcttttaaaattcactttgcagaagcaaatggagggtaaatttgcagctgtggccttcgtcacgttccgatgtattagctcagtcacaatatttggagcttgttcattgttatatgaccactatccataa

SEQ ID NO: 82483 - DNA, 654 bp, Oryza sativa
  Clone ID: PAT_MRT4530_81908C.1
atggagtcgccccgggttgtagccactgcgttctcattttcggtcattggcggaccagctgagatcggcatagtgaaccttgagcaccaagtccccctacctggcgcgccactgtcgacgggggatacccgtagaccggatatagagggtattggggtacgctgcgtggtgggcggcgtcgaccgacgcctgtgcccggagcgtgcgcggcttggcggcattggcggcggcgcccggagcatgtgcggcctgctcggcgatggcggcgccgtccggatgcgcacggcctgctcggcggcggcggtggcgaagctcctgcagggccggagcacagactccaagacgcagtgtgtgtatgacaggttggaccaggccgcgcgtgctccgggcgccgccaccgccgccgagcttgtcttctaccgtgaccacttgtccgcagaggccatgtgcctgcaaaagattcgacaccattgccagccacgccgcgatgcctcagcagccaaccctgccgcgttcttgccgcaaagtgccgcaaagcgcgcttatgggagcatctcgacaaccacagcactcaccgcactagcagcaaccttgggctttggcccatccaacgagtacgagagcaagcagcagcagcagtttgcaagtctgtag

SEQ ID NO: 82484 - DNA, 638 bp, Oryza sativa
  Clone ID: PAT_MRT4530_81909C.1
atgatccacgtttcaggtattagacgattctatacacgtttcaggtgatacctgcaagtatcatgtgatacttatcaggtatcatgcgattttctaccacatatcgcgtgatactcgcgaggtatcatgtgaaacctgtcagctatgagatgatttcaaccacgtatcgcgtgatactcacgaggtatcatgcgatacctgtcatgtatcagacaatttttaccatgaatcacgtgatacccgcgaggtatcagacgatttctaccatgtatcacgtgatacttgcgaggtatcggatgatacctatcagccgaggacggcgacggcggcggcagaggacgagcgcggcggtagcggggacgggcgcggcggcagtgggggatgggcgcggcggcggtggcgggggacagcgacggcgtcgacgggggacaggcatggcggcggcggaggaggaggcgactgggacgggcgccgcagcgaaggggggacggcgacggcggcaagtgagtgtatggataagaatcgcgtgtggagaggagctatcccgttattattgggtctgccttatttataatgctaacactacattagatatttttaatcattcctaatattttattctaaattttagttatttc

SEQ ID NO: 82485 - DNA, 197 bp, Oryza sativa
  Clone ID: PAT_MRT4530_8190C.1
tcggtgtatgctacgctgaaaggagaagaatacccgtgggtctttgatgaacatacgggggctactcatgcacgttcgcctaaagcaatagggcacatggaagactgccactggaagtaggacgagagctctctccagaggcatcgtaaccaccattatctgcataatgataccgtacgaggaacaatctgacttac

SEQ ID NO: 82486 - DNA, 142 bp, Oryza sativa
  Clone ID: PAT_MRT4530_81910C.1
atgatgtgggctgaatgtacagagaaaggagaagctgggacgagagataaagggtcggaggcagagtatggaccggtgggtagacaacggacccggcgtgaaccgacgctggtgcagcagatggtggtgaggatcgaggccg

SEQ ID NO: 82487 - DNA, 207 bp, Oryza sativa
  Clone ID: PAT_MRT4530_81911C.1
atgtgggtggtgctgaaacgtagcaagaggattgcggccaagctcgcactcatcggctcgagtgacacgacttcacgcatgcagcacaatttgaagcgcaagcttgtgtttgtgcgtgagaagggtcttgtgtcggctgaggcagttgcggcgtacaacgccctcttctcccagcctctctctcaggaccatgccataggcccatag

SEQ ID NO: 82488 - DNA, 342 bp, Oryza sativa
  unsure (1)..(342): unsure at all n locations
  Clone ID: PAT_MRT4530_81912C.1
gagtccccccaacacccaaaccctaaccctcgaagcgacgaacccaccggcggcgatggggcagggcactcccggcngatgtgggaagcagggcgtcctccccngcgatcgcaagccngtcgatcgcgncncnactagatgtaaggaccgcaagttcgagccccccnccgcgccgtcccgcgtcggccggaagcagcggaagagaaaggggcccgaggcggcggcgcgctntcccncttgtgccctgntctccaagtgccgcctccgcttgctcaagctggagcgtgttcaaggactacctgctcatggaggaggagtttcgtcgtnagccagggagcggct

SEQ ID NO: 82489 - DNA, 579 bp, Oryza sativa
  Clone ID: PAT_MRT4530_81913C.1
atggcgccgcctccgccctcgtccgagctgccgcctccgccgccgacgaacgccgccacctcttcgtcggctatggctgtcccgtacttctgccgcaagcacgtcgctctggccacctcgcgttcctccaccgtatggaccgtcgcaaagcagaccgggctgaggagcgtcaccgtcggctccgacaccgcggtggcctgcgccgtctgcaccgacgacctcccgccggcggcgaccgcgtgccggctaccctgcgggcacctgtaccacgccgactgcttcgtgcagtggctatcgcggcgcaactcctgcccggtctgccgccgccgcgtcccgttgttccccgatcatggcgccgcctacaccgacgaagacgaagacgaagacgaagaagagatcgcgccatcgccgccgccgcctcatggtccggagacgacggcgaccgacgaccaccggccgcggtctctgccgggagcgagctggatcggaagaatctgccgcaggttgcttggctacacggaaacgagccacccgcgtcaactgaaccgatgcagcggcgacacgacgcagcaatggtga

SEQ ID NO: 82490 - DNA, 1422 bp, Oryza sativa
  Clone ID: PAT_MRT4530_81914C.1
atggatcaagctaacggcgttcaaggccagaatgggagcaatgagctgccctatgatccaaagaaggaccctaaatggaaggccaactcgaaggacccgggatggaagaagggcaaggtcattcatgttgatatgatgatggtgatgaagatggacaggttgctgcagaccatgaggaagaagtggctgtgcaagtcaagccacaaaagttgggagattttgtgtgggtctattggacaatatggtcctagatacatatcagcctcttatcatgaccttcaggtgccattgcttgaaaaggcaaagaagaagacaaattcaataagagaaaagcatgaattggcttggcaagaatatggttgttctctcatgtcagatgggtggatagacaaaagaaaacgtcacttagtcaatttccttgtcaatagtctagcagggacattcttcttggagtctattgatatattacacctagcagctgatgcacaattgattgcaaatctattggagaagcaaattgatattatccgaagaaattatgtggttcggattgtaagtgacaatggttcaaattataaggcagcaggtagacttctaatggaaaggattccaactttgtattggaccccatgtgctgcccactgcttggatctcatgttggaggacattatgaaaattcctatgttgagcccttctattgcaaaagccaagaaagttactacatttatctatagtcacagtaggcttcttgatgctatgaggaagaagacaaatggagccgacattgtgaggcctgcagctacacggtttgctactgcttttctcacattgcaatctatgtggaagcattgcactgctttgaaaggtctttttgtggatgaatgttggactagttccagcttggctagaaaggaggcagggaaaaaggtttcttcatatgtgctgacaactgttttttggaatggggttgaaaattgcatgagagcatctcaggcgctgctcattgtgctaaggctagttgatggtgatgagagggcagctttggctaaggcaaaattacttgagaaggtgatgggtattgtgagcaaccgatgggattcccaaagggatcagaagttatatggggctgcatacttcttgaatccaaaaaggttctttgaacttaagagtgaccttgccaatagaatgttgtgtactaagctgaggcatatgttcaatgaggtgttatggaaaatggtccctgatgaggcgaaacaaagcaaaataagctcgcaatctgatgattatgtgagagaggagggtgaatgcttctcttctaagttggctcaagctgacaagacaaagaaaaatccacgatgtgagcgtaattggatgccactactcgtgatcatactatgtaaaaacaacttcaatcagatctga

SEQ ID NO: 82491 - DNA, 691 bp, Oryza sativa
  Clone ID: PAT_MRT4530_81915C.1
gcgttcgttatgacagacactctcatgaggacagggggacggggtgccggcatcgaggatgaatggaggaagcgaaaggaggctcagagtctgaagcgactcgaagtgaagaggaagagaattgagaggaggaactctctcacttccaacatttccaaagaggctgttgggcagatattagaggaggggagggcgggagctgataaagtagaaagttgcgatgatgttgctacaggcaataagaagacgggaggaaatgtgaaccatagcagtgatagaaaccgctgcactggacttcctccagtccaccgtgccacgtatactcaacaacgtggcagtctgtccggaataccaacaaagcatattccagctatgaaaggtaaaccgcttacgttttgtcgttttgcatttgttttgtcgttttgcattatagatacgtgaaaatattttcttgtcaatctagcttcaagcatgattgtttgatatgatattgcactattttgtagtttcatgttttgttctttatgcttgtcacaacttttgcccctccattatgttcatgtagatctctcatgtctgagggcttttagatgctcaatttatttatattgctctcatttgtgcgagtttcaagtcaaatgtcttgaatgtgaactgggcatggatggttggtgccagaaactgttatgtt

SEQ ID NO: 82492 - DNA, 366 bp, Oryza sativa
  Clone ID: PAT_MRT4530_81916C.1
ttgtttttcgcactcccccctcccttctcctccgcccccgactcgctgcttccacctgcacccgctgctctcctctccgccgccgtcggcgtcgccgccgtcgtggaggccgtacgccaccggtctcaccgacgccgacgacctgcaggcgcccctctccatgactatgatgacgccttccccgctcgagccggaggaggacgagatgctcgtgcctcaccaggagctcgtccctgttgacgccgtccaacctatggaagatgttgggcaaacggaggcagctagcacggctgagagccagccagctgaggacccctagacaatcatagttcacgtggacgatcgagaactttaaccggatcaatg

SEQ ID NO: 82493 - DNA, 771 bp, Oryza sativa
  Clone ID: PAT_MRT4530_81917C.1
ggtcatctggtgttggaaattcgaatttatagtctggatcactgacgaccgcatcaacatgctccattcgctccaatgccttgattcttgattgaacaagtgatgctctctttgcattgtaacggaacttgtcaatgaatgcctgcatgtgggatctggccttctcatttgtttcaaaagctttctgctggttcttaaggtgctcctcccttgtcctctcgaatgtgtcataatcacctttgtaagcatgtagcttttgtccatgcagatgaagaatgtcggtgacgaccgtattaagaaactccctagcatgtgatacaacaatgaatgtctttggccatttcaggagatatgtttctaaccataacacagcatggagatcaagatgatttgttggctcatcaagtagcaccaattcaggctcaatgaagagagcacgtgctagagcaattctcatgcgccatccaccagaaaactgttttgtgcgtttacgttgcatttcaggagtgaaactaagacccgccagaattgatgctgcacgagcctctgcagcatcagcatcaataaactcaaggcgtttgtatatctcctcaagcctcttgctgatagcatctttgtcaagaccatccttgcttttggacgcgctctgctcaaactcagcctcatactctagatctttctgccgttgaaccagatgagcttcccaaaagcaagtgttacagtgcaatcttgaatgagatcacgaccaccaacagtaacactgaagatctc

SEQ ID NO: 82494 - DNA, 359 bp, Oryza sativa
  Clone ID: PAT_MRT4530_81918C.1
gtactgatgatggcctctctttgcaccccacctgctaccgccggtgcatgaccgttgccccgctcttcccttctccattacaagaaggctggtgggctcaccccatctccatggtgccgatggaggagggcgccggtggacaccgcaagaccaagctccattcggaccgctgcactatcctagaccatggtgactggaaatgatggccctatctagtctatggctgaggatgcagaaaggctagatgcattgcatgcatctggaaccagaaatgaaaaatacctgcccatgctctctagtatttgtggcggaattaccaccaaatcttctgcaaaggacataccaatctatgatcacat

SEQ ID NO: 82495 - DNA, 340 bp, Oryza sativa
  Clone ID: PAT_MRT4530_81919C.1
tgcgtttctccttcctcctcacaagctatccgtccgccttacatgtgcagatctccagtgggcagcagctccattgtatgctgcttgcatctgatactggcccgatgtcaagagcaccgctggtgtgtttgcgagatcacttgggagtaaggacatttctggttgctgtaaaatcggttttgatacgcagagcaggtcatgatgctaacttgcgggcaagcgcatcgacatgagcttgcattgggttcttcgatatcatgctttgtggtcggcggcaaccttccattgagaatgctgtgattaccacgagcaggtagattttcaccagaccgctttgctt

SEQ ID NO: 82496 - DNA, 506 bp, Oryza sativa
  Clone ID: PAT_MRT4530_8191C.1
actagcaatggaaagattttagaagctgtcggagatatgggccgggggccggggcgcctcggggcgccacgtcatgcccctcgggctctcgcgttgccttgccccgaggccctcccccggctgccatgtggcgggggagacgtgcggtgccgcaccactgacccacagtcattcggagttccctccgtgagaggaggaccgccacaagtcttcactcatttatgagggaatgacagggctgtcccccgtgtcaggcggggggcggtcgctgggtcccgctcaaggacggactgctgcttagcttccgggcgaaggcacgggtcgcggcccggtcaaggtgtaaccgtccagaaaccgccttaactgtcacaaccgacaagaggacccacctgtcagtgccctacccgatgctggaggtctgttggccgacccaggttcagccgaaccctggtggcgtcagctccggctggccctccacgtggacggtccagatcactcctcaatga

SEQ ID NO: 82497 - DNA, 261 bp, Oryza sativa
  Clone ID: PAT_MRT4530_81920C.1
atgagcacacgcgcggcagcaatcaacgagccacgagtggccactggccagcccggaccggcgccggagacggggagccaaacaagccgtcccgatcgaatcaggcgcgcatctggagctagtacgcgcctctggcggggcatgctcgtccgctccgtgaggtctcgctccgtcaggtctcgcgggggacaaacgccgtggcgagcgctcgctgcgaggtcagcgtccggcgactgtagcgtcggcgatcgctaccggtag

SEQ ID NO: 82498 - DNA, 981 bp, Oryza sativa
  Clone ID: PAT_MRT4530_81922C.1
atggctcaactccacggcggcagcgtcggccacagccaagccatcgacgacatacctcaattctacgcgagcagctgtagcgccaccgcctaccacagccatgccatggagatgtcccggctcgacgcgagcgggcgcggtagctcccgcaccgccgccgacgacaaaggcggccacgtcgtgatagacatcgatgccgccgacgacattccaattccattctgcgtggtgtgcatggagcccctggagtgggtggcggtcggcccctgcggccaccgcgtcgtctgctccgcgtgcgccgcccgcgtccgctccgcgccctactccgaccaccggtgctgcacctgcaggacgccctgccccaccgtgttcgtcaccaaggcggcggcggcggcggccgacggcgaacttaattaccttctccaactccaaggcgatgctggcagccttcaagacgggcgggtcggcgagtactggtacttggcccccatgtcggcctacttcgacgacgagcggcagtacgaggcggcggccgcgtcgtcactgatgatgaagcatcagcgaccgccgcccgatgctgacggtgagttccaaccccgccatggcggagatcgcggcgacggtgcactaccgggcgatgaattcggggcgccggagctgtcgtttttggctcttttctttgcggcgtgcggcgcggttgtcggcctcggcttcactggatttggcactggctggggtcaaaaggtggccatcgtgttaggatccgccgtggcaaacggtgtcaggggagcttctaagcttcttcgtttctgttggaggcatgacatgagagccttcgaccaaccctgccgaaaccatctattcgacgagggatcaaaccagaggcgtcggcttcgaccaaggcgaaggtacatggcgaaggccatgtggcgaagcgtgtgggcgaagaccaaagactcggttccaagcctcgcagtctag

SEQ ID NO: 82499 - DNA, 376 bp, Oryza sativa
  Clone ID: PAT_MRT4530_81923C.1
cccacgcgtccggagatcgatatcagcagctagctaagcttcttccatagttagctagctagctcgcttctgcgtgtgagatcgatcgatttgtcgatcgcctagctaggacgacgagatggcactgagggagatcgagtcgacgctgccgccggggtttaggttcttcccgagcgacgaggagttggtctgccactacctccacaagaaggtggccaacgagcggatcgcgcagggctcgacgctggtggaggtcgacctccatgcccgcgaaccgtgggagctcccagaggtggcgaaactgacggcgagcgagtggtacttcttcagcttccgcgaccgcaagtacgcgacggggtcgcgcaccaaccgggcc

SEQ ID NO: 82500 - DNA, 2697 bp, Oryza sativa
  Clone ID: PAT_MRT4530_81924C.1
atggagcggccgagcaaccgggactggtcggactgcgacccgacgttctccgcggaggccaacgcggcgatccgcgcgctgcgggacacgggcgcgggcgcggacgcgcgcgcgcgccggctcgcggcgaggctcgtcgagaggtaccccggctcgccgctcgcccacaccatcctcgcggaggggcaccgcgtgcgggggcgcctggagggggcgaggtcgagcctcgagcgcgcggcggcgctcgcgccggggtgcccgcgcaccgccttcatgctcgccgccgtgctcacgcggatgggcctgttcgacgaggcgatggaggtgtgcgaccgcagcctcctcgtgccgcagcccaccgacccggcgcgccacctcccctaccggaggaaacgcatcgtccccaaggacgcggagcataggatcgcttatacccgacaagggatccgtcggctgcgtctcggggccgagaagtgcaggcgaaccgcggttccacttccaccggagtccgcgttgcccgcgccggactggccgccggaaagcgccgaggccaacctccaggtggctcgcgatctctggcgcggcatgagcgaggaggagcagcaagccttcctgaaggtgagctttcaagatatgaagtcgtactgccgctcaggaggggagctagagatgataagtttgctctcggatgccgagcacgaccagttcgtcaagttatctgcgtcgtcttcgtgttggacttgccctttgtgcgggttcaaaattatccttgatgaagagcgcttcatggtgcacatggagaactttcacattgagcatgaggagtacaaaaaattgcggtcatcattacctaaaagaatccctgacaatgagatggagcttctcaaatcatggagatgggaaccgatgccaatcgatggagatgatttggcagagaggacagagatcttgagcaagcttaagaaacttgtttctcagctcattgatatggaggccgtctctctgtgccttctgtatatcatgcacaagttcataatgaggcgggtcaggccggtgacaccattggtagtatccatgtgcgcgtgctgtgggatcagacagttgagttctgcgcacctcaaggaactgtatgaatttctccagaagcttacacctatccttgcagattatgtacatcagaaggctcagaatggtgaacaagagagccagcaggattcgcttgctgtgactacctggttgaaagagacaggcaccttgtcttttgattatgggaagattgtgtcaagaaacactgatggttctagcaacccagatgaaattgttgatggtctattccacgaatctttgcttgaggatcccttggtatcatggggtggtgtgtggcaaagatgtcttgatcttggacctgatatccttaacaagataagtgaagcattgaataaactgaaggttaactgcagctcatgtgaagaactaaaacaaaaactcggagatgtttatttccttcctgacgcaatctttgagactgatattgacgtcaagccttattttgatgatgggattggctctgtacaagttgaaatgctattaattgatgctgaggtagattaccagaagaaaatgcttttggaagcctgtaaagtggattatcttgcagccattttacctattgcaaaggcttgccttcgggccaaaatgaataataaccttcgtccaccaaatggtcttgaactacaagcacctttgaatattattctccggtctttgtggcacataaggcgattccatgatactctccagaagataccatctaaatgcactgatgttaaagatggaaactctcaaattgggaagacattgtgtaaaatctttgattcttgggataatgagaaagcgggcaaaccatgtgacccgtgtgattcaacaagatttgcagattttacaaattctctggtttataaaaaggatggacaaaggaaaactgcaattgacattgtgaaatttatctttcggaggctgcactcatcacaaactcctttgcattttgagtttaagggtgaaactttggaccatcaaacaccagtcgagccatccttcctgggttgtatatgcctagtgcatgatctttttgggttgcacatttatgaaaataaattcaactgtgtgaatgaggtgtacaccgaatatcagtatactacattcctccacagcattgatttgggtgctgttggaaaaactaaggtggaatctttcagtgaactcttgaaagctcggaagtccaggattgaaagttgtgggcatatggtttcccagtactctcttgaatgtccaccacgtttgttcatgaccgtttttgaatggaaggaagacaaggtgggccacattaacatgcatgaagtattgatgagcctagctgtagagttggacattagtcatttctatggagatctgcattcaggaagcaagtatactctggtttctgcggtctgctgtaatgatcaggggccatacttttgctttgctcgcggcaacaacatatggctcatatatgacaacaacagaagacccatgtatgctgaatcctgggaagcatcaatccagcagtacagtcaggccaacctctgtcctgaaatcatcttctttgagcgtgtcgaggatccagaattgggcacccaccgcgaccagactgcgccttga

SEQ ID NO: 82501 - DNA, 246 bp, Oryza sativa
  Clone ID: PAT_MRT4530_81925C.1
gtgccgccgcgccgtcgcctcgaagccgccgcgccgcgccgagtgccgcgccgtgcgtcgccgccttgcgccgccgtcgccgccgccgccgtcgttgatcaagattatatcaataataaggattatcctgagcaaggcaagtcatcactattctttgaacatgttgatcccaattgcgaaattgttttgtttacaaataaaattgcatgcaatgataaacatcctacttgtgattatgccatgcct

SEQ ID NO: 82502 - DNA, 1593 bp, Oryza sativa
  Clone ID: PAT_MRT4530_81926C.1
atggcaatggcggcggcgaggaggggccacgggatgccgctctgggagtgcaacgtgctgatcaggacgctggcgaggcgggggagcttcgcgcgcgtcatggcggtgtactacgacctccgcgcgcggggactcgtggcggacagcttcacctacccgttcgtgctcagggccgtcggggtcctcaagctgtcggtcgaggggcgcaaggcgcacgcggccgctgtcaagaccgggttccggtgggacgcctacaccgggagctcgctgatggagatgtacacgatgctggggcgcgtggacatcgcgcggaaggtgttcgacgaaatgccgagtagggcgctggtgctgtggaacatgatggtcaggtgctacatcaggtgcgggtggtactcggcggcagttgctttgtctgaacagatggagagaagcggtgtcacacctgacagggtgacgttggtgacggcggtgacggcgtgctctagagcaagggacctgagcttgggaaggaggattcatgtgtacatggataacgtcttcggtttcaatctgccagttgcaaatgctctgctggacatgtacacgaagaatgattgcttggaagaggcggtgaaattgttcgagcaaatgcctgcgaggaacataatttcttggaccatacttgtgtcgggatatggccttgctgggcagctggacaaggccagagtgctcttcaaccagtgcaaagagaaggatctaattctgtggactgcaatgatcaatgcgtgtgtgcaacacggatgcttcgaggaggcgctgacattgttccgagatatgcagatgcaacgggttgagccagacaggttcactgttgtcactctcctgacatgctgtgccaatcttggcgctcttgatcaaggtgaatggattcaccagtatgctgaacaaaggaaaatgaagatcgatgcagtcctaggcaccgcattgattgacatgtattctaaatgtgggcacattgagaagtctctagaggtcttctggcgaatgcaaggcagagatgccacagcttggactgccatcatctgtgggctggccacaaatggtcaggctggtagagctcttgaactgtttcaagatatgcagagaagtaaagttaagcccgacggtgttacgtttattggggtgctaagtgcatgctgccatggtggcttggttgatgaaggccggaagcagttccatgcaatgagggaggtttatcagatagaaccaagagttgaacactatagctgccttgtgaacctcctaggtcgtgctggtctactagatgaagctgagaggttgatcggtgacgttccaattaacaaggatgctatgccactgtttggtgcactcctcactgcttgcaaggctcatgggaatgttgagatgagtgaacggttaaccaaacgaatctgtgagcaagattcccaaattactgatgtgaatttgctcatgtctaatgtatatgcaacagcaagtagatgggaggatgtgataagggtacggggcaagatggcacaccctactgtcaagaagaatgcagggtgtagcttgattgaggtgaaggggtactga

SEQ ID NO: 82503 - DNA, 354 bp, Oryza sativa
  Clone ID: PAT_MRT4530_81927C.1
ccatctacaacatttggtatctcctaaccaaagtacttttataaaaggttgatttatccaagataacgtcatgcttgtgcaacaaacggcaaagttcttgcaatctcaaaaggagccaagaattgctctcaaattttacacgtgtaaagcctttcactctgcttttcggccatttttacttgaagtcttgcataggatttagccaagtttagcgggatgttttaagtaggttgttggctaggttttctactcaggtactcttaaatgtactcacaacgtgtcaatttctcaccggcatgggcttcagcaaggagatctcgtgtccttgatgctcttcatcttggtaacgactag

SEQ ID NO: 82504 - DNA, 980 bp, Oryza sativa
  Clone ID: PAT_MRT4530_81928C.1
accaagaaagccaagaaccgatcagctttggtgttcgatcgatcaagacgaggcggcggcggggctgatcgagatggcggcgccgccggcgaggtcggtgagcgtggcggacagggcgctgcgaggggtggcggacctgatcaagctgctgccgagcggcacggtgttcctcttccagttcctcagcccgctcgtcaccaacaacggccactgcgccgccgcctacagcagggtcctcagcgccgccctcctcgcgctctgcggcgccttctgcgccttctcctccttcaccgacagctacgtcggctccgacggccgcgtctactacggcgtcgtcaccgccagggggctccgcacgttcgccgccgacccggacgccgccgcgcgggacctgtccgggtacaggctccgcgccggggacttcgtccacgccgcgctctcgctcctcgtcttcgccaccatcgccctcctcgacgccgacaccgtggcgtgcctctacccggcgctcgaggtcagcgagcgcaccatgatggccgtgctcccacccgtcgtcggcggcgtcgccagctacgccttcatggtgttccccaacaaccgccatggcatcggctaccagcccacccgcgccaccgaggacttcgagcacaagcactagatcgtcgtcgacgacgacgactaaattattaattaatttgggtgttttaattaattgatttcgaattcatcaaatcttaatttaaacattttatgtgtgtgcgtgcgtgcgtgcgtgcgtgtgttttgcaatgtcagggtttggtcctttggatttggagactcgagtcaaagtgtgaagtggctctgtgtacatgtgtgttcgattgtttttcatgtaatttgatactaggagctaccgctgaacataataaagtctacaattgtactgtttttttttaaaaaaaaaaaaaaaaaaaaaaaaaagaaaaaaaaaaaaaaaaaaa

SEQ ID NO: 82505 - DNA, 427 bp, Oryza sativa
  Clone ID: PAT_MRT4530_81929C.1
atgcccagatttgtgcgttggcttctctgctccatctccggcgggctctccttcttctccagcgccgacgacaccctaactccggcagagggatggccgtgggcgacggaggaccgacggtgggcggtggactccggcgggcggcgaggcggcggccggtggtggcgaatccagcggcggggagccgccggagacggggaagacggcggggcgggggcacctcgccgtcgccacctcgaggagaggagggaaggggagggaagggggaaggggagggggctcaccgggggggcctcgccagcgccgttgaccccttccggctagccggcgaggcgggcggcggcgcggtggggcggttgcggcggggatcgcgtgagaacggggtggtggtggcgtgcgatctaaatcggtggggaggaggagagga

SEQ ID NO: 82506 - DNA, 500 bp, Oryza sativa
  unsure (1)..(500): unsure at all n locations
  Clone ID: PAT_MRT4530_8192C.1
gattcgcacnagaacaaccaaccgccgccgcatcgccctcgttagaacgatgccgcgtcngcgctgcaccagancaccagcttcctcggcaccgcccctcgccgggatganctcgtccgccgcgtccgngantccngtggccgcatcaccatgcgccgcaccgtcnagancgcgccccnnaacatctggtatggacctgaccgtcccaagttcctgggcccgttctcngaacanacccntcctncctgaccggaaaattcccngganantaccggtnggacacngcggggctatccgccnaccngaaaccttcgccangaacaaggaactggangttatccactccccgtgggcgatactnggggcgctnggctgcctcttccccgaaatctgtccnanaacgggttaaattctgggaagcngtgtngttcaangccngcgccanattttctcccaaggggggctcgactacctngggaacccnacctggttcacgcgca

SEQ ID NO: 82507 - DNA, 179 bp, Oryza sativa
  Clone ID: PAT_MRT4530_81930C.1
attcattaattcgcttattccgcatactccagcatgcatgcacacttacataatactccagattcaagccaagtgcatgtgcatgcagttaattaaaccacctccttggctccgccacaaactacaccactagaacacagtacgcccgtacgtactccaacccatcacgcacatttttt

SEQ ID NO: 82508 - DNA, 411 bp, Oryza sativa
  unsure (1)..(411): unsure at all n locations
  Clone ID: PAT_MRT4530_81931C.1
atancttcgtagcattgagctctgctttccttacagacgagaacagagtttatatcgcgttttcaaccggcgaagatgaagaccgggaacaatgggtgcggcaggatcgggaggctcgaggacagggaggccctgcagagcgacaacgtcgagctcagagcacgaaacgaccccttcataaccaccgactacatgacatacatgttcaaggatgacactgcgcacgggcagtggaagcatcatgaggttaaggtgaaggactccaagaccctactcttcggtgagaaggaggacaccgtgtacggctggaggaaccctgaggagatcccatggggtgagactggcgctgagcttgtagaggagtccactggagttatcactgacaaggacaaggccggtgctcacctgaag

SEQ ID NO: 82509 - DNA, 903 bp, Oryza sativa
  Clone ID: PAT_MRT4530_81932C.1
atgggaagaggcgacggtgctcctcaaggaggcgaagcggacggtgctccggcggccttccgcgagcgggaactggcggacagtggccggaagaacctggagaagaagacaggggatttagggagcgaggaggaggcacgacgccgagggaaatggcggccgaaagcggcaaggatcagcgaagctcaccttggacggaggaaagcggtctcccgtgatgattcagtgacggttctagcggcggaatggaggagcggaggggatgccggggtacgagacgacgcagtgaagccgtcggtggcggttgcacggagcggtgtcggcctgctggagggcgtcgacgggcggcggagctcgggcccgcgctgcggcggtgtttcggaggcggagagggtaaaaggagtaggggccggggtgcggcacggcacggcgatgccaatggtggtggcggcacagcgtggcggcgtgcggctagaagcatggcggcgagcggcggagctcgggctcgcgtgggaagtgcgggagaaggcacgacgggctcgggaaagttggggaaatgagcgaggggagtgcgggaaggagttttatgggtgcgggacagcgggagggggccggggcgatgcggattcggggcagcaaccaccggcggcgtggggtggaagggctgggtggtgcggattttgcgacggagtgggcagcaatggcggccacgggcggttactggcgaggtggctggaggaagggggaggagctgacaggtggggcctcgggctgtcattgggccccatcggcttggccggacagactggagttgggtggccgggagaggtccccttggctggtctgaccggcattcacccgtcggtcaaatcggccgacctacgccggtcagaccaccactag

SEQ ID NO: 82510 - DNA, 552 bp, Oryza sativa
  Clone ID: PAT_MRT4530_81933C.1
atgagggtcccacagcttgtcgacccacatgttagtgaccccacgcgaagggcagtatttcagaggagctcatctgaaaagagagcaaaagaggtggccgcgttatatctaggcatcagcccccatcacaagttggccctccttcttgttatgactattgatatgggaggttggtttgagctcccacaacaattggatctggcgacattgacgttcgggagagatgtggaggtggcggtggcacttggcactaggatggaggagaagacgatgaccgaagcagtgcttgagagaagaaagaggagagcaacggccatggttggaagcgaagggaaatggaagggtgctgctacccggggggagctcatctctgctgtggacatttaccacaggagcgcggtcatcgtctcccgtgtcgtcaagacctacatgccgtcctcatggttcctcacctcgctgttcaccgtcgtcgacgccgtggaatgcaagaacccggtgccggcctcgtgtgaaatgtccagtctaatcgacttaagcttccttgatgagtga

SEQ ID NO: 82511 - DNA, 1699 bp, Oryza sativa
  Clone ID: PAT_MRT4530_81934C.1
cggctggaagcgccacgcgggccagagcgccagtgcgcacgaggctcgagtttgtctggtgtttctttctactcgtttcgactccgattgcgagctgccaccgcataacataccaaattattgacaccataaaggcaatgtattgttcataggaaaaatgtctgaacttttagctcccaaagctcaagtcacaatgcagtgaaggactgaaggcacaaaaatgccgagagattgtagaatttgacaccgattgcgtgcagttcaacactcccaactacttgtagtagaattcccagcctacagtacaatgagtccatgttttggtcgtcaaatcgtcagttctgcactatccgttcctattcattcattcttgggtttgaacagttttatgagataaccaatcaaggacacgagccactgccagaagcgaacgatggaatttgacgccttcggtttgggttcgggccttggaccaaagaggcctttgtacagctccttctgtttttggtacagagctttatcctgttccgcgagagaccgaagctcacgctggatctccttgtcttctggggaatgtttcttggctttcaggaagtcctccctcgctgattctgtctgaccaagttcagctcttgcttttcctcgtctgaacaatgctttcacattgttttcatcctctgccaacacaatactacactgtgcgatagcttcatcgaatctcttcagtttgattaggcatgcggccatgttgagatgacatggatttttcacagccaaggccatatctctgtatttcccgaacaattgaaacatgaagtcatctcccatgtatgcaatcgccatttcatattgctgcatggcctcctcaaacttcttttctttgaaatactcattgccctcaatcttcctcctgtccgctgcttcaatcctttcctctactgtcatgtcacttcgggctttcccctctttgacatcatcaaacccaataagttcaacttcatataaaagatctgccattggagggacatttgggaatgaaaagctcccttctttcccatagcctagctcccagccaacatgcaacagtgcacgctccccacttctcatgttaccaacaccaatgcctaaaccagacatttgttttttctcttttccaattactagttcaatgggatgctgttcttgccaagtatcctcgaatttatgcagagagccttgaacccaagctctatagtgcaaaaagcacgtcgcgaactttgatggtttcttgccatggccttctttgatgacttgttttttaactttgtcatgaaggacctccatattagaggaaaccacaggtgggacagagccatcttgcggaggttcagtatgcacaaaagaagcttcctctacagttatctcattatcacttgaaccagaggaggcgggatcggcggcggcggcgggtgccggcggcgagccctcttcttcctccaccacagccatcgcgcgcgtgcacggtggtttggttgggtttgggggcttccgagctccgaggcggacggttcgaggagatgagactgagaagtcaaacagttgagaataccacgagagactccagcagcagcagccgccagcgagacgtcgccgtccggccgccgcttgatgcgggcttcccttttcgacgcggccgtatcaaggaatccccatgacgcca

SEQ ID NO: 82512 - DNA, 1763 bp, Oryza sativa
  Clone ID: PAT_MRT4530_81935C.1
cagcgaacagagcagagcagagcagcagcagcaagaaacagagagagaagcagagcaatttcgatcgagaagaaccaaagctactcctaagccaaagatggtgcacgcaccggcgaaagtggcagctgcggcggcgatcccgctgctgacgccgtacaagatggggcagctggagctctcccaccgtgtggtgctcgcgccgctcacgcggtgccgctcctacggcaacgtgccgcagccgcacgcggcggtgtactactcgcagcgggcgaccaggggcggcctcctcatcgcggaggccaccgacatctcccccaccgcgcagggctacccggagacccccggcatctacacgcagcagcagatcgaggcgtggaagcccatcgtcgacgccgtccaccgcaagggcgccctcttcttcctgcagatatggcacgtcggcagggtctccaccacagatttccagccgaatggacaggcgccgatctcaagcaccgacaagcagatcacaccggacgattcaggcatggtgtactccaagccccggcggctccggacggatgagatccctcagatcatcgacgacttcaggcgagccgcgcggaacgccatcgaggccgggttcgacggcgtggagatccacggcgcgcacggctacctcctggagcagttcatgaaggacagcgccaacgaccgcaccgacgagtacggtggcagcctcgagaaccggtgccgcttcgccgtcgaggtgatcgacgccgtcgtcgccgaggtgggagctcaccgtgtcggaatcagattatcgccgttcgtcgacttcatggactgcttcgactccgacccggtggctctcggctcatacatggtgcagcaactcaacaagcacccagggtttctctactgccacatggtggagccaagaatggccataatcgaaggacgaaggaagatcgcccatggcctcctaccattcaggaagcagttcaatggcactttcatcgctgctggcgggtatgaccgggaggaagggaacaaggtggtggctgatggctatgccgatctcgtcgcctatgggaggctcttcttggctaaccctgacttgccgaggaggtttgagcttgacgcaccattgaacaggtatgacaggtctaccttttatacacaggatcccgttgttggctatacagattacccttttcttgaggagattgatgaggagtcaagaactacttatgcttaattgtcacctaaataatccaattttagcctattatttggattaataatgtaacacttatcatgtgatacggacaagcatgaatacatttttttgttgtaagtttgtagctgttgattcgagattaatgagctaatgtaatattgatattgttcgagaaaaaaaaaaaaaaatatttttctgtgaatacatctgcgtttattaatcccaataaatttggatgcataactaatcaaatatcaaaatgaattagttgcagacataaaccatcaaaaaagagagaagaaaatgacatcttgcacgcaggcatatactaacactgtttacatgaatcgtgcacattattattgtggatatatagaaccaacaactaaaatagcacaaaatctaagcatcagcaaccgaattgttctgatccttatcgaggaaagggtagtccgtgtatccaacatattgggtcttgaattgtagaaaggggttggcgaacatactttgttcaatgtgcgccattaaggctataaccctt

SEQ ID NO: 82513 - DNA, 672 bp, Oryza sativa
  Clone ID: PAT_MRT4530_81936C.1
atggcgcagctgagccgggtgtgggtggcggccacggtggccgcggtgcgggcgcagcgggagagggcgccggcggcgcgggagcgggtggccgggctcgcgccccaggcggccgcgctcgccgccgcgcgggcggccgccgacgccgacggccggaggcaggccggcgccgacgagtcgctccgcaaggccatgatgctccaaaaccagagcgcttccccgaaactgcacgatgacacgaacaaaacggagctcgagcaaaggctgcacaatttcttgcagcctgcggcagctttccgtaggtgtacaagatcagattcgatctccggaactccagaaattcaggcggcccccgcgtcggccgctctgttgattggccccggttcacgtggcttcacgtggcgccgggccatcgcggtcgccggcgaagacgggtggcgcaggcagaggcagagacaacgggtcccgccccgcccgacggccgcaggggatcaattggctgagagcaaggagctgggcaaccccgataaggtgtttggcatggtggtagggcagaccgcggacctgatgtatagaagcggcatggcctcgaggctcgaggtaaagcggtggcgcgaaagcagccacatgtggtggacggaggatgccgccaccgccactgaggggatctag

SEQ ID NO: 82514 - DNA, 725 bp, Oryza sativa
  Clone ID: PAT_MRT4530_81937C.1
ctacgagtccatggccacgccgctatcatctccctgcctgtctacgcttggcgaatatacgccacctagaagtagtagaatcaccatgccgatccacctgtcctccagacttgggttgtcttcttttgcagcttcaccgcaaagccgcccgacgagtctacgccagacccaccgtcttcaagagactccgatatccctgtaatttcttcctcttgaatccacctgcaacagtgctccaccttctcacctatcatctcagtcgtcagacatgaagaactgaaccctttcttccttgtcgtcttatgaactgaactaataaatccatcattcacgctttcccgcatccgtagactgaattccaaacagagtcctttacgatgtcgactccgaatccacatcttctccgagtcaagtttgatctgcgtcttcttctgcattgaactcaattttatcgtcttccttgctgcgtcatcgtctgcatcattaagcccatggcttcctgttcgtatggcgctacccctccaatctctcctgtcgccttcggccacgcccggccccgtcttccggtcacgttccgccatcgccggtctgatcgcgagcgaggtcatcgcctccgcaatgtcctcattgtcgccatcgatctcatcgccacggctgacgatctcctgtcgatgcgcgatccctgcctcgtgtttcctcctccacatgtcttcttgatccaatac

SEQ ID NO: 82515 - DNA, 300 bp, Oryza sativa
  Clone ID: PAT_MRT4530_81938C.1
cgactcctataggcgattggtacctcgagccggccgggactacttctttcttcacaaaagaacctacttagatcaaaatggctccatcaagggcggcatcaacggtttcggtcgtatcggccggatcggcttccgcaacgccggcgagcaccccgacatcgaggccgccgccgcccccccccccccgccgcgccccgagcgggggggcgggcgcggcggcgggccaatcgcccccgccgccccccccccgcccccccccccccgccccccgcgccccccccccccccccccccgcccccc

SEQ ID NO: 82516 - DNA, 545 bp, Oryza sativa
  Clone ID: PAT_MRT4530_81939C.1
ctgcaggaattcggcacgaggctttcttgtctgtcacttacttgtcgtgattagtctgtcttgaagcgtggggcgttattgttatttatgcatatatccttccagtcgatgcgcaacatcaaaagcaaatcgaacaaattctctgctttcatacactcctccgatactgcgctgcagccctgtgttcgacaacttgttgatactaatcggtgtctcgagcattggcaaaagttgcgccgctcaagccagacatccgcctcggtcaggccgtctccgagtttgaagctgacctttcagccaaacaaaaggtcgaatttcaagcactcaggttgcaatccagcaaggctgcgcctgatccgagcgatgtgatgcggctgacagccagaatggacaaatgtttatctaacaagtttggcggtcaatgtttcggacctcgcttcaccaattttgttcaaggagtccagcaattcgctgcccttggggatatcctcgttggtggttcacagaacctagtcgcatgtggggtgtggtcagtattacgcata

SEQ ID NO: 82517 - DNA, 444 bp, Oryza sativa
  Clone ID: PAT_MRT4530_8193C.1
atgtggcggcgagcgccgcagcggctccacctcgactggctggggggcgtgcccgagggcggcgccaagccgtatgagggacaatgcgttgacctgaaattttacgcactccgacctcctccatcggctgcgctgccgctcaacctatgccaccgccggatcgacgggagctgccagctgctccacctgcgccgtcatagggagccacacaaccaacctcctccattggctgcgccgccgctccacctgcgccaccgatggatcgacgggagccacccgctgcccccctcccctgcacctccacctggcgccttcctccgcatctccgctccgctctctccccttcgaccacctccaccaccgtcgcacaccgtatcgcctctccactctctccccggcgactgcgaatcgatcccggctggaggcgacttggttggcgactag

SEQ ID NO: 82518 - DNA, 351 bp, Oryza sativa
  Clone ID: PAT_MRT4530_81940C.1
gacaaagtcatgactctttgcatatattatgaccaaatccatagtactgttgctgaaattgtcaacagtaaaggaataacactctccataagactaacagaaaggggccagataaacaataatgcaattagatgtttcctgctacagagaacatcacacaaaataacataaatatttaatataggtaagggagaattacatgagtcacctttgagctaaaagacaataatagtagtaactttcagttgcaacggccatcatgagtgcagtgtgcgactgaacataatcatttcacaggatggctggtaaaacctcctttttaacaggcggcctgttccctggaaatgcact

SEQ ID NO: 82519 - DNA, 403 bp, Oryza sativa
  unsure (1)..(403): unsure at all n locations
  Clone ID: PAT_MRT4530_81941C.1
cggacgcgtgggtggctaaccagcattactggcaacgtggatcaccatggagagttgaagttcagaggctaccatgggtcatacacggtagaagtagcaacgccttcaggaaaggacccaaagttcagaaacagaaatcattcagatcagaattcagagatgggaacaagcttcaatctgtatacaagcagacagctagacctgctcccaccctgtgtcaccacgcgcgggcggcacaggaggcgaaacctagccctgctgccacccctttccccccttcccccacctcaccgatggaaagcagggcggcgatccaacatggtggtggtggggcctaattgcggcgggagcagagtggcgccgagtagcattggcactacagggggacagcngccggtgcgag

SEQ ID NO: 82520 - DNA, 1071 bp, Oryza sativa
  Clone ID: PAT_MRT4530_81942C.1
atggcggcgtcgccggcgttggtggcggcggcggcgcagcagcagcagctggtgccgtgcatgtacatcttcggcgactcgctggtggacagcggcaacaacaacaacatcctgagcctggcgcgcgccaactaccagccctacgggatcgacttctccggcgcggcgccgccggggcgcttcaccaacggcctcaccgtggtggacatgctcgccgacatgctcggcctccgcccgccgctcatcccggcgtacgccatggcgcagcccggcgacttcgcccgcggcctcaacttcgcctccggggccgccgggatcaggcccgagaccggcaacaacctgggtcggcactacccattctcggagcaggtggagcacttccgggcggcggtgcggcagatggggccgaacgccggctcgccggagcggctcgggcggtgcatcttctacgtcgggatgggcagcaacgactacctcaacaactacttcatgcccaactactacaccaccgcgcagtcctacgacccggccgcctacgccgccgacctcctccaggagtactcccgccagctcgccgccctccacgccctcggcgcccgcaagttcgtcctcgccgccgtcgggacatcggctgcatcccctacgagctcgcccgcatcagcaacaaccaagacgacgatgacgctgctcctagtagcgattccggcaccggcattagcatctctctcggcggcgtcgcggctcaacggcggcggcggcggggggaggatggcgggggcgacggtggtgtacctggacacggtgaggacggggagggcggtggcggcgagcgcggcggcgcacgggttcgaggtgctcgaccgcgggtgctgcggcgtggggcggaacaacgggcagatcacgtgcctgccgatgcagcagccgtgcggcgaccggagcaagtacgtgttctgggacgccttccacccgacggaggcggccaaccggatctacgccgccagggcgttcaactcctccgccgccgccggcgacgcttaccccatcaacgtcagccagctcgccgccatatga

SEQ ID NO: 82521 - DNA, 1221 bp, Oryza sativa
  Clone ID: PAT_MRT4530_81943C.1
atggcggcgtcgccggcgttggtggcggcggcggcgcagcagcagcagctggtgccgtgcatgtacatcttcggcgactcgctggtggacagcggcaacaacaacaacatcctgagcctggcgcgcgccaactaccagccctacgggatcgacttctccggcgcggcgccgccggggcgcttcaccaacggcctcaccgtggtggacatgctcgccgacatgctcggcctccgcccgccgctcatcccggcgtacgccatggcgcagcccggcgacttcgcccgcggcctcaacttcgcctccggggccgccgggatcaggcccgagaccggcaacaacctgggtcggcactacccattctcggagcaggtggagcacttccgggcggcggtgcggcagatggggccgaacgccggctcgccggagcggctcgggcggtgcatcttctacgtcgggatgggcagcaacgactacctcaacaactacttcatgcccaactactacaccaccgcgcagtcctacgacccggccgcctacgccgccgacctcctccaggagtactcccgccagctcgccgccctccacgccctcggcgcccgcaagttcgtcctcgccgccgtcggcgacatcggctgcatcccctacgagctcgcccgcatcagcaacaaccaagacgacgatgacgctgctcctagtagcgattccggcaccggcattagcatctctctcggcggcgtcggtctgaccgtcggcggcggcggcggcggagggagtacgcgagcggcgaacgcgagcaggagcggcggcaatggcggcggcggggcgtgcaacgaggagatcaacagcgcgatcgccatctacaacagggggttgttgtccatggtgaagcggctcaacggcggcggcggcggggggaggatggcgggggcgacggtggtgtacctggacacggtgaggacggggagggcggtggcggcgagcgcggcggcgcacgggttcgaggtgctcgaccgcgggtgctgcggcgtggggcggaacaacgggcagatcacgtgcctgccgatgcagcagccgtgcggcgaccggagcaagtacgtgttctgggacgccttccacccgacggaggcggccaaccggatctacgccgccagggcgttcaactcctccgccgccgccggcgacgcttaccccatcaacgtcagccagctcgccgccatatga

SEQ ID NO: 82522 - DNA, 460 bp, Oryza sativa
  Clone ID: PAT_MRT4530_81944C.1
cggttttcgtgggctgtggcaaaagcgatgactgattgcctggtctaccactggagacatgcgaggttatggacgacgcgagatgcgatgatctgactatcatgggtaagaacaaccttccattcatggggaaaaacgtagaagctgggaccagcaataatattgtgaggcgcaaagaactagagaatggcgcgagggagattaaatgggaactacctacccttagtgtcggggacatgggaaggatacccttcctaactagatctgaaagtgcactggagtctcgcagagatgaatattaggacccaactacagaaagcacgagcagtgaatcactttctgaggcatgcctcaacatgagctcgggaacttgctagtcatggaaacaatgtggaggctgctgcaactgcggagagaccgatgctatcaccaacatcaggattatctgaaggaggagagc

SEQ ID NO: 82523 - DNA, 531 bp, Oryza sativa
  Clone ID: PAT_MRT4530_81945C.1
atggcttgcgctcctttctcctgctgcacctaccctcctgctccgtcccccctcaccatcaacgagtcaaggagaaggctgacaacaccagatctggagatacctagggcctccccgtcattggatcagcctaagccatgcagtgatgaggtgatggatcgtaccggtccctgtggcctccacctcggtgtcatgccatcgaggaggatgccgattgatgcgaatcctcctcccatgcaactgttagtggtgatggaggggagacaaatgaaggtgctagatttggagtttcgattggcaatcgatgtggtgttgcagacaccgtgttgctcgtcgacgttgtgcgtaggtatgtcgtgcgtgtggcgtatcaccatggctcggctggtacctacaggtttcagggatggtacttgtggtatcatggttgataccttcagggctggtacttgtggtatcatggttgataccttcagcaatggtaaggacggtgtaacggtgccgaagcaagctattgcggacgatgggtaa

SEQ ID NO: 82524 - DNA, 234 bp, Oryza sativa
  Clone ID: PAT_MRT4530_81946C.1
ggtaatcatgagtacctgaccagacttattgaggggctgctttaggggtcatccggggttccctaccaattcctgctacagagtcgtccagtatgttcaagagactgtgcgacagtagaccatgttattgaccttaagaccggagatgagtcattctaagctgatgttgctaactgcattaacttagggcctgtccatacattacatgaatcttataatattgatgatagattt

SEQ ID NO: 82525 - DNA, 409 bp, Oryza sativa
  Clone ID: PAT_MRT4530_81947C.1
cgacccacagcgcgcgccttttctgctctgcacctgcgatccatacgcgcccgcgaggtttaaagagccaggcggcttctctgggagagcaggggagagaaggagaggaggaaatactccccctcacctgcgtgagcagatcctatctccagctgtagcggagatggtgctcacgttcacgaaactgttcaggcgtctcttcggcgagatggagatgaggattctcatggtcggcctagctctccgcggtaaaaccaccatcctctacaagctcaagctcggcgagatcttcacccctatgcccaccattcattttaatgtcgaaactgttgagtacaagaacattagcttcaccgtttgggaatgttgtggttacgactagatcaggcctcctttggaggccctattt

SEQ ID NO: 82526 - DNA, 548 bp, Oryza sativa
  Clone ID: PAT_MRT4530_81948C.1
tacagggaggtggtgatttataaacactggcatggtcactagacactagtagagggtatatttttaccttggaccctcctcctttttggcatgccaagcaagaggcccagaggcctggggcaatggcactagtcagtttgcatgaggtgcccctcccagagcagacaaccctgcaggactctagtttaatcttcttctctattctctcttgtgtgggcccccacaaggagtagtcgtacatttcaaaggtttttttttaagtacatttcaaagttgaagcagtggcactttgtgtgtgatggatgcaatgcttaacacactaaacaagttagggcccctttgaaatggaggattagcaaaggaattttagaggattcattttcctaaggattttttcctatagagccctttgattcataggaagaggataggaaaactttcataggattgcattcctatgatcaattccataggaaaataagcaagaggttagacctcttgtgaaacttttctttgttgagtgtatcctgtggtataatcaaatggct

SEQ ID NO: 82527 - DNA, 7691 bp, Oryza sativa
  Clone ID: PAT_MRT4530_81949C.1
atgccgatgcggccgtgggaatttattattttaggccgcacagcccccatctctcccccacccctcgggatatccgccttctcccgcccgctccgcctccgcctccgcctccgcctcgccgccgttgtcgacgccgcaaggatccaaacgccgccccgcgtcgccttctccgccttcttcttcttcttcttcttcttctccgagggtctctctcgggaaggtacagctgcccgcctccctgctcttatttatcgcgtgccgttcattccgtgccttctccagctccagatccgcgcgccgcacgccgatccgcgcccggccggttttagctgcgctcatcatttcctcgcgttggctcagggtttaagctcctctttgttaagtgggacgatttcacacatctggggatttatcttctctttgtatggcactacacatttgagaaaccgtgcaattctactgtttggtcttgctggcatcattgacctcccaaatgacgcagcttcagaagttgatatttcacatggttccgaagatcccagggggcctacggtcccaggttcctaccaaatgaatgggattatcaatgaaacacataatgggaggcatgcttcagtctccaaggttgttgagttttgtacggcacttggtggcaaaacaccaattcacagtgtattagtggccaacaatggaatggcagcagctaagttcatgcggagtgtccgaacatgggctaatgatacttttggatcagagaaggcaattcagctgatagctatggcaactccggaggatctgaggataaatgcagagcacatcagaattgccgatcaatttgtagaggtacctggtggaacaaacaacaacaactatgcaaatgtccaactcatagtggagatagcagagagaacaggtgtttctgctgtttggcctggttggggtcatgcatctgagaatcctgaacttccagatgcgctgactgcaaaaggaattgtttttcttgggccaccagcatcatcaatgcatgcattaggagacaaggttggctcagctctcattgctcaagcagctggagttccaacacttgcttggagtggatcacatgtggaagttcctctggagtgttgcttggactcaatacctgatgagatgtatagaaaagcttgtgttactaccacagaggaagcagttgcaagttgtcaggtggttggttatcctgccatgattaaggcatcttggggtggtggtggtaaaggaataaggaaggttcataatgatgatgaggttaggacattatttaagcaagttcaaggcgaagtacctggttccccaatatttatcatgaggctagctgctcagagtcgacatcttgaagttcagttgctttgtgatcaatatggcaacgtagcagcacttcacagtcgagattgcagtgtacaacggcgacaccaaaagataatcgaggaaggaccagttactgttgctcctcgtgagactgtgaaagagcttgagcaggcagcacggaggcttgctaaagctgtgggttatgttggtgctgctactgttgaatacctttacagcatggaaactggtgaatattattttctggaacttaatccacggctacaggttgagcatcctgtcactgagtggatagctgaagtaaatttgcctgcggctcaagttgctgttggaatgggtatacccctttggcagattccagagatcaggcgcttctacggaatgaaccatggaggaggctatgacctttggaggaaaacagcagctctagcgactccatttaactttgatgaagtagattctaaatggccaaaaggccactgcgtagctgttagaataactagcgaggatccagatgatgggtttaagcctactggtggaaaagtaaaggagataagtttcaagagtaaaccaaatgtttgggcctatttctcagtaaagtctggtggaggcatccatgaattcgctgattctcagttcggacatgtttttgcgtatggaactactagatcggcagcaataactaccatggctcttgcactaaaagaggttcaaattcgtggagaaattcattcaaacgtagactacacagttgacctattaaatgcctcagattttagagaaaataagattcatactggttggctggataccaggatagccatgcgtgttcaagctgagaggcctccatggtatatttcagtcgttggaggggctttatataaaacagtaactgccaacacggccactgtttctgattatgttggttatcttaccaagggccagattccaccaaagcatatatcccttgtctatacgactgttgctttgaatatagatgggaaaaaatatacaatcgatactgtgaggagtggacatggtagctacagattgcgaatgaatggatcaacggttgacgcaaatgtacaaatattatgtgatggtgggcttttaatgcagctggatggaaacagccatgtaatttatgctgaagaagaggccagtggtacacgacttcttattgatggaaagacatgcatgttacagaatgaccatgacccatcaaagttattagctgagacaccatgcaaacttcttcgtttcttggttgctgatggtgctcatgttgatgctgatgtaccatatgcggaagttgaggttatgaagatgtgcatgcccctcttatcacccgcttctggtgtcatacatgttgtaatgtctgagggccaagcaatgcaggctggtgatcttatagctaggctggatcttgatgacccttctgctgttaagagagctgagccgttcgaagatacttttccacaaatgggtctccctattgctgcttctggccaagttcacaaattatgtgctgcaagtctgaatgcttgtcgaatgatccttgcggggtatgagcatgatattgacaaggttgtgccagagttggtatactgcctagacactccggagcttcctttcctgcagtgggaggagcttatgtctgttttagcaactagacttccaagaaatcttaaaagtgagttggagggcaaatatgaggaatacaaagtaaaatttgactctgggataatcaatgatttccctgccaatatgctacgagtgataattgaggaaaatcttgcatgtggttctgagaaggagaaggctacaaatgagaggcttgttgagcctcttatgagcctactgaagtcatatgagggtgggagagaaagtcatgctcactttgttgtcaagtccctttttgaggagtatctctatgttgaagaattgttcagtgatggaattcagtctgatgtgattgagcgtctgcgccttcaacatagtaaagacctacagaaggtcgtagacattgtgttgtcccaccagagtgttagaaataaaactaagctgatactaaaactcatggagagtctggtctatccaaatcctgctgcctacagggatcaattgattcgcttttcttcccttaatcacaaagcgtattacaagttggcacttaaagctagtgaacttcttgaacaaacaaaacttagtgagctccgtgcaagaatagcaaggagcctttcagagctggagatgtttactgaggaaagcaagggtctctccatgcataagcgagaaattgccattaaggagagcatggaagatttagtcactgctccactgccagttgaagatgcgctcatttctttatttgattgtagtgatacaactgttcaacagagagtgattgagacttatatagctcgattataccagcctcatcttgtaaaggacagtatcaaaatgaaatggatagaatcgggtgttattgctttatgggaatttcctgaagggcattttgatgcaagaaatggaggagcggttcttggtgacaaaagatggggtgccatggtcattgtcaagtctcttgaatcactttcaatggccattagatttgcactaaaggagacatcacactacactagctctgagggcaatatgatgcatattgctttgttgggtgctgataataagatgcatataattcaagaaagtggtgatgatgctgacagaatagccaaacttcccttgatactaaaggataatgtaaccgatctgcatgcctctggtgtgaaaacaataagtttcattgttcaaagagatgaagcacggatgacaatgcgtcgtaccttcctttggtctgatgaaaagctttcttatgaggaagagccaattctccggcatgtggaacctcctctttctgcacttcttgagttggacaagttgaaagtgaaaggatacaatgaaatgaagtataccccatcacgggatcgtcaatggcatatctacacacttagaaatactgaaaaccccaaaatgttgcaccgggtatttttccgaacccttgtcaggcaacccagtgtatccaacaagttttcttcgggccagattggtgacatggaagttgggagtgctgaagaacctctgtcatttacatcaaccagcatattaagatctttgatgactgctatagaggaattggagcttcacgcaattagaactggccattcacacatgtatttgcatgtattgaaagaacaaaagcttcttgatcttgttccagtttcagggaatacagttttggatgttggtcaagatgaagctactgcatattcacttttaaaagaaatggctatgaagatacatgaacttgttggtgcaagaatgcaccatctttctgtatgccaatgggaagtgaaacttaagttggactgcgatggtcctgccagtggtacctggaggattgtaacaaccaatgttactagtcacacttgcactgtggatatctaccgtgagatggaagataaagaatcacggaagttagtataccatcccgccactccggcggctggtcctctgcatggtgtggcactgaataatccatatcagcctttgagtgtcattgatctcaaacgctgttctgctaggaataatagaactacatactgctatgattttccactggcatttgaaactgcagtgaggaagtcatggtcctctagtacctctggtgcttctaaaggtgttgaaaatgcccaatgttatgttaaagctacagagttggtatttgcggacaaacatgggtcatggggcactcctttagttcaaatggaccggcctgctgggctcaatgacattggtatggtagcttggaccttgaagatgtccactcctgaatttcctagtggtagggagattattgttgttgcaaatgatattacgttcagagctggatcatttggcccaagggaagatgcattttttgaagctgttaccaacctagcctgtgagaagaaacttcctcttatttatttggcagcaaattctggtgctcgaattggcatagcagatgaagtgaaatcttgcttccgtgttgggtggtctgatgatggcagccctgaacgtgggtttcagtacatttatctaagcgaagaagactatgctcgtattggcacttctgtcatagcacataagatgcagctagacagtggtgaaattaggtgggttattgattctgttgtgggcaaggaagatggacttggtgtggagaatatacatggaagtgctgctattgccagtgcttattctagggcatataaggagacatttacacttacatttgtgactggaagaactgttggaataggagcttatcttgctcgacttggcatccggtgcatacagcgtcttgaccagcctattattcttacaggctattctgcactgaacaagcttcttgggcgggaagtgtacagctcccacatgcagttgggtggtcccaaaatcatggcaactaatggtgttgtccatcttactgtttcagatgaccttgaaggcgtttctaatatattgaggtggctcagttatgttcctgcctacattggtggaccacttccagtaacaacaccgttggacccaccggacagacctgttgcatacattcctgagaactcgtgtgatcctcgagcggctatccgtggtgttgatgacagccaagggaaatggttaggtggtatgtttgataaagacagctttgtggaaacatttgaaggttgggctaagacagtggttactggcagagcaaagcttggtggaattccagtgggtgtgatagctgtggagactcagaccatgatgcaaactatccctgctgaccctggtcagcttgattcccgtgagcaatctgttcctcgtgctggacaagtgtggtttccagattctgcaaccaagactgcgcaggcattgctggacttcaaccgtgaaggattacctctgttcatcctcgctaactggagaggcttctctggtggacaaagagatctttttgaaggaattcttcaggctggctcgactattgttgagaaccttaggacatacaatcagcctgcctttgtctacattcccatggctgcagagctacgaggaggggcttgggttgtggttgatagcaagataaacccagaccgcattgagtgctatgctgagaggactgcaaaaggcaatgttctggaaccgcaagggttaattgagatcaagttcaggtcagaggaactccaggattgcatgagtcggcttgacccaacattaattgatctgaaagcaaaactcgaagtagcaaataaaaatggaagtgctgacacaaaatcgcttcaagaaaatatagaagctcgaacaaaacagttgatgcctctatatactcagattgcgatacggtttgctgaattgcatgatacatccctcagaatggctgcgaaaggtgtgattaagaaagttgtggactgggaagaatcacgatctttcttctataagagattacggaggaggatctctgaggatgttcttgcaaaagaaattagagctgtagcaggtgagcagttttcccaccaaccagcaatcgagctgatcaagaaatggtattcagcttcacatgcagctgaatgggatgatgacgatgcttttgttgcttggatggataaccctgaaaactacaaggattatattcaatatcttaaggctcaaagagtatcccaatccctctcaagtctttcagattccagctcagatttgcaagccctgccacagggtctttccatgttactagataagatggatccctctagaagagctcaacttgttgaagaaatcaggaaggtccttggttgaatcatatgatgccaaaactattattggaggcacaaatagcttgtggaccctgtcggattgttggtgagtgtatattggatttgttagttctgccagatgaaagtgcaagtctgatgattcatgataccgtcagttggcaagaacaccggttaacctgagtgcttgtttacaaatggtcctttatgacaatcgttgtttcgcgctagttccgtgatctactatcatctgttagacgctgtaattagtgagtctccgcggatccacagtatacggttgagctgttgattcaattttggacacgaataatatgattttgtaggcataaatgcgtctgtatgtgaaataaattgtctgttgagttaacacacaagatgacaatatgtttgtgctctaaaaaaaaaaaaaaaaaatactaattgcggaatcaaaaacatgcattataaaaa

SEQ ID NO: 82528 - DNA, 2709 bp, Oryza sativa
  Clone ID: PAT_MRT4530_8194C.1
atggagttggcgacgggtgcactgccaagcgtcatcgccaagctaggtgatctgctcgtcggcgagtacaatctgcagaaggcggtaaagggggagatcaggttcctccaatccgagctcgagagcatgcagggcgccctcgccaaggtctccgccacgccggccgaccagcttgatccccaggacaagatctgggccagggatctcagagagctctccttcgacatcgaggacaccatcgacgcgttcgtcgtgcgcgacatcggcaacgacaacggggacggtgaggccaaaccacggggcatcagcaagctaatcgatagaagtgtcggcctattcaggaaggccaaggctcgccatgggatcgcctctgagatcatggacatcaagagccgcgtcgtcgaggttcacgagcgtcgccgcaggtatgagatcaacattggtgctggtggtggtgataagactgctacaattgaccctcgtttattcacgcggtacacggatgagaaagagcttgttggcatcgtgtctcaaactcctgacttgaagaaattgttcatggacatcatttatcaacttgacaaggagaaatataaagatctcaatgaaaaaccattggatttggatgaggtgcagctcatcaatgaactcagagaattccttcaacagaaaaggtatttcattgttatggatgacatatgggatatctcaatatggaaaatgattaaatgtgctttgcctgataatgatgttggatacaaaatcattacaacaacacgtatttctgaggttgctgaaaaagctggtggtgtttacaagttgaaacatctttctttaaataactctcgacgattactatatggaagaatatttggtaactgtgaagacacggaaaaatatcctgatgaggagttggctgaagtatccgagagaatactaaagaaatgtgcaggtgttccattagctatcattacaatggctagtctgctggcttgtaaagcaagaaataagatggagtggtacaaggtgtacaactcggttggtactggtctcgagaatagtctggatgttaagaatatgagaaagatcttgtcatttagctattatgatctgccaccccatttgagaacttacttattatatttaagtgtgtttccggaagattacaaaatcgaaaaagatcgtttgatatggatgtgggtagctgaaggctttatccagtgtgggaaacaagggaggagcctatttgaactcggagagagttacttcaatgaccttgtaaatagaaatatgatccaacccatatatgatatgtatactgacatggtatctgagtgtcgcgtacacgatatggtcctcgatcttatctgctcattgtcaagtgaggaaaactttgttactatattaaatggttgtgatctttcacaaggttacagccttaagtatgttgggaatttatttcacttgaggtatctaggactacgtgacacagatattcgggaggccccagaagaaataggaaacatacagtttctacaaactttggacctgagggcaaaccctatttgtgacttgccactgaatattgtgaagctcagacatttgacgtccctatgcttcgacgggtttgcgagggtgccagatgggattggaagcctaacaaggcttgaacatctagcatatgtgttgatcgattgtgctactgtgggcattctagaagagctgggcaacctaacggagctgagggtgctgtgcatcatcttctgggacggatggaacgacaaactggtgggtctcctacacaagttgcagaagatccagcgtctctccatcgacgtctgcatgaacaatgttcgaaagaacatgggtggtttggacgcctgggtcgcccctcggcatctcgtcgcactggatacagagaagatctgctggttctcgtcgctgccggcgtggatgacgaatccgtcgcatgtcccaaacctccgctcgctatccatcgccgtgagggagatccggcaggccgacgttgagaccctcgggaggctgcctgctctccgcgatctgcagctgcaggtggaccacgaggagctcggaatccgcggggtggtgttggtgattggatcagctggctcgttcgcgtgcctggtgtgctgtgggttgtggggattcgttgggccggcggtgttccggcgaggagcaatgccgaggctcagaacgcttcgctcccggttctccgtgcgggaggcgatcgccgtcgccggtgccggcgacgatggtctcgacttgggactggggagcttgccatcgctccaggaggtcaatgtctcgttggattgtgaaggcgccagcgaggaggaggtgaacgaattgaaggctgcgctgaggcgtgccaccaagatccacccgaatcatccaagcattagcattgacggagaaaaagaagaagaagatacatacctcatatcaatatatcatacatggcacatcggctgtgcgctcggcatggtggcggtgttccatgcggcgccgcaccgcgtggaggccaaacacgtcgaccacagcgtgctcccgagcgtgcccaaggcttggtgccccaagccgctcatggtggtggcccccgccaacgccgggacctacccggtcgccatcttcctccacggctgcaacatggtgaacagctggtacgagcagtggcggaagcaggattaa

SEQ ID NO: 82529 - DNA, 681 bp, Oryza sativa
  Clone ID: PAT_MRT4530_81950C.1
ctacatcattttcaacgtttattatactagagtacagtggtgccatcttagatatgcaatgccatcactctggatgttaaacaagaaatgaccgacgttgctcttggactttaaattactctaatgccagaatcatatgcatataactggagaacttcatcaatttcttgcagctacatagtttgcacctcagcatggaaatcttccaaacaaaaaaaaatggaagtttttaaacaaggcctagatttgtagtttatgcagacacaggaaatggcatgactaggtcactgttgcattcttattgtgagacgtagtctatgaaatgcagtatttgccattatcataggtcttcatctatttcaatgacacatgaaatttgctccatgttgatttgctcatttctaatggacaatcttatggaaacatcaaactttttgttgcacaggtcacaggcagtccttggttgtgtgcaccattctgcaggcgaataagaaaatttttagttcctaccatatgtattggggtatgccacaaaattggaatccatttaatcgaatcctaatgatactttgttagctatcactatgtaggaataatgataataataaatttcaggtttggtggctgatatggatattgagtttgagtgagaagtgcatgctttgattttgtattcagcgt

SEQ ID NO: 82530 - DNA, 258 bp, Oryza sativa
  Clone ID: PAT_MRT4530_81951C.1
atggctggcgcggctgctcctctgcgtccatggcgcgggaacagagcggtggcgcagcaggagggcgaggcgtcgcgcgaccacgggcgcggcaaggcagcggggcgcaggcgcagcacgggcggcgaccgcgcgggcgcgcgcgcgaggcacggcgccacgacggaacagacgctacacatacgggggccccaaattggatcattacccaaggacccgacccaaatcggggagggctcacatggaagcccgttctaa

SEQ ID NO: 82531 - DNA, 3547 bp, Oryza sativa
  Clone ID: PAT_MRT4530_81952C.1
atggcggccgtcgcgccgccgtcgctgagcacgcccgtgaccatactcccctccgtgtctgtcgccttgcccccgcttccaccccctgctactgatgacttccactggctcgacctcttcgcgttcctcaactcccccgcggattcctaccagattcctgtggaggagcaggaggtggaggtggaggtggaggtggaggtgggggtggagagggagagggagagggagagggagagggagagggagagggagcgggcgaggaaggcggagcaccggcggctgcggcagcggcaggtgaaggcggagacggaggcgtgggcgcgggccgccgacgagtaccgggagctcgagcgggagatgctcgaccggaggctcgcgcccgcgctgccctacgtcaagtcgctcttcctcggctggttcgagccgctgcgcgacgccatcgcccgggaccaggaggtgcagcggcggaagcgggtcaagcacgtctacgccaagtacctgctcctgctgcccgcggacaaggtggccgtcatcgtcatgcacaagatgatgggcctcctcatgtcgagcaaggatggcgtcgccagcgtccgtgttgtccaggccgcgcactgcatcggcgaggctgttgaacgtgagaatcgactcaacaacgtagaagctttggacagtttagcgctttatacaactgatagatgtgttaggagttggaatttcaaagtccagacattctttcaaaagacaaggaagaaaagtgcaggtgaaaatgatttggcattagagaaggagcaggccaaatgccgaaaacgtgttaagagtttggttaggaggagaaagttgactgaagcacagaagattgtgcaacaggagattgaattggaagaatggggcacagaatcccaagtgaagttagggacccgcttgattgagttgttactggattcagcttttgtacagtcaccagctgaccaaacaccagagagttctccagatattcgaccagcatttaaacacgtacttcgacaacctatagtagaaaatgggagactgaagaaaaagcactgggtgatagagtgtgaccctcttgtgcatgaggggtttgaaagcactgctaggcacgtggagataccctatcttcctatgcttgtgactcctaaaaaatggaagggctatgatacaggtgggtacctttttcttccctcatatattatgcggacacatggcgtgaaagatcaaaaggaagccattaagagtgttccgagaaaacagctacggaaagtatttgaggcattagatacccttgggagtactaaatggagggtgaatagaagagtacataatgctgttgaaactatttggagtcgaggtgggggcattgcaggactggttgataaggaaaatattcctctacctgaacgaccagaaacggaggatccagatgaaatacagaaatggaagtggagcttaaagaaggcaaagaaagctaatcgtgaactgcatgctgagcgatgcgatacagagcttaaactatctgttgctcggaaaatgagagaggaggatggattttattatccccataatcttgattttcgtggccgtgcataccctatgcatgcacatctaagccacctaggttcagatctatgcagaggtgttctagagtatgctgaagggcggccactaggaaagtctggcttacgctggttaaagattcatttggctaacaaatatggtggaggaattgaaaagctttctcatgaggacaaggtagcatttgtggagaaccagttgcctgatatatttgattcagcaactaatcctgttgacgggaattgctggtggatgaatgctgaggatccttttcaatgtttagccgcatgcatggatctttctgatgccttaaaaagttcatcacctcagtgtgctgtttctcacctacctattcatcaggatggttcatgcaatggtttacaacactatgctgctcttggaagagactatatgggtgcagctgctgtcaatttagttcctggagacaaacctgcagatatctactcagagattgctgctagggtgctggatgttgttcgggaagactcgatggaggatcctgcaactaatccaactgcctcattagcaagggttttagtcgatcaggtggataggaagcttgttaagcagacagtgatgacatcagtttacggtgtcacatatattggtgctcgtcaacagataacaaaaagactacaagagaaagggctcattacagatgacaaattgttgtatgaagtgtcctgctatgctaccagggtaactttggatgcattaggacaaatgttccagtctgcccgtggtataatggcatggcttggtgattgtgcaaagatgattgcttcagaaaaccaccctgtcaaatggacgagccccgttggtcttccggttgttcagccctacaagaaatataagaactacatgattcgaacttcactgcaatgtctggctttacgacgggagggagatgcaattgcactccagcggcaaaaggcagcttttcccccaaattttgtgcacttctcttgatagttcacacatgatgatgactgctattgcatgcaaaaaggctggtcttcattttgcaggggtgcatgactcgttttgggtgcatgcatgtgatgttgataaaatgaatcagatactgagaggacaatttgtggagctttacagcatgccaattcttgaaaatttgctcaaggagttccagacatcattcccaacactagaatttcctccctgtccttcacaaggggacttcgatgtgagagaagttcttgcttcgacctacttcttcaactaagcttaatggaaaagttttgcacattagcacatacgcagcaagtcagtaagttcggcagtagctgaatagccagccatattgctgataccatggcgatttggtgccaagtacgaaatgtggcataagcatcagagaagagcaacacaccgttgcaactgctgggagcctggaacagtatatgggtttttgtcattggcaaatcagttccccagattgccgattttggaggaagctaaaaagttccaagaaacctgagctgaaacaaaacccagtacttcctgctgatgtttttagattcatgcaggatctactaggatttcagttcagggaattcaccatgctacacccagccaatgaaggcgattttgcgacataacaggttatcaactacagaatactgatcgatactagtcctgctgaccaccctgaccaatttgatcataggcgacagttgaaccataatttcactgtctatacatgtaacattatcttttggcctcttagggctataattatagccgattgctgtatcggtgcggtgacctggtaataatgtgtagaataaagtgccaaagagaaatgtatactagtgtacatgattgctggatgctgttgatagcaagcaacctgaaagagagaaatgtacatgaaaacggctcgatcttgtcgattcgttcaaaaaaaaaaaaaaaa

SEQ ID NO: 82532 - DNA, 198 bp, Oryza sativa
  Clone ID: PAT_MRT4530_81953C.1
agaaagagcaatatgacttttacatagggatgtatctaactggacagtggatgtcaatcacactgcaaaatgtagaattatttttacgaattcataatactcttggggggaaaaaaggctgcactggaggttgaacaaaggggctttgaagaaacctggaaaccattactatatcttcgaggggttgttgaagctaaa

SEQ ID NO: 82533 - DNA, 309 bp, Oryza sativa
  Clone ID: PAT_MRT4530_81954C.1
tttctcccgcactctctcccgcgaaaagacttctgctctcttttaagatgttgggggtgttgatacactcgcgcgcggcggcgcggtgccagagatgaggaggatgttgcgttgcttcttcggcggcggtggcgactagacgggaggtgacgaggagaataatgcgtctgcggcggcggtggtgaagaacaagaaggcggtgaggcggatgctgagtgcgacagcgcggcttcagtcgttgtcgctggaggacctgttgtggacgctgccgcaatccgggctgtaggccttcactcttgcagagcttaa

SEQ ID NO: 82534 - DNA, 360 bp, Oryza sativa
  Clone ID: PAT_MRT4530_81955C.1
aagaaaaaaaattactcctagactacgggggaaaaagatttattaacatccgggaaatgttgggacaagattttatattaaaaaacctttttgttcacatacccaatacgaaaaatggggggaaggcacaaatacaaataaaaaaattcccccaccccccaccattgtggattggggcgggcccaaaacttagttttcacccacaagaaaattaatccacgagtttatggcccagcattacttttcccataattgttaatccaattttggaaaggggtgaaggttgcccaccggaaacgagttttgacgatgcccatgtcggggatgacaaccagtatggttttccaggggggccaccac

SEQ ID NO: 82535 - DNA, 934 bp, Oryza sativa
  Clone ID: PAT_MRT4530_81956C.1
tcagcgggtcaaagggggagggcgcacggtggactcggtccaccgcggcctagcggcaccgtggacccggaccacaggagtggtccacgagcggccaaagcacgggcgcgacgaggagctgagccttggaccgacggcacgcgaggccaccagcgacggcgaccggcgggcggcgcggggagcggtgaaggggagggggcaaggaggagggaggagggtgctcaccgagctggcaccgacaaggagcggccgccatggggcatggcgacggccgacggccggcggcggcgggctccccatgatggaggcgaggcggcgctccggcgactcccgaccacagcggaggcgcggccgaggaccgacggaaccggcgcgggaagggaacccggttccggcgacgattcgaagaggcagaggggtggccgagctacacatgaggactgtggtgccggggaaggcgacgacgcaggtcgacgttgaccggggaggcggctcgacacagctggagacagcaaacacgacggcgatctcgggttggtggtggaagcggagctccggcactggaatggggaaatagtggaggccgaggtggagcttggcgcagcggtgccgacggcggtggcggggcagcgcgacggcgacgggaacggcggcggtgggcggctgaacgacgccggcgagcggcggaggttggtggtgcggtggggcggctttccggtggctattggggaaaatggagcggcttgttgacgtggtcctgccgttgtcgcttagcaagtgcatcgccctgcagccgcaaccgccggtcagcctgcctgtcgccgcaaccgccgccgtaggtcagcctgcgcaccgacggcgacggcgcccgtcgctcaaccctccgccgccgcacgttagcctgtgcgctgtcgccgccagtgccaccgcccat

SEQ ID NO: 82536 - DNA, 933 bp, Oryza sativa
  Clone ID: PAT_MRT4530_81957C.1
atgacgcatttattaattattttctcaaaggaaaaggcattcgctgacgtcagcaaggtgaaccagcgccgacaggcgggccccacacgtcagcgggtcaaagggggagggcgcacggtggactcggtccaccgcggcctagcggcaccgtggacccggaccacaggagtggtccacgagcggccaaagcacgggcgcgacgaggagctgagccttggaccgacggcacgcgaggccaccagcgacggcgaccggcgggcggcgcggggagcggtgaaggggagggggcaaggaggagggaggagggtgctcaccgagctggcaccgacaaggagcggccgccatggggcatggcgacggccgacggccggcggcggcgggctccccatgatggaggcgaggcggcgctccggcgactcccgaccacagcggaggcgcggccgaggaccgacggaacctggggaacaaggaggagggactaggggaggaataggaggcgcggaaagccggccgaagatcggggaaattagtggagctcaccggcgcgggaagggaacccggcggctcgacacagctggagacagcaaacacgacggcgatctcgggttggtggtggaagcggagctccggcactggaatggggaaatagtggaggccgaggtggagcttggcgcagcggtgccgacggcggtggcggggcagcgcgacggcgacgggaacggcggcggtgggcggctgaacgacgccggcgagcggcggaggttggtggtgcggtggggcggctttccggtggctattggggaaaatggagcggctgccggggtagacttcgacaatggattgggaaggggagcggtggacggggtgcggcacgacgcagcgaagctattggggccggcggcgcagtgcggcagcgacgggagtggtggctag

SEQ ID NO: 82537 - DNA, 447 bp, Oryza sativa
  Clone ID: PAT_MRT4530_81958C.1
tcagttctcctctccagcgcggtgcaagaccacgccgagacaagcctcgacctcaagcggaggaatgaagacgatggagaactcggaacgatcgcgcacgacggactcatgccgcatatggcgaactctggcaaccggtattgggagaagccattcggcgttgtgatagtaggacaccggtgataggatcaccgtgcggcagtagtgacaggaccgctgcggtgtggcaatggcgatggaacacgccgcacaccgtcgagccctcctcactgctgctgctgccggaggatatctctcgcggtcgctgccgaagcggttggcggccatgaggatgcgcccccgatggcgccgagcaccccgaacacgaggagagcggccgcgaaggcgatctccatgatggacgtgccccgggcccgcccacggcgccgccgacaaggtcgtcctcat

SEQ ID NO: 82538 - DNA, 770 bp, Oryza sativa
  unsure (1)..(770): unsure at all n locations
  Clone ID: PAT_MRT4530_81959C.1
ccggccgggaaatttcntggagatctcgaccatctcccacaagccgaacgcaatctgctcgttcgttcctcgcttctgggactacggaactcggaattgaggcatcctgcgcaacttgatacaagtttcaatcaagagattcaagatacaggcatcgaattaccattaccaatgaaaggagccgcaaggtttgtggtggaaaatgcaaccaggcaaatcaaacctgtcaatggacttccgagtatgtcaacatatccctccagtttgctttgagattcagtaccgaagttcagtgtcttttgtcctttttctgctatgtaatactgtcgagcagggttgatgacaattactactcctcagaagcatggcaaggaaaataattccaatgattcagtgctcacagaagatgaaaacatcgagccacttgttgcttttagcaggccacctcctttgccaccagttcttggccccttgatcatgctctcacttttcaatatgtcaagcggcggggatgaaaacaaaaattaagccggaatctgaatgaaatatgtggtttatctccgaccgcataccgtctccagaggtgttgtacatactaagttgtagcaatcaactactagaaaaacatgatgtagcataagctatgcactgnttactgctgtagacttgtatggaccaagtaagctgctgtcaaaactctgntgctaatgtttcagtagcgaattgacaactttccagctgctgaaatttgtcagttgtgctgatgtttc

SEQ ID NO: 82539 - DNA, 642 bp, Oryza sativa
  Clone ID: PAT_MRT4530_8195C.1
atgaccttacccagcatgatagcattattggctatagtactacttgtctggttcctcacagtaactagtcctctactatccaagtcccgatccacgccgatccaccggagtccaacggaggaggaggaggaggacgaggaggacgagggcggcgctgccctcgccgtgcccgtgtgcgcggccgctgtgatggttgcatcatcatcggcggcgtcggcggcggcgctccgcggcctcttcgccggaggagggaggaaggcgcggcggcgtggaacgaagcggcgtcccgttcatgcggcggcgctgcgcggcgctcgctcagccgccggagtggaggacgacgcggctcgggcctcacagcggaggggtggcgaccggaaggccgccgccacctcgcaggtgatcgccggcgacctcttcgggatcaagccggaacttctcgcgattgcaggcgtctacgaaggcgcgcagcacgcgagcgtagaggaagacgagccgtcgcggatgaacagggagcagtcgcgcaaagcgcttcccaaaaaccttattgccgccttcttccggtgcaggacgtcgaaggcagaggttccggagacctgctctctcgatcgccggtgcaagctggcgagcgggatggagtag

SEQ ID NO: 82540 - DNA, 289 bp, Oryza sativa
  Clone ID: PAT_MRT4530_81960C.1
gtgatcggccgaccttaatcttttgaggttatgggtgttttatttagtggttgtgtcgcgagacaataaccatttgcgatatcggacaaacccaagtgcctatcaacctatgggccattgggatcttcgggacaaaaaatatgacgggccgcatttgcgttaagggggggatttgttcaaccaaacagggtgggagaatactgggccagaatagaaggcagaaaggctcggcgtttttataaaggtcagggactgatttgggggagttggaactgctagcctctttggg

SEQ ID NO: 82541 - DNA, 1926 bp, Oryza sativa
  Clone ID: PAT_MRT4530_81961C.1
atggatcatcatccaattccagcagatgagaatgagatgactagtactagtccccagatgcagatgaggagaaacaagctctcctcccacttccaaggagatatcgatgatgatggtggtgttggtgttgtggacatccgggggtcgccgatggggtcggcggagctggcgcgcaccggcgggtgggtggcggcggtcttcatcttcgggaacgagatggcggagaggatggcctactacggcctgtccctcaacatggtcatcttcatgttcaacgtcatgcaccgccccttcgccgcctccgccaacgccgtgaacaacttcctcggcatctcccaggcctcctccctcctcggcggcttcctcgccgacgcctacctcgggcgctactggaccatcgccgccttcaccaccctctatctcctgggcctcgtggccctcaccctctgcgccaccatgcccgccctccaggccccgggccaggacgagtgcgacggcttcgccaagctgctgggcaagtgccagcagccgcacccctggcagatggcctacctctacgccgcgctctacaccaccgccttgggcgccgccgggatccgcccctgcgtctcctccttcggggcggaccagttcgaggagcggagcccggtgctggaccgcttcttcaacctcttctacctggccgtcaccgtgggcgccatcgcggccttcacgctgctggtgtacgtgcagaggaaccacgggtgggcggcggcgttcggggcgctggcgctggccatggccgcatccaacgcgctcttcttcatggggacgccgctgtaccgccaccgcgtgccggggggaagcccgctgacgagggtggcgcaggtgctagtggcggcctacaggaagcgtcacatcaagcacaccacggaactgttgtacgaggtgggcggggccaagtcggcggtgcgcgggagcggcaagatcgagcacacggaggagctgaggtggctggacaaggcggcggtgagggtggagggccaagaagaaatcaataacccatggcgtctttgcactgtgacccaggtggaggaggtgaagatcctggtgcggctggcgccggtgtcggcgtgcacggtgatgctgagcgtggtgctgacggagttcctgacgctgtcggtgcagcaggcgtacaccctcaacaccaggggcctccccgtggcgtgcatgcccgtcttcccctgcctcgccatcctcctcctcctcgccctctactacagggccttcgccccgctcgcccgccgcctcaccggccacccgcacggcgcctcccagctgcagcgcctcggcctcggcctcctcctctccaccctctccgtcgcttgggctggcctcttcgagcgctaccgccgcgcctacgccatccgccatggcttcctcccgctcttcctcactcccatgccgggcctcagcgcctactggctcctcatccagtactgcctcatcggtctcgccgaggtcttctgcctcgtcgccctcctcgagttcctctaccaggaggcccccgacgccatgcgcagcctcgcctccgcctacgccgccctcgccggcggccttggctgcttcttagccaccgccatcaacaccgccgtcgactccatcaccggcgacatcgacgccggacgcccctcctggctcgcgcagaacatcaacgtcggcaagttcgactacttctactggctcctcgccgtgctcagcaccatcaacctcatcgtcttcatctacttcgccaaagcctacaagtacaggatcaagccccccaccaccccacataactagttcatagtatttctacaccactacagtctagtactagtagtatctgctaagtgacattatattgatcaatcaaacaaattaagggcatccaatatcttctttttt

SEQ ID NO: 82542 - DNA, 224 bp, Oryza sativa
  Clone ID: PAT_MRT4530_81962C.1
atggtgggcgagcccctccacctccacccctcgcgcatctgcaagcagagccgtgcgtggccgtctccggaggtggagcgcagagatgcgcgccgcccctcttcggcgtctccggcggcaaacacgcatcgcatcgagggcttgcgcatgcgcagggtgggatggggcctgggggagataacacgtggagatggagacagcagagaggggcttgggccctgctt

SEQ ID NO: 82543 - DNA, 1332 bp, Oryza sativa
  Clone ID: PAT_MRT4530_81963C.1
atggcgagcccgcgaaccaagaaaaggaagacgggcgatgagcggtcggcggcgtgtggcgtcacggtcacgctgcccgaccacgtcgtgacggaggtgctcgtgcgcctgccggcgaggtctctcgcgaggctccgctgcacctgccgctcctggaacgccgaggtgtcgttgcccggcttccaagacagacaccacgctctcgccgccgccaagttaaccttcctggagcctgcacctacgcacatggggtcgtaccgaataagaagaaggctcagtaggcggactttgccgtggctcagcaattgcttcgactgtccgagagtgatcggctccaagccctgctggggcctcgtcctcattgccaggccgtgcgaaggctactccgtgtgcaaccctaccacaggtgagattctgcatcttccccggtcgcaccgacctcactgtgccactgtcatgggcttccacgcgccggccagagagttcaaggtggtgcagttaggcatagacgaagaggtagtgggcaaactgcacgccattgtgctcaccgttggcgacgcccgaggctggagggccatctcgtcgttccagctcggcctcggtttcaccgacgacgccgccagcatcgaccgcgatgtgcagccggtgttcgcggatgggtgcctccactggagtttcaggacaaactacctcgacaagccccacggcgtcctctctttctcgctcgccgacgagtccttccgccgtgttccccagccgcctttctcaatggtcgacctcgttccggtccacttgaacggagtcagaaactaccgtctgttgcgagccaaaggcataaggtccgggagcggcgaggaagtggccatgccggttgggaaaacgctcgcggagctcgacggccgcctgtgcatggtacgcgacgtccgccaccgcagcgaccacgacgtgctgttggagatatggaagctgcaggactacgacaccgggagctggtcgctggactaccgcgtcgacctgccagcgccgggccagcgccagcgccagctgctcacggcaccgtggctcgtcgtcccgctcacctaccttggtggctccccgccgggagacaagaagaggaagcttcttgtcgcgaccacggcgcacgaggctcatgtctacgacccggactccggcactctccggacggtggcctccattgacagctcgggggacggggacgacgattcaatacgtctcttgctgtaccaggagagccttgttcggcttcctggcatgcagcatggcctaggaaatattaagtttgtacaactttccaatagtgagcatatgtaa

SEQ ID NO: 82544 - DNA, 835 bp, Oryza sativa
  Clone ID: PAT_MRT4530_81964C.1
tccagatactgcaagtcaagtggcagatgttgaaactgatgaagatgaagtgatgtactttgatacaagagacttcttgtctgcagagtctcttcgaagtgcttcatgtcgaaggagagaacttttgacaaatggttgcaatggattagaacatacagaccctgctgcaaatgtcagtcaaaactactcagtatccctctgttaaacgtcgagataagttacctgagccaaaagaaaaagaaaacccagtagggttgtggtcaataattaaagaaaatattggaaaagatctctcgggtgtttgtctgcctgtttatttcaatgagccactgtcttctttgcaaaaatgttttgaagatctcgagtactcttacttggttgaccatgcactacagtggggaaaacagggcgatagcttgatgaggacacttcatgttgcggcatttgcagtatcaggctatgcttcaactgaaggtcggcaatgcaaaccgttcaatcctttactgggtgaaacatatgaagctgattatccagataaaggacttcgatttttctctgaaaaggtcagtcatcacccaatggttgttgcatgtcactgtgaaggaagaggttggaagttttggggggattcaaatctgaaagggaagttctggggtcgatcaattcaacttgatcctattggttttctaactctccagtttgatgatggggaaacgtttcaatggagtaaagtaactacttttatatacaatatcataataggcaaaatttaaaaaaaacactattactcaatgcgcatctactgcttatgtgactccaagttttacccccccct

SEQ ID NO: 82545 - DNA, 517 bp, Oryza sativa
  Clone ID: PAT_MRT4530_81965C.1
atcttctcaatggcattcatgtattttcagaagttttcaaactacacaaaatgcaaaatccaaagagagtgtagcttaactcaggagaggaaaatttctactctatgatagaatcttatcagccatttatgctagtctaatcaatagttcattactgaggctaactagttgtaagttgtaacttgcaaacactggttttgtgcacacaattaattgtcatgattaaactctaatgagtgatcttgtgacttgtgagcatgcccattctactgtctgatgtgaatccctatcaaaggagcatggcccatcaccatgagatttttttcagcactttgacaaggatagccatagaccagtacaagtgtacaactgaaatgtaagaacaagtagtacttgtctgtaagagattttttcacaatgattgacagcgattcacttgtaatatttatcctatcctttgttcactcaccctcattgtgtccatgaatctacaccaactaccatggattacgctgtc

SEQ ID NO: 82546 - DNA, 200 bp, Oryza sativa
  Clone ID: PAT_MRT4530_81966C.1
ctcgcctccatccccatcgtccgatccgatcccgcgggatgagcgggcaccacggggctaagccctaccagccccgccgcgggccgggtcccgccgacgaggagggcgcccccgccgctgcggcggactaggcggaggcggaggcggaggtggaggctatggaacggcactagcaggagcaggagtactaggagggggag

SEQ ID NO: 82547 - DNA, 369 bp, Oryza sativa
  Clone ID: PAT_MRT4530_81967C.1
atgtggagcaccgagttggtggccggcgatgggcgtggcgggggcgcggtgggtgtggtggagaggcaagcggctggcggccagaaagccactgcgggcgacatcgccctcgcgcaccactgggagcggcagcacggtcgtcgcctccaccacctcgtcgtacatcagtcacaccacgggcatggtggggcgcgaggcagcgttgtcgtccacctccttgcgcggttgagctccagctccacgtgtgccctcgcggactccgtctcgaccacctccagcgcgcgctctagctctgccacatcgcccagccacgcccacctcacatcgcccagccgcgcccgctgccgctcacccagcaagcaccggtag

SEQ ID NO: 82548 - DNA, 301 bp, Oryza sativa
  unsure (1)..(301): unsure at all n locations
  Clone ID: PAT_MRT4530_81968C.1
ccgcccttnntttttcnnttttattattttttatttttttttctataaaatagtgagaagacgaacgttttttttctattttatactcacaccacaagtcttcacacgtgtcacatattgatgatactctgaagctttatttttaactctccgaacacactatatctgttataaactcattacacagacactcgccataggtgtggtaattggtactcgggtgcacacatagtacactagggtatgataccattatctagatgcgcacgttaataagcacaacaaaatcttgtagcttgag

SEQ ID NO: 82549 - DNA, 206 bp, Oryza sativa
  Clone ID: PAT_MRT4530_81969C.1
ccgcactctcccgagccatctatcgccgccgcaccgtttctccctagcgccgccgccaaccgccgcctccagccgccgctaatcgccgctagggctgccgccgtaccgcgccactaccgccgtcgggttcgcacggccgaggtccacctcgtccacctcccctccgtcgagttccgccgccggagcacgcttctccccacgcgccg

SEQ ID NO: 82550 - DNA, 533 bp, Oryza sativa
  Clone ID: PAT_MRT4530_8196C.1
cgtacacgttcgtggagcacttcacgaggtactacggcgacggagaagaagagaagcagttgaaggaggcggcgcatcgggtcgccgacgggacgctgctgacgtacgggttccaccgctacctgccgtccatggtggcggcgtcgtcgatcttcctggcgaggctgcacgagctggggcatgagccgtggagcaatgatctcgcggagctgacagcttttagtactctgatctctctacaattatggcccaaccgtggattcgtggagcacttcacccggtataacagccggggagaggaagagctacgggtgcagcggctggagcgcgacatcgccgaccagtcactgatgaactacggctgcccgcgggctacctgccgtccatggaggcggcggccggcggcgtcgatcttcatcgcgaggtgttcgctgaaccggcccgaccggtctggactctggagcacggagctgcaggagctgacgggtacagctccgaggacctcgttaactgcatcgatcctcgccatgtag

SEQ ID NO: 82551 - DNA, 198 bp, Oryza sativa
  Clone ID: PAT_MRT4530_81970C.1
atggcaattcgcaaaaagcaagtgaccaccagtgctcccgacggcgtggtgagtggcgagggcacggcggcgaggggtgacggcaaccagcctccacccggatccggcggcggcggccgtctcctgctcggatctggcggcggtggccgtccccgcccagatctggcggcggttggcaggctcgacggcggcagctag

SEQ ID NO: 82552 - DNA, 146 bp, Oryza sativa
  Clone ID: PAT_MRT4530_81971C.1
gtagcaaaatggcccacttggagcttccgattccgtggcgcagtgtaaagaagcctgcctgcctctaccctgtatcatgtgtgcgtgataagtgggaggcagaaaaataacgaagcttggccatttgggttggagcttgaacaaca

SEQ ID NO: 82553 - DNA, 217 bp, Oryza sativa
  Clone ID: PAT_MRT4530_81972C.1
ccgccggcaccaagtgtcgcatcacgggcactgacccaccacgtgtcgcaggcggctgtccacggtggagagtgcgcccggcggcgagcaacgtggcgagcgggcacaacccccccatgttaataaggtgagacccaaccaactgggtgtgcgtgtcatacacgatgttggttcgttgctggtggctttttttcaactggaatattaatttggttac

SEQ ID NO: 82554 - DNA, 1153 bp, Oryza sativa
  Clone ID: PAT_MRT4530_81973C.1
gcacgaggcacaccttcaataacttgcaaggataactcaaactacttgaatcagatcagacaaaaacatcataagaatatcacgatgtgtggaggagcactgatcccgaacgactatggcgacaagccgccgccgccgccgtcggagtcgtcggagtgggacgccacaacgaagatgaagaagaagaagaagcgtggtggcggcggcgacgacgactgggaggccgccttccgggagttcatcgctggcgacgacgacgacgacgacggcggcgtttccatgttcccttctggtgcagggacgatggagacgaccacagaggtggcgccggcggcggcggtggtggagaggccgcggcggcggcgaagggtgaggcggagctacccgtaccgcggcgtccggcagcggccgtgggggcggtgggcgtcggagatccgcgaccccgtcaagggcgcccgcgtctggctcggcaccttcgacaccgccgtcgaggccgcgcgcgcctacgacgccgaggcgcgccgcatccacggccacaaggcaaggaccaacttcccgcccgacgagcctccgctgccggcgccatcgcaggcgccgttctgcttcctgctcgacgacgacgacgacgacgacggcgtggcccgtggaaacagcccggcgtcgtcgtcggcgccggacagagcctccgcttgcacgacgtcgtcgacggtggcgtccggcgagcgaggcgatgagctcatactgctggagtgctgctccgacgacgtgatggacagcctcctcgccggcttcgacgtgtccagcgaaccacgcagtgttttgggaatggttaattagcagcgcgcacgcctgattagatcggtacatgtgaagtacaagagaagtagttactactagctaggagcaaattaacttggagtgcaagaataaaatatgcatgtctctgcactactactgtagtgttagcaagtttgctcattgttctgttgtatcctttcatgtccatttcagacttcccaatgctacataaggatgtacatatgtatgatgttgtgtgccttgttaatcaatgaatgtaaatatctttatattgcttttgtacaacaaaaatggttatgttgagactatctatacggaataatgtatcatatat

SEQ ID NO: 82555 - DNA, 351 bp, Oryza sativa
  Clone ID: PAT_MRT4530_81974C.1
agaggggagacgaggaacacccaacacaatcgacatagaagacacaacataaaagcctacatacgccaagacacgctgccggatatcgacttcagggataagcacgactggtaccctacggtgtctccggatactgtcaggagagacgaaagcgctatctctgatctcgccgggcacggattcgaggaggaaagctaccctgttgtcgactacgagtcagatcatcagaccgccaggtcgacaacagttagataggctaccccaaatattgtactggtgtgattatcataaataagagcaataccggcttcggccaacaggatacaaaaccaggctacttccagttcagaa

SEQ ID NO: 82556 - DNA, 349 bp, Oryza sativa
  unsure (1)..(349): unsure at all n locations
  Clone ID: PAT_MRT4530_81975C.1
gtgccagggccgttggggcgacccgctccacccttactgcgtcgcccccaccctcggggcgcagcacgggggcacgtggcgcaccctccccgttgtgcccctcgccgccgccaacccggcctccgcttccgcctccgccggngacgtgtgttacgtggagctcgcgcacctcaactacagggaagggtacttcgtgcggtgcccggcgttcaactgcagccaccacccgcacgtctcctgcacagagttccccccgtccgccgtggccgccgccgtctgggagcaccggaggacgacgtaccgcgacaccgtcgggccgctcttcgggaggtacacctacgacgcctag

SEQ ID NO: 82557 - DNA, 498 bp, Oryza sativa
  Clone ID: PAT_MRT4530_81976C.1
gggtgtgaggtcaaatgcttttaatttacaaaatgtttagatgttattagttgctacagtgtgtagcacgtgtaaatgaatgtaattgttttatttatgcacagttacttggtatgtattttatatgatagtcaatgtcagtgataatctgtagaatatatgttttggagactcttcactaagtaatatttatgttgaaggtttacattttctttggttactcattagagaatgtagtgaatgttctgtcatttgatttacagaaagaaattttaaaagaaatgcaaaggtgatttcaatatcttagcttggtctcatctccacagctcggggatccagcaaaactcattctgaacagcttattagttctaactatatcgcatgcataataaaactgctcatttgctcattaatattaaaattatcatattcagagccatgggcattaagatcaatcaaatccttggatttcaggtcagatgctagatctgcttatgc

SEQ ID NO: 82558 - DNA, 674 bp, Oryza sativa
  Clone ID: PAT_MRT4530_81977C.1
tccacgcgtccgcacccatcacttgtccttcagacagcgagagcgatagcgctagagagagagagagaaggggggaggatttggagcgcagattgaggagaagcgatggcggattgggggccggtggtgatcgcgacggtgctgttcgtgctgctcacgccggggctgctgttccagctgccggcgcacggccggatcgtgggcttcggcaccatgcacaccagcggcgtcgccgtcctcgtccacgccgtcatctacttcgccctcatcaccatcttcctcatcgccatcggcgtccacatctacgccggctagctagtctacccaagcccctcctgatttcctgcagctttaattaattatctgccttttccctactctctatgtgcttaattaatttattactgcctctacctgctactctatgctagtagaaccgttgttgctgtgtccttagaaaacatgctatgtttggtataactagtgtgttgtattcggttggtggattggttgattctctgccatggtttatcggttcaaaaaaaaaaaaaaaaaaaaaaaaaacagccgctttagagatccaagcttacgtacgcgtgcatcgacgtatagctaagtcaagtaggtaccaagtcagtcgtcagcaaaagtgcaccccccaaaaaaaaaaaaaa

SEQ ID NO: 82559 - DNA, 312 bp, Oryza sativa
  Clone ID: PAT_MRT4530_81978C.1
atgggctggttttttgctttctattttggctcctattttgatgtttcattcaaagctagatctgataatttttcatctaagaggaaaagaactgaatcaacagttgttgatttcaaaaataagttggattcatctttacttgaaatatatagagataatgttttgattggtatgaaaagaaaactctactgtcataaaacaaagaaaaattcaatgaagaaggatacaacatatgatactaagctcactagactttctgtgaagtatttttctcaagtgctagatgaatgtctgctcatcacaaacagataa

SEQ ID NO: 82560 - DNA, 522 bp, Oryza sativa
  Clone ID: PAT_MRT4530_81979C.1
atggcgctgcgcccgtgccaccgtggcactatggctgtcgtggcgatgctgactgggcagaaggggagcgccagccaccctggcgccgccccgcatatgacggcgccagcatggctgccgcgcccctcctctgtgggccgcgaccttaaaccccacgacaacgaggcaaggagcgagacggcgacggacacggcccacgtccccggcgcgatggtgcctgccgcgttggccatcaccggcatgggagcaggggcaaggctgccctgctcgacagcctcctcctccatcaccctcacggccgcccgcctcttcctatcccacgtcaccctgcctcccatcgccgctgctgtgtggccgccgacggcgacggggaaggccgccgacgacgacggagaaggccaccatggccggacaaacaccagtgagatgaaactagaggaagcgtcgaaggataagcgggctgggatgggggcatggggcaccggcagagcaacaggggacgcgatgaacaaggccgcctag

SEQ ID NO: 82561 - DNA, 699 bp, Oryza sativa
  Clone ID: PAT_MRT4530_8197C.1
atgaagttttcggcgatcatcgtagccgccattataggagttctctgttcctgtgcagtgtgtgagcctgacgcagcgcttgtaggagatgaattcatcatctgccaggacaatggacaatggagcgattacccatattgccatggacctccatcatgccccgacccaaacaaaccgttcggaatgctagccttggttcttgataccaactctggaatcaaacgtggtgatctctacaccgaacgcacagtgttcaactatacctgccaaacaggatatcatccaaccggggacgtcacaatcacgtgtcagaatggcacatgggaagcggatgcggatgtcccagaatgcaacacttgcgagaaatacgaacgtcatgggataacttttagacgtttaggttatgaaaatgaccttacagatgatggcccgaattcacaaagcaaggtttgtaaaaaaacgcgtaaaacgcgtcatatgacgtacgaaaaccaagtgatcacctgtgccccacccaccctggagcccataaagaatggttcacataacattgagaacaggacctaccatgttggagaagggacctacgcccttaagccatacattacagtaatgaggattaatgccccacaaaagggcactaatatagcacatcgacacggttttgatcctggggcctcacagttccgaggccattga

SEQ ID NO: 82562 - DNA, 448 bp, Oryza sativa
  Clone ID: PAT_MRT4530_81980C.1
tttttggatcgtgccaaacaccaccagcgtgggaggggctgttattggggcgatcaacagggaggacccgtgcaactggcgggcggcggtggtcggaatgttctgcagctcatttcaacgaggtgaagctcatggtggcgctcgttcgccagactgtgatctggatcacagggtgccacccgttggtgtaggacatgtggccatctgtgcccaggctaaggacgccttcggtgtggccgttgagcttgacaaggaggcccgcccacgcgtaaaggccatgggagagtggcttctcaactgcatggaccagggcggcgtcatctactgcgccaccaccgtctcttgttgactcttcaggggcgtaccataggacggagctcgactccaagtcgagctctttaggcatcttaacggcgaatcttcggcactggctcccatggccagacgc

SEQ ID NO: 82563 - DNA, 148 bp, Oryza sativa
  Clone ID: PAT_MRT4530_81981C.1
caactattgcaattgacttagctcaaagagcatataaatatgtacaagagaagttagaaatgtctataatacccttaattactcttaacacctcccactcaaatgtcaatgttgtaatgcaattaacatttgcattttggaaaggtta

SEQ ID NO: 82564 - DNA, 561 bp, Oryza sativa
  Clone ID: PAT_MRT4530_81982C.1
atgatgagcaatgtaaaggatcagcttatgaattcttttcaagaaacccgcagaggcacaatcgtccagaagtacaagctgaaggtagttgcagccgatgaggttggctcaagctcttctccaggcaatgcaggtactgcagctggctcaggcgacaaaggtaatgtctctcaagatggtgcagttgaagatcttggtgaaaatggcaaccaagagcaattacagtttaataactttcaagatcggatcgactacgccgtccaacatgctctgatcaaccaatccggtgtgctagttaacactttgacaaacatggtgaagactgtggtcgatggtacgatagctgagcatcaaactacagggccagtttatttaccaggaggtgtttttccgaacttttggccttcagtcacaggaaatcaacagggtgttactagtgtaccaccaatccagccgatggcatcagtttcaactactgcaccaactgcatcatcatcggcaccaagacagatggtcaatgctgaaagtgcattaatcctcctagtgagttttggtgattaa

SEQ ID NO: 82565 - DNA, 409 bp, Oryza sativa
  Clone ID: PAT_MRT4530_81983C.1
aatggaaaaccatatagtatatcccttttgattggggagggggggagcaaaaattttgggtttttattaaccaaccaacccatgggtatacaaaaaggggggggggattaatttattacacaaaattccacacgggatatatataattcccggccacagggaaccccaaaatttttccgggaaacccaacggagggggggtttactaacgaccctgattcacctaaaaaatttttggaaggaccctttttagggcaaaataataaagggcaatcggggaagggtaagcattacctatttggacggattgaaaccgcttttcctggccggggtgccgacccatttccgtgaaaaacgcaaacatgctagaaaggtttatttggccgtttccgaaacaatacgttgccacc

SEQ ID NO: 82566 - DNA, 2227 bp, Oryza sativa
  Clone ID: PAT_MRT4530_81984C.1
gaacattccttttattctctctagtttttgtacacataggacatgtttcaacagaactctatagaacaaggcacaagtgaattcaatggcatcactatatacatgtggagttctgtgtattattttacaaattacaataatatagtcatccaattgccttgattaactaggtggaacttggcccttactctgtcatattcatccaccacacgcaatcaggatattttcgaaatagtgccatggttaactagatgatgttggagaccagggaccatgagatggcaactgcaaaatggaggtgccgcctggtatgtgtttactgcttaatataattttgaaccactgactctcaggattgcaattcggatctacggttaggcacttgcactgatttgtcgtgatatttccatcaggactggcctccaagcatactctggttccgttattggtgagttcagttgaaacatgcattcctgaatttgatagtagcttccactttgaactggatttgctgcaactggtgccaagctttgcattctcaccaacagacttcgcctggaggcattgtccagtttgtttgagtattaactcgtatcctttggtataattccaagcatttgatttatcacatggacccaactcaagtgcctctgaagatttcaccaagacacaaagcccagatagaggatggaatataacattgtaaggctgttgactgtttggaagcccgggaccttggaatggtgattgcagagcattaatccttttaataaagctggggtttctagctgtacaccaatcccaggatagcaatccataagattcatcataagctagagtaccctccctgatataataactcccttgcagagcccaaatagcccagtccagatccatttcagctgccacggttaagaagcaggtaagatagcgattgtcagcgacatgtgtcccagacatgtcaaacccaaactcggagaaaaacagtggccagccttgctgaagtaggaacagtccttttttctttatggaatcaacaaccatcccacaagcatcgttttggttctgagatccccagtttccatcatctgagaaaccataccagtgctgctcaaagactaactttccagtaaatgttagctgaatttgatttgggaccaagaaatccagagtattgtcgaagttcaggcctgacaaaataacaagaacgccagggtttgccgcatgcacaacttcagcacccagttgcatgtacctgaaccacaaactaacatttttggagcctcggagctcgtttcttaaactcatgcccacaacattttttgtgttcctaaacattgttgccattgcactaaggcctttcaaccattcttctgggccaaagtacttgtcaccaaaaaagccattaccgtcgttttcgctgcagcaccatcctggagttgtcatttggttatcaagtataaccattatattgttcttggccaaagctgacaccacttccattggtttttcctggaacacatcgatgaggggcaggtcgaggagtccggggttgttgacccggacgccggccacggactccggcataccaaggcgttccagcgacgctctcagcggcaggttcgccagcgtggcgttggtggcgaggtaggtcggccaggtgagcctgacgcagtttaaccccatcgccgccacgcgcgccgcgatgtccccaaggccgcggcgcgacaggccctccgccgccacgggctccaggtgcgacgcccagttcgcgcacgccagcttcacgcgccgcccgtccgcgcccaccacccaccgcgacgccgtcgagagcggcagcggcgggagcgacgcggtggcggtggcggcggcgagcgggagcagcagtagcagcaggagaagtggagaggaagaagccatggtaacaagtgtggccaacggtggcggatctgaggggggtttaaaaggaagagatgtgcctatgacagatggggccggggaaatgcatccctccctcgtcggcgctggtcactcggagccggaggacgccctccacctgcgcggcgtccaggcttacaccaccatcaagcatgggctcatgtttgatcgtttgctggctgtggggatgtcacggcatcacttggtgcagttcgacgccatggaggacaacggcgccgaggttgttcgatggaatacagactaccgtgctgttgctgaacccaaatga

SEQ ID NO: 82567 - DNA, 557 bp, Oryza sativa
  Clone ID: PAT_MRT4530_81985C.1
cgggctgcaggaatcgacgaggcaccgattcattccgaaaccttctccaccgtctccggcgagccctccaccgccgccggcgccgcgagatggaggcgaagatctcgtcgctgtgcaccgccctctcgtccgtgctcaaccacgccgacgactcctcccgcgcgctctccgacgcactctcccgccgccccatccatctcgagtcggcggcgagggggttcctgcaggggctggaacggcggtcggaggcggcgggcgccgacctgtcgcggctcgagtcgatggcgttcggcaccgtctccttcgaggagctcctcggccactgcggcgaggcgctctccatgttctcccgccacgccgacgccatcgagtcccgcctcgtcgccttcggctacgtgccacccgaggaggaggtgagcgaggatgtgcaggaagattgggatgatgagaagcttcccggggtcgctgggaatgggtgctttggtggaacgagttcagtgctgaggtctagtagagagatggtggatgatgatgatgcattatttgagaactccatg

SEQ ID NO: 82568 - DNA, 1043 bp, Oryza sativa
  Clone ID: PAT_MRT4530_81986C.1
ggggcccccctcgagtttttttttttttttttttttttttttttttttttttttttttagctcagttcctgtattctagtaaaaaaatgagttcttggacagaaacaagatgtctcaacttgtctaatcatctaacttagtctagaatgttaacaagatgtctcaactttgtaggagtaatgctattctaccccgagctccaactcaaaaacttttggagctagagatacccagctctgatggaacttgaagtcagaactgtgctaagacgtagtcaaggattgcaaagtatgacatttaaacttcaagcatcaaggattgcaaaggtcaaacagttacaacttcgggcgcaaggacgacgagaaattgggttgggacttgatgaagtccagtacaaatgctttcagctctttctcatggcctgtgtagcgatgattggcttctgcgattatgtgcagctcatggttggggatatttgccgcgaacatcagggcgtcttccaccggaacaatttcatccttggagccatggattgtgaggaccctgcagcatttgcttatggaacggcttgaaagaagggtatctgtgctcagccgatctttcagactttcctctgtcacctggtactcaaactccccttttctgttcctgacatctatgtatccatctttctttattctctgcatgaaatttttccccaggcgcccatcaataccacgctctaacgcaaagcgtccagaaatgttgacaatgacaggaatatcatggttcatggaagcatacaaaagcacggcatttcctcctttgctgtgcccaacaagaccaattatattatattcctgttctgtgaagtatgatacaacagagtgcaagtcatctgcctctcttcggtagtttccatactggaactgaccctcactttccccatttccagcaaaatcaaaccgaaaagcactaacaccttcccttgttagtgcataagcaaggtcaaccaagatgctatcatcatgcttgatgcagtagaccaacaagattttccccat

SEQ ID NO: 82569 - DNA, 240 bp, Oryza sativa
  Clone ID: PAT_MRT4530_81987C.1
atgtcggccttctccaagccgaatgcgccaggcatgcaccgcatcaggccggtcagcggggtgaggcaggagaggaggaggacggcgccgccacggcggccggtggtggcggcagcccggcggagcttcgcgacgcgaccgtgcgagggccgcgacgctagtgggaccgtgcgagggcccttggagttgggcggcggcggaggcacggggaggaggagacgggtagcggccagcggttga

SEQ ID NO: 82570 - DNA, 432 bp, Oryza sativa
  Clone ID: PAT_MRT4530_81988C.1
cttcatctttacatggaactgattccctcctatctattgtccagatgccgaaaggtattcctgttgctactgttgcaattggaaatgcggaaaatgcaggtttattggcagttaggatgctggcctcaagagatcctgagttgggggacaaggcaactgaataccagcatgatctgagggatatggtgttggagaaagcaaaaaggctcgaggaactaggttgggaggaatataccgagctatacttgaagaagcattgatctctgctgcccgtttaattgacattctttttgatccagtgttgacataagcagatatggtccatggttgtggcaaattcttaaaatccttttcattcttttctgcatagtgtcttttttctcgctaatttataaatttcttcgctcattgaaatttggttttctttaatgg

SEQ ID NO: 82571 - DNA, 3148 bp, Oryza sativa
  Clone ID: PAT_MRT4530_81989C.1
tcagattgcgtacgtcggcgtggatgatgagcccgtgacatgatcgacgaggaacggagcgagcatgttctcctcatcctccctctctttctttctcttcggcgagcggcggctgagggacaggggccggcggcggcgggagggcaggcgggcgagggtggcggcggctcgtggcagtgggaggacgaggggaacgacggcggcgggagggtgggccggctcccgccgccgctggaccctggcggcgcggtcgaggcaggaggtgcgggagatggtggccgcgctggagagccacggcgccgagcagctgaagcagctgtaggttcccgggctggccaccgccatggagcaggcgcagcggctgttggagatgttcgccgccgacgaggaggaggtgaccaggaagaagctgaagcgcgcgagcgactcgccgccgggaggcgcggatgaacagcacacgaagcagagcaaggtggtcggggttgatggcgtcgtcaaggcttcttgacgcattgtcccctgcttctgatctctattctcactgatcaatgtgttattactagttgtcatcaactgtaaacctctgattttgtcatcaattgtaaatctcttttgtaaacctctgatcaatgtgttgtcaaatttgtaaaccaccgacagcgtcatcgtggccatgtcgaacttgacgatgctggtgttgttgtcgcagaggaagtagagcgcgttctccacgaggacgcttggccttcttgcctggatgaagtcgtcggggtggtgatcaatggaggccgggctgctccatgcctcggtctccgacgagtaaagggcggcgtgcgtggttcccgcggcgtcgatgtccaccagcgccacgcggaaggggttgccgccgtggcagtcgagatggttgcagccgtccacggcgcagagcaccgtcgcgctccacggcgtgaacatccagtgcccaccggggagcatgcactccaggctcctcagcgccccctcccacgcctccgccgcctcctcctcccccctccccttcgccgccgcccacccttgccgcgcctcctggacgccgcggcccacctccccgctgccgcctctatcgctgctgcgcgccaccgcctccatgcatccttctcctcctcccgaggggcatagcgaccagcctgtgcatggcgtcaccaacacggtcgtcggcgtgctggggggaggccagctggggaagatgctgtgccaggcggccagccagatgggggtcaggatggccatacttgatcccctcgaggactgcccggcgagctcggtttgccacgagcatgtcgtcgggagcttcaatgatggcgccacggttagcgagttcgcaaagaggtgcggggttttgacggtggaaattgagcatgtcgacgctgtaacactcgagaagcttgagaaacagggcatcgattgtgagcccaaagcctccaccatcatgattattcaagacaagtacaggcagaaaactcatttctcaaaatttggaattccgttacctgactttgtggaagtagatactttaagtagcatagagaaagctggggaaatgtttggttatcctctaatggtcaaaagcaagagattagcatatgatggccgtggaaatgctgttgctcacgacaaaaaagagctatcttctgttgttgcttctcttggtgggtttgagcatggcttgtatgttgagaggtggacatcttttgtaaaggagctttctgtcattgtggcaaggagcagagacggttctacggtgtgctatcctgttgttgaaaccatccacaaggataacatctgccatgttgttgaggctcctgccgaggtgcctgataaaataaagaagttggctactaatgtagctgaaaaggctatcaaatcattggaaggtgctggtgttttcgctgtagaattatttttaacacaagataatcaggttttattgaatgaagtagctccaaggcctcacaacagtgggcatcacacaattgagtcatgttatacctcgcaatatgagcaacatttacgtgctattcttggccttcctcttggtgatccttcaatgaaagcgcctgcatcaataatgtacaacatcctgggtgaggatgagggtgaggcaggatttactcaagctcatcagttgattgagagagctttggacatttcaggtgcatctgtccattggtatgcaaaaccagaaatacggaagcagagaaagatgggccatattacaattgtggggccttcaaagtacagtgtaaaagcacgcttagataagttgctgcaaagagacgcatatgaccccaagaaagttaaacctcgtgctgcaataataatgggttctgattctgatcttcctgtcatgaaagatgctgcagtagtattgaagaaattcaacataccttttgagcttacaattgtttcggctcatcgtacaccagagaggatgtaccattatgcattatctactaaagaaagaggcttagaggtcataattgcagggatggtggcttcattgacttctgtcccagtaataggagtacccatcatgacttcatctttacatggaactgattccctcctatctattgtccagatgccgaaaggtattcctgttgctactgttgcaattggaaatgcggaaaatgcaggtttattggcagttaggatgctggcctcaagagatcctgagttgggggacaagtatgatttcttcttttctgcaattgtcctgcaaattttgaagtttgacacctcccagcaggcaactgaataccagcatgatctgagggatatggtgttggagaaagcaaaaaggctcgaggaactaggttgggaggaatataccgagctatacttgaagaagcattgatctctgctgcccgtttaattgacattctttttgatccagtgttgacataagcagatatggtccatgtggaggcctggagagggcgtgccgacttacgaagtgaaagatgtcgacgaaacacggcgcatgagcatctcagtagcagaaagctttgcttgtataactgtaacaacatgcctgcctgaaatgttcatgtggatcttatgatgatatttcagggaaaaaaaatcaaccaattttaacgagttctgg

SEQ ID NO: 82572 - DNA, 814 bp, Oryza sativa
  Clone ID: PAT_MRT4530_8198C.1
gtgtatgtccagggttgtggagttacatgtaatgtacctgcattatgaaccacaccgttttgcggtattcaacttttatgttcttattttcactatagagtacgactgtcccgcattggggaatcccatacacggctctaaagtcagctctccgcagtacagagtaaacaccaaggtcaattttcgatgcaaccatggttatgagatggttggttccgaagagaggatatgtacgttttctggagagtggacaggagagatgccaagatgcatgggtcgtgatgagttcgacgaactttctcgagtgataaatgggctagggaagaccttcgacgaaatcgtcatcgacggcggctcttgggtgggtcaaaatgacacgagctcgaactcaggtgtgcgaagaaaacgtacaattaatctctcttctggaatggatatctattttgcgtttgatgcgtcgaggagtgttggaattgaaaacttcaagataggcaagaaatttgccaagcttctagtgcgaaagcttcaagtgacttcctcgcctggtggaacgcgtgtcggggcagtctcctactcgtctcaagcaagcagattgttcaatgtcaacgattattcgtcttcagaagctgtagttaatgccatcgaaaggcatgtcaattacaaaaataaaggaacgaatttgcccgctgctctcaatgaaatcaaggaaatgattaccggcgaaaccctggaaccatatgggaacagtagcaggaaacgaattatatttatcataacagacggtttgcacggttttgaccttcagcaagattag

SEQ ID NO: 82573 - DNA, 670 bp, Oryza sativa
  Clone ID: PAT_MRT4530_81990C.1
aaaatgagtggccaccatatattgggcagtcattgggcctgacaagaggttaatcgattttgctaaacatcacacgggtgattttttcgttgatatttgacagatttttgcccctacaactatgcgccgagatcagtacacgattctgcgtcgatgttgtcgtgaggtggagatgagacctcgtaggtcccacgtttgccgctgatcacgattcacaagaaatttacatcctagctacgtgtaaatatcctatataactagaataaaatataaaattacagtcctatttaactaaaattgtatacgtaaattcagttgatattaattacaatcctatttaactaaatttacatttgtaaattcagttgatttaacatgtaagtgcactgtaattttaataaaaatattgtgtaagtaaatatgtacttattattttctttaaaatataaaattacagccctatataactaaaattacatatgtaaatatagttgatatgacatgtaagtgcactatattttttattaaaatattgtgtaagtaaatttgcattagttattttatttcaaatataaaattacagtcctatataactaaaattacatatgtaaatttagttgatatgacatggtagtgcactgtaattttgataaaaatgtcgtgtaagtaa

SEQ ID NO: 82574 - DNA, 187 bp, Oryza sativa
  unsure (1)..(187): unsure at all n locations
  Clone ID: PAT_MRT4530_81991C.1
ctttttttttggaaatagagancaattaaaaaataggncatcaggaaatccggacgggcaatgaaaacattttaataagcgcttgttagccgcaggaatttggctaagaagagtaacaggtacgctgcgatatttgataaaggttcaaaacgaagatgacgccagactgatatagtatagcctttgc

SEQ ID NO: 82575 - DNA, 353 bp, Oryza sativa
  Clone ID: PAT_MRT4530_81992C.1
tccttcacaagcttgcaatagaggaccggtggggggccttgttcctccggagccccgtatcacatctcacacgcgtgggagcgaacagtcgaaggtgtagagcagtgcatggctcttcctttcgttgccgatcggaagcagtgcgctgcggcggtagcggaagcaggactagacgtaggagcggatcctgatgggagcggagtgcaagtacgaggaggcgcacgtggcgtacgtcatgctcgagctggacgcgatgaagcaccccggcgtcgacgtgaacgggatcctcgaagggcgtctcctggacggggtcggctccgacgacgacgtcgagtttcatcgacgacgccgag

SEQ ID NO: 82576 - DNA, 1974 bp, Oryza sativa
  Clone ID: PAT_MRT4530_81993C.1
atgcggcgattctgtcacgttccgctctgccggcgagtggccgccgcttcccacggcggccacccccaccagccgccgctcccgccgccggagtggatcgagccgtacaccgacctctcggacccccgcccgtacgccgcctcctccgcctcctcgtcccccaccccgtcgccgtggctcgcccgcgtcgtctccctcatcctccgctcccctcccgccacgctcgccgccgacctccgtgccttctgcgcgaccttcctcctccgcctctccccggccttcgtcgccgccgcgctccgctcgccgcacctcctccccaacccgctcccctcgctccacttctaccgctccctccccagcgccgtcgccgccgacctcctctcccacccgcaccatctcgtgagctgctacgtctcgctgctccgctccttcgcccactcctcctcctcctcctccagggaggccacccccgacgccgccgccgcggcggcgcacgcgcggcagctcgtcgccgagctgcgcgcgcacggggacaccgccttgcggcacctcacgccgtcgtcttcggcgtctctgatccgcagcctcgcggctctcggcctcgccgaggagctcctgtgggcgtggaaggccatgcgcctcgcaggcgtcgagccttccaggctgatctacaactgccttctcgacggcctcgttaacgctggccttcttgataccgccgtcaacgtgttcgacgcaatgtccacggaggatcaagtgcgtcctgacgtggtctcctacaacattctcatcaaggggtactgccgcgccgggagggcgcatgatgcgatggcgcggctcagcgagatgcaggaacaggcgaagctcacaccggacaaggtgacgtaccttacactgatgcagtgccattacagtgaaggcacgtttccggtgtgcattggtttgttccaagaaatggaggagaggggaatggggaacgacataccacaacatgcttatgttttggtgattggagcactctgcaaggatgggaagccattcgagggaatggctgtgtttgaaaggatgctgaagcgaggttgcgcagccaatgcagctatatacactgcactcattgactcgatgggtaaatttggaagagagaaggaggcaatggcactctttgagaggatgaaagatagtgggcttaagctcgactcagtcacatatggagtgatcgttaactgcttgtgccgctttggtaaactagatgaggcagttgcatgcttcagaagttgtcaagagaaggggattgcagtgaatgccatcttctatacaagtttgatagatggttttggaaaagctggaatggtcgaccaatcaaaggagctatttgaggagatgattgctaaaggttttgtgcctgattcatactgctacaatgtgctgattgatggattagccaaatcaggaagaatggatgatgcatgtgccttgtataaacggatggaagatgatggctgtgatcaaacagtgtatacttataccattctcattgatggtttgttcaaggaacacaagaatgaagaggcactgaagttttgggacgcgatgatcgacaagggaattactcccacagctgcagctttcaggacccttgccagtgggctctgtctttctggtaaattcagccgggcatgcaggatattggatgaacttgctccaatgggggtgattccagagacggcccatgaggatatgatcaatgtgctgtgtaaggctggcagattcaagcaggcctgcaaattagcagatggcattgtacagaaaggacgtgaaatacctgggagagttcgtacgatgatgatcaatgcacttcgaaaagcaggaaatactgatctggctgtcaaactagtgcacagtaagataggcattggatatgaaagatctggcagcatcaaaagaagagtgaagtttcagaccctgtttcagtga

SEQ ID NO: 82577 - DNA, 267 bp, Oryza sativa
  Clone ID: PAT_MRT4530_81994C.1
atgcggttgcagcccctgcgcatctccatgcgcccagagagaaggccccgccaccaccacagtcgggacgagcagggcctggatctaggcggcatcacctcttcatccttccttgagagagaggggaaagccctgatgccgccatcctcatggtcggccgactttgccgacgtgccactcgagcagcggcaaggtgggaggaggaagaaggagaagcggcggcggggcgaaatgtggccgatcacagtggcggtggagaaaaaatag

SEQ ID NO: 82578 - DNA, 442 bp, Oryza sativa
  Clone ID: PAT_MRT4530_81995C.1
gcagaagagcctgttcttggagccgtctccaccatcatggtcaagtcatacaatcgttcagacatgcatgacagattttggaaatgatttttggtgatgtgttatatggagcatgaatggagaggcaagaaagcaatatgctaatctgtttgtctctcgctttttagtagacggattgtagaaaaaagacaaaagcatatccatcacttccgttggatagttggaacgattcgtatccgtcaaagtttagtcgtaaaaatcagcaggtgctacggtgtcacttaaccagagcacaaagcacagatattcaatcgactttctcatctgcagtcattatcagtggctataggataattaagctttttgttccttttttttcatttgttttgttgatcatgctgaagatgcatgctagtaatgaatgggataatcttgttgaatc

SEQ ID NO: 82579 - DNA, 254 bp, Oryza sativa
  Clone ID: PAT_MRT4530_81996C.1
aactagcgcctcatgctcacctggggggcttcttttattatccgccgtggtacaccaccaccaccatgtctggccggacggtgagctcctgctactacttctccccgccacggcacccaccatgcctcgcgactacgacggagccgtcgccaccttgttcccgtcggcacaatcgtcgtgcgaccacccgcagctcgacctgagcctgtccatccgcattgggccgacgccgccgccgtcgttgtacacgctca

SEQ ID NO: 82580 - DNA, 117 bp, Oryza sativa
  Clone ID: PAT_MRT4530_81997C.1
atgtcctgccgaagctggtcgaggtggtgcgacaccgtgagcgggcgctgccgctgcggtgctggcctcaccgtcgtacagcgcgtcgctcgacggggcgtccaccgcatggggatg

SEQ ID NO: 82581 - DNA, 228 bp, Oryza sativa
  Clone ID: PAT_MRT4530_81998C.1
atggcttcagttgcgccctccaacagtaatgctctagacggctcggacaggagtgggccaaacagattttcgtccttcaaccgaaaaaccgttgaaaaaccagatatagcaggtccctcaactattaaaaccggtgcaaacgaggcaagcgaggcgggtattggaggtgtaccacggagggccttcggccagacccgccaaaaccagaaacgtgggcagcaagcttag

SEQ ID NO: 82582 - DNA, 237 bp, Oryza sativa
  Clone ID: PAT_MRT4530_81999C.1
atggtggccatgctcgccctcctctccaccggcctctccctctccctctcccgcgcggacctcgtcgccgtcccagcgctcggttgggtcatcccgtccgtcgtcgtcgcgctcctccgcccgctcatctgcgatgccgacaccatcatctccgcggtgcgcgcgacccatgtccccgaccagaccaagctcatcaacgccatcatggaggccggcggcgaccacgtccggaggtga

SEQ ID NO: 82583 - DNA, 1416 bp, Oryza sativa
  Clone ID: PAT_MRT4530_8199C.1
atgaagttttcggcgatcatcgttgccgccattataggattcatctgttcctgtgcagtgtgtgagcctgacgcaacgcttgtaggagatgaattcattatctgccaggacaatggacaatggagcgattacccatattgccatgctccgctagtatgttttcgtcttcctgagagccctgccaacgggtatgtgcgcatgcgtggtaaatctgcaagaagcattgctgtgtatcgctgtaaccctggtttcgagctccatggacaaagaacggtggtctgcaatgaggctacgggtagttggcagggagatgtacctcgatgtttcagacctccatcatgccctgacccaaacgaaccatccgggatgctagccttggttcttgatgaaaactctggaatcaaacacgatgatctctacaccgaacgcacagtgttcaactatacctgccaaacaggataccacccaaccggggacgtcacaatcacgtgtcagaatggctcatgggaagcggatgcggatgttccggaatgcaacaagatcatctgtgccccacccaccctggaacccatagagaatggtacacacaacattgagaacaggacatacaatgttggagaacgtccgagtaaaaagcctctgcgttgtagcatgtgggacccaactgaagactgcaccacacgaatgtctggtagaacagcttatcttaatgcagatgggttggtgattttgacaacgggtccaggttttaacaaatgcttagtcgcaaggtgtccccatccgggttcccgtcaccttgacaacggcgagatttctttctcgccgagaaacggacaaggcgccacgaattcttggcccgtaggagcggtgatgaccctcaggtgtcggtcacatctagagctgcttgggtcaagtgagagggtgtgtcaacccgatggtcactggaatggtactctgacgtcatgccacaatgaagagtacgactgtccagccttggggaaccccatacacggctctaaagtcggctctccgcagtacagagtaaacaccaaggtcaattttcgatgcaaccatggttatgagatggtgggttccgaagagaggatgtgtacgttttctgaagagtggactggggagatgccaagatgcatgggtcgtgatgagttcgacgaactttctcgagtgatgaatgggctagggaagaccttcgacgaaatcgtcatcgacggcggctcttgggtgggtcgaaatgacaccagctcgaactcaggtttgcgaaggaaacgtacaattaaactctctgatggtatggatatctactttgcgtttgatgcgtcgaatagtgttggacttgaaaacttcgagataggcaagacatttgccaagcaactagtgggaaagtgttatgtattctaa

SEQ ID NO: 82584 - DNA, 659 bp, Oryza sativa
  Clone ID: PAT_MRT4530_819C.1
ttttttttttttttttttttttttttttttttttttttttttggtgggtttttttttttttttttttccccaacagcatccacggggttatattacttagcggaaaaaacagttttttggggcgaaaaagacatgtttagggcaccaggaacacaggggggacatccataatttttattttggggaaaccatatacaaaaggccagctgcataggcatcctaagttttttttgggttgaaaaggttaaacggcctgtgcttaaggtaaagagtaaaaacctttttgcggggacaaccaccggttggggctccacacgcttcctttaaaaaagataaggaccccttttaaccgtttaattcaactttccaaggagttaaaaagggtttggttcatgaaaaaaatgggatgatgaaaatgccttggtgatcgccaaacaacaataatgccgggcttccatgccaagtttgggcatctccatttggggatctgaaacaggggtgattatgtccaactttgaacaaatttccattgggcaccattttttggcaaaagggccagattttactttgtaaccagttatccttatgtctggatcttggtggaacaccgacagaaaaagagccgagggtgtcagttttggactgttttttgctggggg

SEQ ID NO: 82585 - DNA, 426 bp, Oryza sativa
  Clone ID: PAT_MRT4530_81C.1
gcaaccagaaaggagtatgcgtgcaagtcgatcgcaaagcagaagctcgtcattgatgacgacgtggagttcatccgccgcgagatcaggatcatgcaccaccttgctggccatccaaacatcatctccatccggggcagctacgaggatgccatggcggtgcacattgttatggagctctgcactggcggtgagctattcgaccgcatcatcagcaagggatattacacagagaggcaggctgctgaggttgcccgcatcatcgtctctgtcatcgagtcttgccactctctcggtgtcatgcatcgcgacctcaagcccgagaacttcctcttcgttagcaacgaggaggatgcgccactcaaactcattgactttggcctctccatattcttcggccaagttaaatcaatcaatcagttatga

SEQ ID NO: 82586 - DNA, 417 bp, Oryza sativa
  Clone ID: PAT_MRT4530_82000C.1
atgtcgcgccgctcaccgttcctctcacaccaccaccacccgcacctcccgccgaggaggtcacctcacgccgtcacccgagaaggtcacctcacgccgtccaccgagaagagaagcgccatgatccggtcgccgccgtcgccgcttcctctcgtcctccctctgccacaagccgccgccgccctcgcccgcccgtcctcccgccgccgcccgctccctatgtcctcccactgccacaagccgtcgtcgccctcccccgcccgccctccctccaccgccgccgactcccgcccgccggcccccgtccctcagccaccgctcgcactgttgccggctcccctcgtcctcccactgccacgagccgccgccctcacctgcccgccctcccgcccgccggttacggcgtcgaagacctag

SEQ ID NO: 82587 - DNA, 232 bp, Oryza sativa
  Clone ID: PAT_MRT4530_82001C.1
gggtgggaattattttgtttttatatatccagattagtctgaaagtgaaagagtcaaggacttggtggaaaaaatagacttctattagagtacaagatagataagcctgaacttttttagtagtgcaaggataaagtcgttaaaagactttgggattcttgaagagaatgacattcagggcatgaccgatctggcatattaccaggataacgacgcgagttcgaaaaatact

SEQ ID NO: 82588 - DNA, 1783 bp, Oryza sativa
  unsure (1)..(1783): unsure at all n locations
  Clone ID: PAT_MRT4530_82002C.1
aaaatttcagaaaatgtgagttgtttatttattattntggtttcttgccattntgtttggtgctcatatcttcatctaggttgcccatgagtaattgtttttctctttgatatagatggctgatagtgatcggttcagtgatttactatggatgcctcatgggcagcacaaagtatctaaaatttcagaaaatcctagtagttcaatgaatatacggcaccatcgcgttggaatcccttaccacccattgtgccgatcggctctacaaaatattggtttctatcaaatttcaaagatgaagagtatcaaaattgacaaatatttgatatcagctttcgtagaacgttggcggcctaagacaaatagctttcacctaccgataggggagatgacaattactttgcaaaatatcagttgcctatggggtttgccaatcaagggaaaaccaattgtgggccaatatgatggaaattggagtgatatgattgagaggtatcttgggattccaccagaagatcaagaaatgaagaagaaaaagaggaaaaaggaagatgatacatttgcactgagttacgcacgatactccataactctgagcaaattgcgtgatcgctttcgtgtcatgcccaatagtgtgcctgcaatgtacctccaatttatggataatttagcgacccacactgaatacaattggggaggagctgtacttgctatgttgtacaggcagttgaacaatggtgctgagaaggcaagatcagaaatttttggccctctagtattgttacaatttcggtcatggtcacggttgccattaggtcgtccaaaaaatataattcaaaggacggatgaagtggaggagcaagaagaagaagaatcagatggctatcctatatttggggctaaatggtgtagttatcatgaattccccaccccacataattgtgagttccattatccagaaagggtaatgagacagtttggaagaaaacaattaattccaccaccgcctccacatggtgaggttgagcttcggaagctacgcaaagtgaagcatgtaggaggaaaagtgtgcgattggaataaattccatgccaaatatgtgcaacaatatgatgggattgaagcaacaatcgttcaagaggattgtcctttcgacgcagctagcttgaaggagtatagatgttggttccaagcaaatggtatgttcgctgtgttttttgattctcaatgcttgggaggacttgaaaactctatcccataccctcgagataacatggagtggactgggtacatgcctagtggtccacccctagctcgcattggattgcgtgagattaaaaatgcagcatggggaatcaaatgttgtattactaatggatgcaagaagataggtaaatctatattgatcacatgtcaggggaatattagggatcttaacttggaatacaaattgcaaaacatgttgtctgaggctggactaccaattaaggttgaagaaattcaatctgatgacgatggcactactgcttgcacgccaagtcctccaaatgaaagttccgttgatgtatttgatgagtggatgatctcaggaaaaggttttagtagatatattgatctaggtgtggaaactactaatagagttcccacaacacaagatacaagccaagtgactcaatgtttggaaaatgaagatctggtggcttcaagagaagcatcagctccattgcatcctggtgaaagaacgtcaagtcattcagaaagttctatccaagtggttgattag

SEQ ID NO: 82589 - DNA, 524 bp, Oryza sativa
  unsure (1)..(524): unsure at all n locations
  Clone ID: PAT_MRT4530_82003C.1
ngtgtgtatgttgtgtgnagcatatgattagggcaagagacactttgcaaacccaaagtgtgtgagaggatgtgaaggcacatntgagatnncgatntgggtgcaacctgagccntgtgtgcaggagttgctgcgcaatgcgtgcactgagcagangcacaagggttgtaagcagcagtgtgaaggcacacaggagtgactggggtagcacaacacacaacatgcactgctcagggtttccaantcacactgctgcaaaatggagtcaatgcaaggctgtgcctgaggcacaaggccaaggaatgcaangatgtgcaagtggttgaaaggcagcacactgggcatgtgtgcactgtgccaaggtatgcaacatgtggttgtgtgtgtggagcaagtgatgatgacactgaagggcattttggttgctggtttagctaagcagcacatgtgcacaatgatctgttttgcacaagtttatgtgagaatcttgttaacgttctcgtgatcgtaaaaaaaaaaaaaaa

SEQ ID NO: 82590 - DNA, 1315 bp, Oryza sativa
  Clone ID: PAT_MRT4530_82004C.1
ccttaccacccattgtgccgatcggctctacaaaatattggtttctatcaaattgcaaagatgaggagtatcaaaattgacaaatatttgatatctgctttggtagaatgttagcggcctgagacaaatagctttcatctactgataggggagatgacaattactttgcaagatatcagttgcctttggggtttgccaatcagtggaaaactaattgtgggccaatctgatggaaattggagtgatatgattgagaggtatcttgggattccaccagaagatcaagaaatgaagaagaaaaacataactctgagcaaattgcgtgatcgctttcgtgccatgcccagtaacccaacacaacgggagatcgattggcatagtcgagcacttgtcttagaaattcttggctccattatttttactgattcatctggagatagtgtgcctgcaatgtacctccaatttatggataatttagcgacccgcactgaatacaattggggaggagctgtacttgctatgttatacaggcagttgaataatggtgctgagaaggcaagatcagaaatttttggccctctagtattgttacaattgtggtcatggtcacggttgccattaggtcgtccaaaaaatataattcaaaagacggatgaagtggaggagcaagaaaaaaaagaatcagatggctatcctatatttggggccaaatggtgtagttatcatgaattccccaatacaggcactcaatagtaccgaaaccaaattgacttgattcgagaaggtactgtacaatgacaaccatatgaaggtctcatagagcatatgcctatccaaattcagaatgaccgtacttggtggtttgctagactacctctcatccatttttgggttgtagagttccattatccagaaagggtaatgagacagtttggaagaaaacaattaattacaccaccgcctccacatggtgaggttgagcttcggaagctacgcaaagtgaagcatgtaggaggaaaagggtgcgattggaataaattccatgccaaatatgtgcaacaatatgatgggattgaagcaacaatcgttcaagaggattgtcctttcgacgcagctagcttgaaggagtatagatgttggttccgaaaaatttcttttttgacttcctcaaaggtcgtagcctccactgccggaaaagttatttttggaggaatattatattctgcacccttagctccatattgtattctcccatcaacatatactagaacaataatcattttttctcagtcaactctgcaaaacaaactaaaca

SEQ ID NO: 82591 - DNA, 1677 bp, Oryza sativa
  Clone ID: PAT_MRT4530_82005C.1
atggcgacaaggaaggggactgtgcagcaagggaatgatagaagttcagatgtggacgccaattggatcgacgtccaggatatgattgagaggtatcttgggattccaccagaagatcaagaaataaagaagaaaaagaggaaaaaggaagatgatacatttgcactgagttactcacgatactccataactctgagcaaattgcgtgatcactttcgtgtcatgcccagtaacccaacacaacgggagatcgattggcatagtcgagcacttgtcttagaaattcttggctccattatttttactgattcatctggagatagtgtgcctgcaatgtacctccaatttatggataatttagcgacccgcactgaatacaattggggaggagctgtacttgctatgttgtacaggcagttgaacaatggtgctgagaaggcaagatcaaaaatttttggccctctagtattgttacaattgtggtcatggtcacggttgccattaggtcgtccaaaaaatataattcaaaagacggatgaagtggaggagcaagaagaagaagaatcagatggctatcctatatttggggccaaatggtgtagttatcatgaattccccaccccacataattgtggcactcaatactaccgaaaccaaattgacttgattcgagaaggtactgtacaatggcaaccatatgaaggtctcatagagcagatgcctatccaaattcagaatgaccgtacttggtggtttgctagactacctctcatccatttttgggttgtagagttccattatccagaaagggtaatgagacagtttggaagaaaacaattaattccaccatcgcctccacatggtgaggttgagcttcggaagctacgcaaagtgaagcatgtaggaggaaaagtgtgcgattggaataaattccatgccaaatatgtgcaacaatatgatgggattgaagcaacaatcgttcaagaggattgtcctttcgacgtagctagcttaaaggagtatagatgttggttccaagcaaatggtatgttcactatgttttttgattctcaatgcttgggaggacttgaaaactctatcccataccctcgagataacatggagtggactgggtacatgcctagtggtccacccctagctcgcattggattgcgtgagattaaaaatgcagcatggggaatcaaatgttgtataactaatggatgcaagaagataggtaaatctatattgatcacatgtcaggggaatattagggatcttaacttggaatacaaattgcaaaacatgttatctgaggctggactaccaattaaggttgaagaaattccatctgatgacgatggcactactgcttgcacgccaagtcctccaaatgaaagttccgttgatatatttgatgagtggatgatctcaggaaaatgttttagtagatatattgatctaggtgtggaaactactaatagagttcccacaacacaagatgcaagccaagtgactcaatgtttggaaaatgaagatctggtggcttcaagagaagcatcagctccattgcatcctggtgaaagaacgtcaagtcattcagaaagttctatccaagtggttgattggactagtactgagaggactcctatgttcaaaaagaacactccaagttag

SEQ ID NO: 82592 - DNA, 2367 bp, Oryza sativa
  Clone ID: PAT_MRT4530_82006C.1
atggctgtgatgctagtgccaattccactactactcttgcaccagcaccacaaccatgagcatgagcatccatcgccggtagctccacagccaacaatggcatcctactacactctcctgctggcgctcctgtgccctcttctcctcctactcatcaaactttgccgggcgaaaaccagggacgacgagctgtttgacaagctcccctcgccgccaggaaggctccctgtgattggccaccttcacctcattggctccctcccgtatgtctccttccgtgaacttgccatcaagcacggccctgacctaatgcttctccgcctcggcaccgtcccgactctcgtggtgtcatccgctcgtgcggcgcaggccatcttgcggacgaatgaccacgtgttcgcgtcacggacctactctgccgtcaccgacatcctcttctatggctcgtcagatgtagcattctctccctatggcgagtattggcggcaagtcaagaagattgccaccacacacctcctcaccaacaagaaggttcgctcctacagcagggcaagacaacaggaggccaactcattgctactcggtggtttcaatcttgaggattacttccccaatttggcgagggtaactactgttaggaggttgctttgcgccaaggcccataatgtcaacaagagatgggaccaactgctcgacaagctcatcgatgatcatgccaccaaacggtcctcctcggtgctagacctagacaatgaagagagtgatttcatcgatgtccttctctccattcagcatgaatacggtctcactagagacaacgtcaaggcaatcttggtgatcatgttcgagggcggcacggacacggcgtacatagagcttgaatacgccatggccgagttgattcggaagccccaactaatggccaagctacaggccgaggttaggaggccacttctcgtaccctacctctctattgctgaatgtgatatcgagggctacacaataccctctggcacacgtgtcttcgtcaatgcatgggctctgtccagagaccctagcttttgggaaaatgctgaagagttcataccagagagcctgatgagcaccatgacaaggatgtcatactctctcctgctccccatcttgtgccctcttatcctcctactcctcttccgttgctatgcctatgcaacaaggtccggcgggatgctcgacaagctcccctcgccgccgggtaggcttccacttatcgggcacatgcacctcatcggttttttcccacacatgtcactccgcgaccttgcgactgacctgatgctcctccaccttggcacggtgccgaccctagtggtatcatcctctcgtatggcgcagggtgcaacagatgtcgcattctcaccgtatggtgactattggcggcaaataaagaagattgtcacaacgaatctcttgaccatcaagaagatccgctcctatagccagacacggcaacaggaggtgcgtctggtaatggccaagatcgtcgaggaggcggcgacacatatggcaatagacttgactgagctgctcagctgctactccaacaacatgatcaactcgtcgctccttggtggcttcaacattgaggattacttccctagcttggcaaggctacctgtcaggagactgctctatgccaaggcctatgatgtcaagaagagatgggaccagttgcttgacaaactcattgatgaccactctagcaagcatagatcctccttgcttgacaataatgatgtggagagtgatttcatcgatgctgaggtgaggggtgtggtatcaaaagggcaggacatcgttaccgaggagcatctaggtaggatgccctacctaaaggcggtgatcaaggagacactccgactacaccctgcagcgccacttcttgcgccccatgtctccgtggttgactgtaatgtcgagggctatactataccctcaggcactcgtgtcatcgtcaatgcatgggctattgccagggaccctagctattgggaaaatgccgaggagttcatgccagagaggttccttagcaacacaatggctgactacaatggaaataatttcaatttcttgccattcaggactggtcgaaggatatgcccaggtataaacttcgcgatcaccaccatcgagatcatgctagcaagccttcccctccccttcaccgctgctgccaagcaccgccgtggatttgaggtgaggggaggagaatctgaggcggcggggagggcggaggcgcgggagaagtcgacgacagggaagccggcggcggcatccttgacgcccacagttgtagacggcgatgcagttgtaagtatatctatctga

SEQ ID NO: 82593 - DNA, 270 bp, Oryza sativa
  Clone ID: PAT_MRT4530_82007C.1
atggcaacgccgggagatggcaaggatcaagaggggcagggaacaaagcagcttgatgacaagtcgatggaagatgagaacccggttgctgatcatcccaagaagcaaatgagatccatgcagaggtactaccacaagggtagcttcttccaacaagacgccgacaacgccacgcagactgctggagcagagggagagggagagggagatgagggagaagagttggtcgctaatatgtggggtccacgtggatcctactcgccacattag

SEQ ID NO: 82594 - DNA, 1077 bp, Oryza sativa
  Clone ID: PAT_MRT4530_82008C.1
atggcatcctactacactctcctgctggcgctcctgtgccctcttctcctcctactcatcaaactttgccgggcgaaaaccagggacgacgagctgtttgacaagctcccctcgccgccaggaaggctccctgtgattggccaccttcacctcattggctccctcccgtatgtctccttccgtgaacttgccatcaagcacggccctgacctaatgcttctccgcctcggcaccgtcccgactctcgtggtgtcatccgctcgtgcggcgcaggccatcttgcggacgaatgaccacgtgttcgcgtcacggacctactctgccgtcaccgacatcctcttctatggctcgtcagatgtagcattctctccctatggcgagtattggcggcaagtcaagaagattgccaccacacacctcctcaccaacaagaaggttcgctcctacagcagggcaagacaacaggaggtgcgcctggtaatggccaggatcaacgaggcagcggtggcacgcactactgtcgatctgagtgagttgctcaattggtttaccaatgacatagtgtgtcacgccgtgtctggtaagttcttccgtgaagagggtcaaaaccaaatgttttgggaactaattcaggccaactcattgctactcggtggtttcaatcttgaggattacttccccaatttggcgagggtaactactgttaggaggttgctttgcgccaaggcccataatgtcaacaagagatgggaccaactgctcgacaagctcatcgatgatcatgccaccaaacggtcctcctcggtgctagacctagacaatgaagagagtgatttcatcgatgtccttctctccattcagcatgaatacggtctcactagagacaacgtcaaggcaatcttggtgatcatgttcgagggcggcacggacacggcgtacatagagcttgaatacgccatggccgagttgattcggaagccccaactaatggccaagctacaggccgaggttaggagtgtggtaccaagagggcaggagatagttactgaagagcaactgggaagaatgccctactaa

SEQ ID NO: 82595 - DNA, 972 bp, Oryza sativa
  Clone ID: PAT_MRT4530_82009C.1
atggcgatgataacgctgccagtagctgcccacgctccgtcgccatggcttccgccctccatcctccgcctccgctccacctccaccaccaccaccatccccgccgccgccgcaagatcctccgctccccaccctctcccggacgagctccacctcgtcgccgacatccgctcgccgcacaaccacatccgcgtcgccgacgtctcccgcaccgcctccggagccggccaccccctcgccggcgcgcgcctcctcctcctcgacgcgccgggcaacatccactccctctccttccctcgctccccctgccccctcacctccacctacctcgacgtcttcgccacgctcccgccactcctccccgcctccgcctcgtccctcgccgtcctcggcttcggcgcgggctccgccgcgcgcgccgtcctccacttcttcccggacatctccgtccacggctgggagatcgaccccgccgtggtctccgcctcccgcgacttcttcggcctcgcggagctcgaggcggagcacgccgcccgcctctccatccatgtcggggacgcgctcgaggcctcggccgacgccgtggccgtgcccggcggcttcggcggcgtgctggtggacctgttcgccggcgggagcgtgctcccggagctccaggagatggacacgtggaggcggataggccggcggatggtggcgcccggagggagggtcatggtgaactgcggcgggccgtgcgtggaggcggaggaggaggggaggggcggcgaggccgtcaaggacgcaaccctgcgcgcgctcacggcggcgttcgggcacgggatggtgtcggtgatggatatggacgagagctgggtggccatgactggaccggcggtgtcgtcggcgccggaggaggcggcggcgtggaaggctaagctgccgccggagctacggcgatatgttgatatgtggaggccgtgcttgctgtga

SEQ ID NO: 82596 - DNA, 486 bp, Oryza sativa
  Clone ID: PAT_MRT4530_8200C.1
agctggtacgcctgacgtaccggaacggaattgtcgactcacgcgaccgttctgttctggttaatgctggctacatggttacagatgggtttgtcattgctgctgggagcagctgggcgacgaactctatggaaggttggcaaaagaatagggaccgagtgagcagcttggatgatgagacattgagccgtcaaggagtagcaagaaggtaagcactggcgaggtagtaaggatccacgcgtggaggcaggaagacaggagatggctactcattgcaggggtgagtttgggcatgtcatctggaagcacacatcgtggggaggaaaaggaaaagaatataaggtacccatgctgcacgaatgttggctcaatctgggtcggccatgcaaaagaggataaactatccagaatcgaaacccacatgccgaggtcaatcgcacatcaaggttgatactgactacaagaatgggctagtgcgattttgtt

SEQ ID NO: 82597 - DNA, 450 bp, Oryza sativa
  Clone ID: PAT_MRT4530_82010C.1
aagcgaacgggacccgtacaatgatggataactgtacagtatggtatagagcaaagctggactgatcgcacaacaaaatcctataggcggggggattaaccagacatgaatgagtcaagaaaagatgacaaaacaattgaggtatgggatggataaccaatttatattaatataaacaactcacggtaccctgataacaaataggcaatgcaatcactacactaaaaagacgcttttttttgtatagaccaaatacatcaaatccgctcacccaagccactaatatcaatccaaaacagggcgtggagcctagcaagaatacatcacggggctagggcatggatctatactaatcagcgtgattagaatttaggaggggctggacggaaccggattggagtgcgtgggctggctgagttcgcaccggaggtcacgtgtccgatatcatag

SEQ ID NO: 82598 - DNA, 192 bp, Oryza sativa
  Clone ID: PAT_MRT4530_82011C.1
atggctgtgcgcgcgcgcgcgcgcggtgacggggcttcgcgccttcgcggcggatgggcggtgggggggaaacgtgatcgacggatctctgtcgttggatcttatgctagacgccagttgggccaatccgggccgttaatttgtgatcgttctgagaacagcacgtgtgatctatataaggacagagctctg

SEQ ID NO: 82599 - DNA, 170 bp, Oryza sativa
  Clone ID: PAT_MRT4530_82012C.1
gttgcgatggtggcgcacgtggaggtggcaacgactctggcaatggttgcgacgatggcagcgacattggaggatcaaagatggatggctcccgacacatgctcatgtgcctccctcttgtagattgctttgcgccatctccatcgccgcggtggctaggggatcactag

SEQ ID NO: 82600 - DNA, 3285 bp, Oryza sativa
  Clone ID: PAT_MRT4530_82013C.1
atggacatctccagggcaaatgaaggctacacgagctgcggcccggtagtcgagatgtcatggcacagggccggtgtcctgctgctaggggctcagtcctacctgcctgtcccgggggttccggccgtaggtgggattgggtcggtactcttgtctatggctaggatgggttggaaactatgtcacgtcttccgtctgtataccgtggtggaaaaattctcatctgaagattccgaaagcttgtcgtaccttacacagaaggtaggtttgcatgaacaaaggttcgcggaagctaggaagaactctaggaagattaatcatgtttatccttatatgtatggatcggatggtgaggatgatgattctgaaatagctgcagctgagtgggttaggagcaaaaaggttataccttaccaatgggtgaaaaactcaggaaaagaggagaggtatgactttgacataactaaggctgataagatatttgatttgctagttcgagaaaaacagattcaacttcctgctggacatacaattccatcggctgaagagttgggcaaaaagaggtattgtaagtggcataattctgggtctcatacgactaatgactgcaaggtcttcaggcagcagatccaaacggatattgagggaggaaaaatcaagtttgatgattcgaagaggccaatgaaggtcgatggtaatccttttcctgttaatatggtacatacagctggccaatcagccgatagcgtccgtgcaaagggttttcaagtgaattcggctaagataatcaacaaatatcagaggaagtatgagaagcagcaggagaagcattatgaagaacacgatgatggttttgatcctcattggggttgtgagttctttagattctgctggaatgaagggatgaggttgccgtctatcgaaaactaccttgggtgcaatgatatcattgagagctcaagtcagtcatataataggagtaatcggctgaggcaggaaagagtgtctgttcgtcaaagattgggcccagtgaatcaaggtcgtggccaggaggatgacgtagtcaggacaaatcaatggtgtccttctggtattttcatgaagaatcagaagagaagggttcaaagattgaggaacagggagcgccttcaggaggttgaacaagaaattaaccatcggctgaagaaagcaaaaccaagacaggaattgcgtgttaagaatcagattcctatagccgatgatgttgtagccgatgaggcaaagaggttggcaaaagggaagagtgttgtagtggcaccaattaacatgacaaggtggaagaggaatcggctaagttggttgtcaccagaacaagcagtgttcgagaaacctgaggggacagagaatcggcatcttaaaccattgtatataaacggttatgtcaatgggaagccgatgcctaagatgatggtagatggtggggctgcagtaaacttgatgccttatgctacattcaagaaattgggtaggaacgccgaaaacctcatcaagacaaacatggtgcttaaagactttggtggcaatccatcagaaaccaaaggggttctgaacgtggagttgacagtcggcagtaaaaccatccctacaacattctttgtcatcgatgggaagggttcttatagcttgttgcttggaagggattggattcatgctaattgttgtattccttcgaccatgcaccaatgcttgattcaatggcaaggcaacaagatagagatcgtaccagccgacagatggagaacccaagctattattttgagggcgtcgtggaggattcgaacgtctacacaaaggataatttcgcctcggggggcatgttttgagtttgcttatactatcaaaccttatgcgactaataataaggctgagtatgaggcagtacttaaagggttgcaattgctcaaggaggttgaagccgatgctgttgaaatcatgggggattctttgttagtaatcatttataatgagaagtgccaaaaactgatgaaggagtttcggctagtaactttgaagcatgtatctcgagagcagaatattgaggtctatgatttagctcaaggggcatcgggatataagccgatgatcaaggatgttcagattgaagttgctgccatgacggccgatgattggagatatgatgtgcatcaatatttacaaaatccatcccagtcggcttataggaagttaagatataaagcgttgaaatatactttattggatgatgagctttattatcgaacgattgatggagtattgcttaagtgtctgagtgcttatcaggctaaagttgcaatcggcgaagttcatgaaggaatttgtggtactcatcaatcggctcataagatgaagtggttacttcggcgtgcggggtatttttggccgacgatgttagaagattgtttcagatattacaaaggttgtcaagattgtcagaaatttggagcaattcagcgagcgccggcgtcggctatgaatcccatcattaaaccatggccattcagaggatggggaattgatatgatcggcatgattaatccaccatcgagtaaaggacataagtttatattggtggcaactgattatttcatcaaatgggtagaggcgattcctttgaagaaggctgattctggggatgcaatacagtttgtccaagaacatataatctaccgatttggtactcctcagactattacgattgatcaaggttcaatctttgtgtctgataagtttgttcagtttgccgatagtatgggtataaagttgttgaattcttcaccgtattatgcacaagctaatgggcaagccgaggcatctaacaaaagtttgatcaagttgattaaaaggaagatttctgattatcctcggcaatggcatactcgtttagccgaagcattgtggtcttatcggatggcttgtcatggatcaatccaagttcctccttataagcttgtttatggacatgaagctgttttaccatgggaagttcgaatcggctcaagaagaacagagttgcaaagtgatttgacagccaatgagtactataatcttatgaccgatgaacgagaggatttggttcagtcgcgattgcgagcacttgcaaaagttactagggataaggaacgtgttgctcggcattataataagaaagtggtgcctaagacttttttggaaggtgagcttgtgtggaaattgattttgccgattggaacccgggatagcaaatttggcaagtggtcaccaaattag

SEQ ID NO: 82601 - DNA, 646 bp, Oryza sativa
  Clone ID: PAT_MRT4530_82014C.1
ccggccgggaattaagaagaagaggagaaaggaggcgcagaagattttgcaggagaaggagagaaagaagcgaatcgaggagcgcaagcggagaaagcaagagaaagaaattgcgctgtatggaagagtcctgtcatcagataatgctgatggtgaagatgttgagaatgatggtgatgaaatggaaactgatgatttgcctgaacctgaagtaaaaacatacgaagatggtgggactaaaattacggtcaccacgagcgaaatcactcctgaagatgacgatgaagaccttggcccgaaaaggatcacccctgcatcgacgggctacgccaacaagagcgtctccaagaagagtgctagtctaggtgtaaagaagaagccatcgaagagaaccttcaggaataagagtaaatctaagaagggcgaccagaagcgaggtgctgcaaagggtaaacggaagaacaaagggaggaagtgagtgaatgtttctgtaaccactctgtagaaatgtttgcacctttggccagggccagaggccagagctgccgtttttgccagacacgatgaactttgtactcggttcctgattcatcatccaaatgaggctaatcatgctcagcagaaaaaaaaaaaaaaaaaagcggcc

SEQ ID NO: 82602 - DNA, 276 bp, Oryza sativa
  Clone ID: PAT_MRT4530_82015C.1
tggaagctggacgcctgcggtgccggtacgctatacaccggtcgacctacgcgttcgttgactcttgttcgacctgccaatgaccattgcctatcatcctgtccctgctggtcatacccatccaccatatgcttgcttacttgtgtaacaccacgcctgaatggacccgcagtgcacatacctttgtccctcacttgtcatgctttctaaaagcactctgttactgatgttgctgctgatagagcagagaaagcaacttccattaatgctgtagct

SEQ ID NO: 82603 - DNA, 1273 bp, Oryza sativa
  Clone ID: PAT_MRT4530_82016C.1
ccctgatctgccgctgatctgctcgtgttgacctcaatcttgtcatcgtcaggtccgtcgtctcgctcgccgtcgccgtcgccggcgtgcagctgctgtgattcagatagcttcctgttcttctcctccagctcagctatcctcgccttgaggaccttctcccggcgcttgcgctccgacaagacgtgctgcagctgcagctgctggttctcgccgccgccgccgccggcggtggccgctggcgaagcccgcgcggccatctccatgatctggtagtactgcgcgagcctcgccgcgtggatctttgacagcaccgatatggccttcttgaacgccctctgtccaccgccgccgccggtggcggtgcccccgcccccgcgcgccgccgcgccgcaaaccatcgagccccccgccgccgcgctgcgcgctaaccaggcccccaccgccgtgccgcccaatgccccatccagccccacgtagccgcaccacgcccccatccaagccgaggccgccgcgggcacatccccatcgaggagcacctgccttcgtccccacctttgatggccgtctccatcctctgctccaggtggaacgctatacacgaagtcgtagctccgtttgtgacccccgcctactcctcctaggacgccactaccaaagcttaaacccaaagcaaaccagaggcagatcagatcagagctagtagcagcaagctcgcgatctcccccaacttctagaaccttctagaaccgccgaatgcggctccaccacggccgccaccaccaccaccgacgacgacgaggccaagccgcgccgcccatactccactttcgcctccccgcgcgcgcccacgtccgcattttccgccgccttctcaacccaccgcctcctcgtcctcttctccgtcgcctgcctcctcgtcgccgcggcctccctcgccttcgccttctccgcccgcgccgcgaccctgcagccgccgcccctcgccgccgtggccgaagccaccgccaaggtcgccttccgctgcggccgcgccgaggacaccctccgcgccttcctcgcctcctcctcggggaactactcctccgcggcggaggggagggagagggagaaggtgctcgccgtcgtcggggtgcacacggagatcggatccgccgcccgccgcgccgcgctccgggccacctggttcccgcccaagcccgaaggcatcgtaaggtttccccccacattgctttcctccattcccacctaccaacttggatctagctactcg

SEQ ID NO: 82604 - DNA, 374 bp, Oryza sativa
  Clone ID: PAT_MRT4530_82017C.1
aaattaactagatgaattcaaataagaaccagagctggactgattatcagtaaaaggatggggagcatgcataccagaactgatcaaaggcttactacaccatactttatacatttacaacttcaagctactctatcaaatggtaatcgcacgctgaccacaatacatctactgcagtgtgtgagcacaccatctatagcgacgcccagacgctaagccatacctatatacaggtcgtgtgatgccacaaataaacctaaacagtccacgagacctcccgatctgtataattcaggcctaagctgaaaacgtcttaatccgtctatgtcgacattttaccatttgtcaggaaacgttgcgcttagagctcttta

SEQ ID NO: 82605 - DNA, 1525 bp, Oryza sativa
  Clone ID: PAT_MRT4530_82018C.1
tgtctccgattgcatcacatccttgacagctgctggactgtcatctttaactacagattccttgagaatttcctcgtcgcagctgctggaggcaggttgttgagaagactttgcacggggaagaagacgacgacgaccactgctgctgctgctgctggaattatgccctgtggccaacaagctgacatccctcttctcgttgagaccctgcaggatgccagccacggcatccatggcactgcaccccgacgacgaccccagcactatcttcagatgaagctcttgacacttgttcggtgaactgccctgatctgccgctgatctgctcgtgttgacctcaatcttggcaagtagcagcaagctcgcgatctcccccaccttctagaaccttctagaaccgccgaatgccgctccaccaccaccgccaccaccaccactccgccgccgtcgccgtcgccgtagccgacgacgacgacgaggccaagccgcgccgcccctactccaccttcgcctccccgcgcgcgcccacctccgccttctccgccgccttctcaacccaccgcctcctcgtcctcttctccgtcgcctgcctcctcgtcgccgcggcctccctcgccttcgccttctccgcccgcgccgcgaccctgcagccgccgcccctcgccgccgtggccgaagccaccgccaaggtcgccttccgctgcggccgcgccgaggacaccctccgcgccttcctcgcctcctcctcggggaactactcctccgcggcggaggggagggagagggagaaggtgctcgccgtcgtcggggtgcacacggagatcggatccgccgcctgcagctgctgtgattcagatagcttcctgttcttctcctccagctcagctatcctcgccttgaggacgttcacgtagtcctttgctctcatcagcactgatgctttgtccttcttggtggcgggtgggagcacgtccctgagagccttgaagctatcgttgagcttctcccggcgcttgcgctccgacaagacgtgctgcagctgcagctgctggttctcgccgccgccgccgccggcggtggccgctggcgaagcccgcgcggccatctccatgatctggtagtactgcgcgagcctcgccgcgtggatctttgacagcaccgatatggccttcttgaacgccctctgtccaccgccgccgccggtggcggtggtcgccgcccctggccgccggaggagatgcttcttcgggcccaggtaccgggagtacggccggaacgcggtggcggcggcggcggcgccatggccgccgctgctccgccgtgctgcttgtcccggccgtggtagtagtatctgcgacgacacctccgttgtctggtggtggcaagaggcggcggcggcggcgagcatgagcgacgagttgtcgtcgcggctcgtcgtcgtcgtcgtcgtcccggcggagaaggagcggaaggaggacgacgacggcgacggcggcgtggcgtactgatgatcgtgctcctccat

SEQ ID NO: 82606 - DNA, 396 bp, Oryza sativa
  Clone ID: PAT_MRT4530_82019C.1
atgtggcaattactgatatggccgagcggagtcgcttgcctcagccacagtggcgtcctaggaggagtaggcgggggtcacaaacggagctacgacttcgtgtatagcgttccacctggagcagaggatggagacggccatcaaaggtggggacgaaggcaggtgctcctcgatggggatgtgcccgcggcggcctcggcttggatgggggcgtggtgcggctacgtggggctggatggggcattgggcggcacggcggtgggggcctggttagcgcgcagcgcggcggcggggggctcgatggtttgcggcgcggcggcgcgcgggggcggggggactaggaagcgcgtcgatggggatgagtggtggacgccaggattggggattgttttgtga

SEQ ID NO: 82607 - DNA, 897 bp, Oryza sativa
  Clone ID: PAT_MRT4530_8201C.1
atgggaaaccattttttctttcgtctatcctctccgctagtatgttttcgtcctcccgagagccctgtcaacgggtatgtgcgcatgcgtggtaaatctgcaagaagcattgctgtgtatcgctgtaaccctggtttcgagctccatggacaaagaacggtggtctgcaacgagactacgggtagttggcagggagatgcacctcgatgtttcagacctctatcatgccctaacccaaacgaaccatccgggatgctagccttggttcttgatgaaaactctggaatcaaacgcggtgatctctacaccgaacgcacagtgttcaactatacctgccaaacaggataccatccaaccggggacgtcacaatcacgtgtcagaatggcacctgggaagcggatgcggatgtcccagaatgcaacaggatcatctgtgccccacccatcctggagcccatagagaatggtacacacaatattgagaacaggacctaccatgttggagaaatggtccaatatgaatgtaacgaagggtatctcgtcgatggaataagctggcaagtatgtcagagtcacggtggacccaatggaatatggtccgataacgtaccaacctgcaaagtcgccaggtgtccccatccgggttcccgtcaccttgacaacgacgagatttctttctcgccgagaaacggacaaggcgccacgaattcttggcccgtaggaacggtgatgaccctcaggtgtcggtcacatctagagctgctggggtcaagtgagagggtgtgtcaacctgatggtcactggaatggtactctgacgtcatgccacagtgaagattatcaagtagtggcaagtctatccctagtatacgttgaactattttcctgggtttattga

SEQ ID NO: 82608 - DNA, 405 bp, Oryza sativa
  Clone ID: PAT_MRT4530_82020C.1
atgggcggaggcgcgcggggacatgccgacggtcagcgtggggatgggggaaggggagtagaggtggatgggggaagggaggagatagagctgagcggtgaactttgggaaggagccggagtgggcatcgggatcctcctactgctccttccccaccgtctgggcgacaaagagcttggaaacgccaacgccgaagaaagtggacatgggcaccggccggtcctcggtgtcccacttggtgcacttgtggagctcgccggcggtgccctccacgatggcaaccaccacggcggttgccagcgccacgacgacaagcgtcgtctccgcaacgccgacgaaagaggggggggatgggaggagatggaggagggagcccaccacttcggtgatcgcggtggggagtaa

SEQ ID NO: 82609 - DNA, 509 bp, Oryza sativa
  Clone ID: PAT_MRT4530_82021C.1
aaaggaacaaagcgtaaactggaataattgtcgacgtttgatgtcacgatttcggtatttgcatggtatggggatcgttggtactaggatatacgtgagacagtacaatatttggggtagcgtatctaactgttgtcgacatggtagtctgaaggtctgactcgtagtcgacaacagggtagccttcctccttaagttcgtgcccggcgagatcagagatagcgctttcgtctctcctgacagtacctagaaacaccgtaggggactagccgtgcctatctctgaagtcgatatctggcgtcttgtcttagcgtgtgttggcttgtatgttgtggcttctgtcttgatctattgttccgtagattgtggtgggtgttgattgtctcgggtgttgatcgtcccctctcctcctatggggccttgtatttatacccataggtgtccctttgtccaagtagaactaaggaaaccaatatggatacaattcgagtaatccttgttgttttcat

SEQ ID NO: 82610 - DNA, 483 bp, Oryza sativa
  Clone ID: PAT_MRT4530_82022C.1
tctctctcgtcgggaggagaaaggagggaagagggtggcaggaggaggaggaggccctcctcatccttcctccctcccctgcgctgagctgtgatgttttactgcaaccctgacgtcatcaatagatacaccccttccgtgcacagtaaccgttctaacaatttactcatgtctgtatataggccttacaaggctagttatttttacattatttatctatataagagccttgctccttcatttatgaaccttccaccaattattcctcatgagacttttttcatctatcctcagtattatttcagtcatacatgattaatacccttgtatggatgttgtcccagttattcttcccaccttttctatcaccgttttgctttttcaattaacttgttcaatgatcatttatatgattcccctgttaagcctgttatttactctttatcttctggatcatcattttgccttgtccacattaaactt

SEQ ID NO: 82611 - DNA, 416 bp, Oryza sativa
  Clone ID: PAT_MRT4530_82023C.1
agcaaaaaaaaagggtaaatttttaaaaaccgaaacagattccaggtttcaaaagcaggaaaacaagggaatgccccaagccaaaaaaaagacctgggaattagcaagggaaaaacccggattccacaaaaaccgaagggcaaaaatcaggcccaaaacaaggttaaacccaacagaaaataggggggtttaaacgacccagggcacacagggggcctatgaaaataacggtcaatgcaacgggggccatgggcgtgcccaaaactcccccttgaacgagggccatttctttttggggggagccctgggcaccctggcaccggggggggcctttttttcccagtttttgaagaccccaacagcccccggttgccccatgtcacgcacgggaaaaccacccaaggggggggccccaa

SEQ ID NO: 82612 - DNA, 411 bp, Oryza sativa
  Clone ID: PAT_MRT4530_82024C.1
gttggacccaccggagaaaaacccccctccttgttattggctcaggggtaggctgataattgctaatcttattagcatttacaacaggagatgagctcgcagagaattaacatgaacattgaagcacacgctgtttatgtacaggttaaagccggccaaacgcaaaccatcacagtgactacagggctaacatcaaattcataagtcataaggggtcaccaaaagctgtatgagatcattcatatgggcctaaaatggacagtgtgggcaacactgaaggatgctctaacatttccaataatgtgcaagacatgaattagagaaactggctgttcctaaaaaccatgtcaactgctgtatgctgttcctagctggccttcagtgaactcaatattggccttctgaagagca

SEQ ID NO: 82613 - DNA, 2487 bp, Oryza sativa
  Clone ID: PAT_MRT4530_82025C.1
atggcggaagagaaggaaagctttgaaggccaatgggcgccatccgacgtgacggaggagaacctgaaggagatggtggcgcacggcgttctccctgccaaggaaatcatcgggtggcggccagcgtgcggtgaggcttttccgacccccgatacacacgagactgtggtcttctcccatttcttctatggcggcttcgctcttccgacctcaaaatttttccgcgggatattaagcttctatggaatcagcttgcatcacctaaacccaaattccatagttcacatcgccaatttcatccatgtttgtgaagccttcttgggaattaagccccacttcgctctgtttcgccgaatcttctttctcaagccccaaccaaacaagagtaagccatgtgtagtcggaggggccggatttcagctgagggggactctgagccagaagtacttctctatgcccttcaagacctcaaacaaagggtggcacgcaaactggttttatattcagaatcctgagcctgctcttcccgagtactcttgtcttcctccggtgtaccaagatacctggaactctcttccgattggggatgaagcagcccaagccttggagctgatggatcgcatgctaaaactcaaagaacaaggcttacaaggagagcagattactcggcacttcatcaaatgccgattggcaccaattaaagaaagatcccgtacggcattcgagtttgacggtaagcatgatcctaatcatgaagaatcagattctctggattttaaaatcatgaaggagagaatgtataaaaacttctcaaatgccattgtcgtcagctactcacatcagctgccagttgtgccatataacgcattcaatccgcctccgcaggaatatgtattgatgaagtctaaccccccaatcactcagcgccggtctcctcgccagcacaccgttcagggaggtagagggccgacaatcagatcagatccgcaacctcaaacctccaatccgactgggcagacaggttctcgcaagagaaagctggtgcttaatgacgacgaaggcgacgacggcaacaaatctggggacaaaggctcgcccaataaactcccaaagcataccactcccaggaaaaaactggctagtcgtccaaggccaaagatcagaacaacttctaggtataaacctcttggtaccatttcacttcgacatgcttctctcatggaaataatactgaatattgaaagaacactttgcaggaaaccatccgacatagatccaactggaaaagatcctgatccgactgtgacagaaccaagttcatccaaggattctgagccgactgccgaaagccagccgactggcgcccatacttcaggtgataaggccaatccgagtgaccatcctccgactgaaaaccagtcggcggcaactgaaactacaacaacccaagagcccccgactggaaaccagtcggatgtaggtccagatcaagaaactcccgaagttgaagcgcagacgacaacttctcaaggaccagaggctggtaacgactcgatgattgggtctccagataaagaacaaggatcaccccacgctcagctaggaacatcctcaagaccaccaggcgatgacgaagaagaaattcctcgcataaaggcggctgatgactctcgtcctcctatcttgctcaaatggtgggacgagaactcacaagctgccggcatcgtcataaatcgtcaaaaagaagatgaggaagtgtgccagctgaagaaggcacttggagaagccactcgcattgtgaatagaatccatcttcgcaatgaggccaagaccgcaactttagaaaagctggttcctcatttgggaactcttgaagcagttagggaccagctacatgaggccaaggagcttgccaaaaagacagagaaggaattaagggaccgaattgctcagctccaggattcaaacttcgagctgagtggttcatcaaaagcgcaagccgccaggatggctcaaatggagaaacaaattgaagccctggaaagagacaaggtagaactggctgcgcaaagggactcggccttgaaggaggttgaagaccgcaaaatcaaatctcaagctcaatttgacgtcctggttggtaagatcaagaggcttgaaggagcaagagatgaagtcgctaatgtcgctataccactcgtccaagctatgttcctcaataacagtggtccgagtaatatcaagaaagctggaagtatgggagctagcacggcattggtgatgaccaaatccttgtacccgaggattgaaattgacgccattgatggctttgcagacgggacaagcgtagaggctgctcttgatcttatcagcaatgctcaaaatgcggctgacaagattgcaagtgacgtcgtagatcaattccgcaacaccgaccttcagccgagtagtaataactctgatgatgaaaggactgattctgactga

SEQ ID NO: 82614 - DNA, 300 bp, Oryza sativa
  Clone ID: PAT_MRT4530_82026C.1
atggcggaagagaaagaaagctttgaaggccaatgggcaccatccaacgtgacggaggagaacctgaaggagatggtggcgcacggcgttcttcctgccaaggagatcatcgggtgccggccagcgtgcgtcggcggggccggattccagctgagggggactctgagccagaagtacttctcaatgcctttcaagacttcaaacaaagggtggcatgcgaactggttttatgttcagaatcctgagcctgctcttcccgagtactcttgtcttcctccgatgtaccataaacttggctaa

SEQ ID NO: 82615 - DNA, 2445 bp, Oryza sativa
  Clone ID: PAT_MRT4530_82027C.1
atggcggaagagaaggaaagctttgaaggccaatgggcgccatccgacgtgacggaggagaacctgaaggagatggtggcgcacggcgttctccctgccaaggaaatcatcgggtggcggccagcgtgcggtgaggcttttccgacccccgatacacacgaggctgtagtcttctcccatttcttctatggcggcttcgctcttccgacctcaaaatttttccgcgggatattaagcttctatggaatcagcttgcatcacctaaacccaaattccatagttcacatcgccaatttcgtccatgtttgtgaagccttcttgggaattaagccccacttcgctctgtttcgccgaatcttctttctcaagccccaaccaaacaagagtaagccatgtgtagtcggaggggccggatttcagctgagggggactctgagccagaagtacttctctatgcccttcaagacctcaaacaaagggtggcatgcaaactggttttatattcagaatcctgagcctgctcttcccgagtactcttgtcttcctccggtgtaccaagatacctggaactctcttccgattggggatgaagcagcccaagccttggagctgatggatcgcatgctaaaactcaaagaacaaggcttacaaggagagcagattactcggcacttcatcaaatgccgattggcaccaattaaagaaagatcccgtacggtattcgagtttgacggcaagcatgatcctaatcgtgaagaaccagattctctggattttaaaatcatgaaggagagaatgtgtaaaatcttctcaaatgctattgtcgtcagctactcacatcagctgccagttgtgccatataacgcattcaatccgcctccgcaggaatatgtattgatgaagtctgaccccccaatcactcagcgccggtctcctcgccagcacaccgttcagggaggtggagggccgacaatcagatcagatccgcaacctcaaatctccaatccgactgggcagacaggttctcgcaagagaaagctggtgcttaatgatgacgaaggcgacgacggcaacaaatctggggacaaaggctcgcccaataaactcccaaagcataccactcccaggaaaaaactggctagtcgtccaaggccaaagattagaacatcttccaggaaaccatccgacatagatccaactggaaaagatcctgatccgactgtgacagaaccaagttcatccaaggattctgagccgactgccgaaagccagccgactggcgcccatacttcaggtgataaggccaatccgagtgaccagcctccgactggaaaccagtcggcagcaactgaaactacaacaacccaagagcccccgattggaaaccagtcggatgtaggtccagatcaagaaactcccgaagttgaagcgcagacgacaacttctcaaggaccagaggctggtaacgactcgatgattgggtctccagataaagaacaaggatcaccccacgctcagctaggaacatcctcaagaccaccaggcgatgacgaagaagaaattcctcgcataaaggcggctgatgactctcgtcctcctatcttgctcaaatggtgggacgagaactcacaagctgccggcatcgtcataaatcgtcaaaaagaagatgaggaagtgtgccagctgaagaaggcacttggagaagccactcgcattgtgaatgccaagaccgcaactttagaaaagctggttcctcatttgggaactcttgaagcagttagggaccagctacacgaggccaaggagctcgccaaaaagacagagaaggaattaagggaccgaattgctcagctccaggattcaaacttcgagctgagtggttcatcaaaagcgcaagccgccaggatggctcaaatggagaaacaaattgaagccctggaaagagacaaggtagaactggctgcgcaaaggaactcggccttgaaggaggttgaagaccgcaaaatcaaatctcaagctcaatttgacgtcctggttggtaagatcaagaggcttgaaggagcaagagatgaagtcgctaatgtcgctacaccactcgtccaagctatgttcctcaataacagtggtccgagtgcactcgacgcaaccgaaatcttcgacaagctgagagttgctccggatgtatatttcaagaatatcaagaaagctggaagtatgggagctagcacggcattggcgatgaccaaatccttgtacccgaggattgaaattgacgccattgatggctttacagacgggacaagcgtagaggctgctcttgatcttatcagcaatgctcaaaatgcggctgacaagattgcaagtgacgtcgtagatcaattccgcaacaccgaccttcagccgagtagtaataactctgatgatgaaaggattgattctgactga

SEQ ID NO: 82616 - DNA, 2439 bp, Oryza sativa
  Clone ID: PAT_MRT4530_82028C.1
atggcggaagagagagaaagcttcgaaagccaatgggcgccgtccgacgtgacggaagaaaacctgaaggagatggtggcgcacggcgttctcactgccaaggagatcatcgggtggcggccagcatgcggcggatttgctcttccaacttcaaagttcttccgtgggatactgaatttctatggaatcagcttacatcatttgaatccgaactccatagtccatattgcaaatttcgtccatgtctgcgaagcttttttgggcattagacctcattttgctctgttccgccgaatatttttccttaagcctcaaccgaacaaaaacaaaccatgcgtagttggaggggctggatttcaactgaggggcactctgagccaaaagtatttctccatgcctttcaagacttcaaacaaaggatggcacgccaactggttttatattcaaaatcccgagcccgctcttcctgagtactcctgtcttcccccagtataccaagatacatggaactctcttcccacaggagatgaagctgcccaagccttagaactgatggaacgcatgctgaaactcaaagagcaaggcttacagggagagcaaatcactcggcatttcattaagtgccgattagctccaatcaaagaaagatcccgcacagcatttgaatttgacggcaagcatgatccaaaccgtgaagacccagattctctggattttaagatcatgaaggagaggatgtacaagatattctcgaacgctattgtcgtcagctactcacatcaactgccagttgtaccatacaacgcattcaatccgcctccgcaggaatacgtattgatgaaatctgatcccccaattgctcagcgccgatctcctcgccagcataccactcagggaagtggagggccgacaatcaggtcagacccacaacctcaaacctccaaaccggctgggcagacaggtcctcgcaagagaaagctggtgcttaatgacgacgagggcgatgacagcaacaaatctggggacaagggcacgcccaacaaactcccaaagcataccatgcccaggaaaaaactggctggccgtcaaatgccaaagattagaacatcttccaggaaaccatccgacatagatccaactggaaaagatcctgatccggctgtgacagagccaaatttatccaaagacgctgagccgaccgccgaaaaccagccgactgccgaaagccagccgactgccgaaagtcagccgtctggcccccaagcttcggacgacaaggccaatccgagtgatcagccgccgactggaaaccagtcggcagcaactgaaactgcaacaacccgagagcccccgactggaaaccagtcggatgtagatctaaatcaagagattcctgaagctgaagcgcagacaacttctcaaggaccagaagttggtaatgactcagtgattgggtctccagataaagagcaaggatcatctcacgctcagccaggcacatcctcaggtccactaggcggcgacgaagaagaaattctccgcataaaggcagctaatgactctcgtcctcctatcttactcaaatggtgggacgagaactctcaagtttccggcattgttataaatcgccaaaaagaagatgaggaagtatgccagctgaagaaagtacttggagaagccactcgcattgtgaatagaatccatcttcgtaatgaagccaagactgcaaccttagaaaagctggttccacatttgggaactcttgaagccgttagggaacagctacacgaggccaaggagcatgccaagaaaacggagaaggaattaagggagcgaattgcacagctccaggactccaacttcgagctgagtggttcatcaaaagcgcaagccaccaggatggctcaaatggagaagcaaatagaagtcttgaaaagagacaaggtagaactggctgcggaaagggactcagccttgaaggaggttgaagaccgtaaaatcaaatctcaagctcagtttgatgtcctggttggtaagatcaagaagcttgaaggagcaagagacgaagtcgccaatgtcgctacaccactcgtccaagctatgttccttaataacagtggtccgagtgcacttgacgcaaccgaaatctttgacaagctgagagttgcaccggatgtatatttcaagaatatcaagaaagctggaagtatgggagctagtatggcattggcgatgaccaaatccttgtacccgaggattgaaattgataccattgatggctttgcagacgggacaagcgaagaagctgctcttgatcttatcagtaatgctcaaagtgcggctgacaagattgtaagtgatgttgtagagcaattccgcaacaacgaccttcagccgagcaataataactctgatgatgaaaggactgattctgactga

SEQ ID NO: 82617 - DNA, 567 bp, Oryza sativa
  Clone ID: PAT_MRT4530_82029C.1
atggcgtcactcaccggcgcacgacggggatgggtctccggcggcgaacctcaacggggaaggggcggacgagctactcacatcagctgccagttgtgccatataacgcattcaatccgcctccgcaggaaaccatccgacatagatccaactggaaaagatcttgatccggctgtgacagagccaagttcatccaaggattctgagccgactgccgagagccagccgactggcgcccatacttcaggtgataaagccaatccgagtgaccagcctccaactggaaaccagtcggcagcaactgaaactacgacaactcaagagcccccgactggaaaccagtcggatagaatccatcttcgcaatgaggccaagaccgcaactttagaaaagctggttcctcatttgggaactcttgaagcagttagggaccagctacatgaggccaaggagcttgccaaaaagacagagaaggaattaagggaccgaattgctcagctccaggattcaaacttcgagctgagtggttcatcaaaagtagatttttaccataaatgtgttttgtag

SEQ ID NO: 82618 - DNA, 339 bp, Oryza sativa
  Clone ID: PAT_MRT4530_8202C.1
cttcgtttcgacctaatcgaccgccttctcgagggggggccccgctctaccgcctagggggggtccgaaacgccgccgacgtcaagtcccaccccttcttcaagtgcctcaacctagccctcctccgttcgtcgcgcccgcccgtcgatcccggcgcctgcaccggagccgagcctgtacaccggtcagaaatcgtgcaaggcggagacagcttctgcatattcgtacgacaacttcaaacccagattaacgccaccgtgccggacgaacctcttctgatcattattgaccagcacatgtatggtactacctacccgactcgtggaattcttgacctga

SEQ ID NO: 82619 - DNA, 2238 bp, Oryza sativa
  Clone ID: PAT_MRT4530_82030C.1
atggcggaagagaaagaaagctttgaaggccaatgggcgccatccgacgtgacagaggagaacctgaaggagatggtggcgcacggcgttctccctgctaaggagatcatcgggtggcgaccagcgtgcggtgaggcttttccgacccccgatacacacgaggttgtagtcttctcccatttcttctatggcggcttcgctcttccgacctcaaaatttttccgcgggatattaagcttctatggaatcagcttgcatcacctaaatccaaattccatagtccacatcgccaatttcgtccatgtttgtgaagccttcttggggattaagccccacttcgctctgtttcgccgaatcttctttctcaagccccaaccgaacaagagtaagccatgtgtagtcggaggggccggatttcagctgagggggactctgagccaaaagtacttctctatgcccttcaagacttcaaacaaagggtggcacgcaaactggttttatattcagaatcctgagcctgctcttcctgagtattcttgtcttcctccggtgtaccaagatacctggaactctcttccgattggggatgaagcagcccaagccttggaattgatggatcgcatgctaaaactcaaagaacaaggcttacaaggagagcagattactcggcacttcatcaaatgccgattggcaccaattaaagaaagatcccgtacagcttttgagtttgacggcaagcatgatcctaatcgtgaagaaccagactctctggattttaaaatcatgaaggagagaatgtataaaatcttctcaaatgctattgtcgtcagctactcacatcagctgccagttgtgccatataacgcattcaatccgcctccgcaggaatatgtattgatgaagtctgaccccccaatcactcagcgccggtctcctcgccagcacaccgttcagggaggtggagggccgacaatcagatcagacccacaacctcaaacctccaatccgactgggcagacaggttctcgcaagagaaaactggtgcttaacgacgacgaaggcgacgacggcaacaaatctgggaacaaaggcttgaccaataaactcccaaagcataccactcccaggaaaaactggctagccgtccaatgccaaagattagaacatcttccaggtccagatcaagaaactcccgaagttgaagcgcagacgacaacttctcgaggaccagaggctggtaacgactcgatgattgggtctccgaataaagaacaaggatcaccttacgttcagctaggaacatcctcagaaccaccaggcgatgaagaagaaattctccgcataaaggcggctgatgactctcgtcctcctatcttactcaaatggtgggacgagaactcacaagctgccggcatcgtcataaatcgtcaaaaagaagatgaggaagtgtgccagctgaagaaagcacttggagaagccactcgcattgtgaatagaatccatcttcgtaatgaggccaagaccgcaactttagaaaagctggttcctcatttgggaactcttgaagcagttagggaccagctacacgaggccaaggagcttgccaagaagacagagaaggaattgagggaccaaattgctcagctccaggattcaaacttcgagctgagaggttcatcaaaagcgcaagccaccaggatggcccaaatggagaaacaaattgaagccttgaaaagagacaaggtagaactggctgcacaaagggactcggccttgaaggagattgaagaccgcaaaatcaaatctcaagctcaatttgacgtcctggttggcaagatcaagaggcttgaaggagcaagagatgaagtcgctagtgtcgctacgccactcgtccaagctatgttcctcaataacagtggtccgagtgcactcgacgcaaccgaaatcttcgacaagctgagagttgctccggatgtatatttcaagaatatcaagaaagctggaagcatgggagctagcatggcattggcgatgaccaaatccttgtacccaaggattgaaattgacgccattgatggctttgctgacgggacaagcgaagaagctgctcttgatcttatcagcaatgctcaaaacgcggctgacaaaattgcaagtgacgttgtagatagattccgcaataccgacctgcagccgagtagtaacaactctgatgatgaaaaaactgaatctgactaa

SEQ ID NO: 82620 - DNA, 630 bp, Oryza sativa
  Clone ID: PAT_MRT4530_82031C.1
atggatgaaatttctggtcaaaagaacagagaggaagcatgcaacaatctgatgggtatagcatgcaatgcaaactcatgtacttctgctgaaaatgctgctttgcctatgccatgtgaaaatgtatggatctctgtcagcccacctcccaacgctgcatcgcggagggggacaccgtcgtggtgtacgagcgccacgacgccatgcgcgctgtgggcatgcatgctccagaaccgcttcggcgtcttccgccatgatgactggatcggccgccccttcggctgcaaggtccacagcgccgccaccgccggaggcaaggggaagggcgggttcatccacctccttgcgcccacctctgagctgtggacgctcatgctcagccaccggacgcagatcctctacctcgccgacatcagcctcgtcgtctcctacctcgagctcgtccccgggtgccacgtgctcgagtccggctccgggtgcggctccctcaccatgtcgctctttgaccaagaaaatagaggagaggctgacatccgtggcccacatagggtaatctggtcttttttgattgtttctctctccgttttcaccggaaataataaaataatgtatccggtgtccagtagctaa

SEQ ID NO: 82621 - DNA, 2334 bp, Oryza sativa
  Clone ID: PAT_MRT4530_82032C.1
atggcggaagagaaagaaagctttgaaggccaatgggcgccatccgacgtgacagaggagaacctgaaggagatggtggcgcacggcgttcttcctgccaaggagatcatcgggtggcggccagcgtgcggtgaggcttttccgtcccccgatacacacgaggttgtggtcttctctcatttcttctatggcggcttcgctcttccgacctcgaaatttttccgcgggatattaagcttctatggaatcagcttgcatcacctaaacccaaattccatagtccacatcgccaatttcgtccatgtttgtgaagccttcttgggaattaaaccccacttcgctctgtttcgccgaatcttctttctcaaaccccaaccgaacaagagtaagccatgtgtagtcggaggggccggatttcagctgaggggaactctgagccagaagtacttctcgatgcccttcaagacttcaaacaaagggtggcatgcgaactggttttatattcagaatcctgagcccgctcttcctgagtactcttgtcttcctccggtgtaccaagatacctggaactctcttcctattggggatgaagcagcccaagccttggaattgatggatcgcatgctaaaactcaaagaacaaggcttacaaggagagcagattactcggcacttcatcaaatgccgattggcaccaattaaagaaagatcccgtacggcattcgagtttgacggcaagcatgatcctaatcgtgaagaaccagactctctggattttaaaatcatgaaggagagaatgtataaaatcttctcaaatgctattgtcgtcggctactcacatcagctgccagttgtgccatataatgcattcaatccgcctccgcaggaatatgtattgatgaaatctgaccccccaattactcagcgccggtctcctcgccagcacaccgttaagggaggtggagggccgacaatcagatcggacttgcaacctcaaaccttcaatccgactggggcaaacaaggttctcgcaagagaaagctggaaaccatccgacatagatccaactggaaaagatcctgatccggctgtgacagagccaagttcatccaaggattctgagccgactgccgagaaccagccgactggcgctcatacttcaggtgatacagccgatccgagtgaccagcctccgactggagaccagtcggcagcaactgaaactacaacaacccaagagcccccgactggaaaccagtcggacgtaggtccagaccaagaaattcccgaagttgaagcgcagacgacgacttctcaaggaccagaggctggtaacgacgctatgattgggtcttcaaataaagaacaagaatcgcctcacgctcagctaggaacatcctcaggaccaccaggcgatgacgaagaagaaatccctcgcataaaggcggctgacgactctcgtcctcctatcttgctcaaatggtgggacgagaactcacaagctgccggcatcgtcataaatcgtcaaaaagaagatgaggaagtgtgccagctgaagaaggcacttggagaagccactcgcattgtgaatagaatccatcttcgcaatgaagccaagacagcaactttagaaaagctggttcctcatttgggaactcttgaagcagtcagggaccagctacacgaggccaaggagcttgccaaaaagacagagaaggaattaagggaccgaattgccctgctccaggattcaaacttcgagctgagtggttcatcaaaagcgcaagccaccaggatggctcagatggagaaacaaattgaagtcttgaaaagagacaaagtagaactggctgcgcaaagggactcggccttgaaggaggttgaagaccgcaaaattaaatctcaagctcaatttgacgtcctggttggtaagatcaaaatgcttgaaggagcaagagatgaagtcgctaatgtcgctacaccacttgtccaagctatgttcctcaataacagtggtccgagtgcactcgacgcaaccgaaatcttcgacaagctgagagttgctccagatgtatatttcaagaatatcaagaaagctggaagtatgggagctagcatggcattggcgatgaccaaatccttgtacccaaggattgaaattgacgccattgatggctttgcagacgggacaagcgaagaagctgctcttgatcttatcagcaatgctcaaaacgcggctgacaagattgcaaatgacgttgtagagcaattccgcaataccgaccttcagccgagtagtaataactctgatgatgaaaaaactgattctgactga

SEQ ID NO: 82622 - DNA, 2316 bp, Oryza sativa
  Clone ID: PAT_MRT4530_82033C.1
atggcggaggagaaagaaagctttgaaaggccaatgggcgccgtccgacgtaacggaagaaaacctgaagagatggtggcgcacggcgttctccctgccaaagagatcatcgggtggcgggcaacatgcgccttcttgggaattaaaccccacttcgctctgttccgccgaatcttttttctcaagcctcaaccgaacaaaaataagccatgtgtagtcggaggggccggattccagctgaggggaactctgagccagaagtacttctcaatgcccttcaagacttcaaacaaagggtggcatgcaaactggttttatgttcaaaatcctgagcctgctctccccgagtactcttgtcttcctccggtgtaccaagatacttggaactctcttccgatcggagatgaagctgctcaagccttggaattgatggatagcatgttaaaactcaaagaacaaggcttacaaggagagcagattactcggcatttcatcaaatgccgactggcaccaatcaaagaaagatcccgtacagcattcgagttcgacggcaagcatgatcccaatcgtgaagaaccagactctctggactttaaaatcatgaaggagagaatgtataaaattttctcaaatgctattgtcgtcagctactcacatcagctgccagttgtgtcatataatgcattcaatccgcctccgcaggaatatgcgttgatgaaatctgatcccccaatcactcagcgccggtcgcctcatcagcacaccgttcagggaggtggagggctaaaaatcagaccagatccgcaacctcaaacctccaatccaactggacagacaggttctcgcaagagaaaactggtgctcgacaacgatgaaggcgacgacgataaatctggggacaagggctcgcctaataaattcccaaagcgtaccatgcccaagaaaaaactggctggccgtcaaatgctaaagattagaacatcttccaggaaaccatccgacatagatccaactggaaaagatcctgatccggctgtgacagagccaaatttatccaaagacgctgagccgactgccgaaaaccagccgactgccgaaagtcagccgactgccgaaagccagccgactggcgcccatgcttcggatgacaaggccaatccgagtgaccagccgccgactggaaaccagtcggcagcgactgaaactgcaacaacccaagagcccccgactggaaaccagtcggatacaggtctaaatcaagagattcctgaaactgaagcgcaggcgacaacttctcaaggaccagaaactggtaatgactcggtaattgggtctccggataaagagcaaggatcacctcacgctcagctaggcacatcctcaggtccattaggcggcgacgaagaagaaattctccgcataaaggcagctgatgactctcgtcctcctatcttactcaaatggtgggacgagaactctcaagtttccggcatcgtcataaatcaccaaaaagaagatgaggaagtgtgccagctgaagaaagtacttggagaagctactcgcattgtgaatagaatccatcttcgtaacgaggccaagaccgcaaccttagaaaagctggttccacatttgggaactcttgaagccgttagggaacagctacatgaggccaaggagcacgcaaaaaagacggagaaagaattaagggagcgaattgctcagctccaggattcaaacttcgagctgagtggttcatcaaaagcgcaagccaccagaatggctcagatggagaaacaaattgaagccttgaaaagagacaaggtagaactggctgcggaaagggactcagccttgaaggaggttgaagaccgtaaaatcaaatctcaagctcagtttgatgtcctggttggtaagatcaagaagcttgaaggagcaagagacgaagtcgccaatgtcgctacaccactcgtccaagctatgttccttaataacagtggtccgagtgcacttgacgcaaccgaaatctttgacaagctgagagttgcaccggatgtatatttcaagaatatcaagaaagctggaagtatgggagctagtatggcattggcgatgaccaaatccttgtacccgaggattgaaattgataccattgatggctttgcagacgggacaagtgaagaagctgctcttgatcttatcagtaatgctcaaagtgcggctgacaagattgcaagtgatgttgtagagcaattccgcaacaacgaccttcagccgagcaataataactctgatgatgaaaggactgattctgactga

SEQ ID NO: 82623 - DNA, 2046 bp, Oryza sativa
  Clone ID: PAT_MRT4530_82034C.1
atggtggaagagaaagaaagctttgaaggccaatgggcgccatccgacgtgacggaggagaacctgaaggagatggtggcgcacggcgttctccctgccaaggagatcatcgggtggcggccagcgtgcgtgtaccaagatacttggaactctcttccgattggggacgaagcagcccaagccttagagttgatggaccgcatgctaaaactcaaagaacaaggcttacaaggagagcagatcactcggcacttcatcaaatgccgactggcgccagttaaagaaagatcccgtacagcttttgagtttgacgacaagcatgatcctaatcgcgaagaaccagactctctggattttaaaatcatgaaggagagaatgtataaaatcttctcaaatgctattgtcgtcagctactcacatcagctgccagtcgtgccatataatgcattcaatccgcctccgcaggaatatgtattgataaaatctgatcccccaatcactcagcgccggtctcctcgccagcacaccgttcagggaggtggagggccaacaatcagaccagattcgcaacctcaaacctccaatccaactggacagacaggttctcgcaagagaaaactggtgcttgacaacgatgaaggcgacgacgacaacaaatctggggacaagggctcgcctaataaactcccaaagcgtaccatgcccaggaaaaaactggctaactgcccaacgccaaagattagaacatcttctaggaaaccatccgacatagacccaactggaaaagatcctgatccggctgtgacagagccaaatttatccaaggatcctgagccgactgccgaaagccaaccgactggcgcccatgcttcgggtgataaggccgatccgagtgaccaaccgccgactggaaaccagtcggcagcagctgaaactgcaacaacccaagagcccccgactggaaaccagtcagatgtaggtctcgatcaagaaatccccgaagttgaagcgcagacgacaacttctcaaggaccagaggctggtaacgactcgatgattgggtctccaaataaagaacaaggatcacctcacgctcagctaggaacatcctcaggaccaccaggcgatgatgaagaagagattcctcgcataaaagcggctgatgactctcgtcctccgatcttgctcaaatggtgggatgaaaactcacaagctgccggcatcgtcataaatcgtcaaaaagaggatgaggaagtgtgccagctgaagaaggcacttggagaagccactcgcatcgtgaatagaatccatcttcgtaatgaggccaagaccgcaactttagaaaagctggttcctcatttgggaactcttgaaacagttagggaccagctacacgaggccaaggagcttgccaaaaagacagagaaggaattaagggaccgaattgcccagctccaggattcaaactacgagctgagtggttcatcaaaagcgcaagccaccaggatggctcaaatggagaaacaaattgaagccctggaaagagacaaggtagaactggctgcgcaaagggactcggccttgaaggaggttgaaggccgtaaaatcaaatctcaagctcagtttgacatcctggttggtaagatcaagaggcttgaaggagcaagagatgaagtcgccaatgtcgctacaccactcgtccaagctatgttcctcaataacagtggtccgagtgcactcgacgcaaccgaaattttcgacaagctgagagttgctccggatgtatatttcaagaacatcaagaaagctggaagtatgggagctagcatggcattggcgatgaccaagtccttgtacccgagaattgaaattgatgccattgatggctttgcagacgggacaagcgaagaggctgctcttgatcttatcagcaatgctcaaaacgcggctgacaagattgcaagtgacgttgtagagcaattccgcaacaacgaccttcagccgagcaacaataactctgatgatgaaaggactgattctgattga

SEQ ID NO: 82624 - DNA, 246 bp, Oryza sativa
  Clone ID: PAT_MRT4530_82035C.1
atggccgcgcgctgcccggaccgtcctcacaccgcgccatacacggccgcgtcgccgccgcacggcgccccaccgcagaccgccggcgccccgccgccaagcggccgcgccgcttggcagccctgccgccttgcggccgcgccgtttggccgcccggctgccgtgccgccaggccgtctcgccgccggcgccgcctcgccgccgcacctgccgaacgtgacgaaagttgcacacaagtatcactag

SEQ ID NO: 82625 - DNA, 543 bp, Oryza sativa
  Clone ID: PAT_MRT4530_82036C.1
ctcacgcgagggctactacctctttcattactcaaatatgaaccaatggtcgcgtaacagggcgccgattaattgttccaaacccacggctgttatcgcagaacccctaatgcatcaacacacgcttaaaccagaagatctgcacctgataacacgcgtcaccatggctcaagcccagcattcctaatgacgataacgctgatcagaacggcgtcaatactccgtggacacgctatagcacaaacgacaggctggaggccactttattggaccacactagcctcaggcacgcaagtgtacttcatcgtaacaccagacataatgtcttgaggacacttcttcaacgcccctggatttcgaactgattaaaactttaccgtgcatcatcaggtctattcacaacgtttgtatactcatgcagtaactgccccatacctcgcttcgatatgaattcatttaacactcgacaatccactgaatcttgtctagcgaatctgggatacggatcaaaaaaatatattgcatcccctctattgaaaagag

SEQ ID NO: 82626 - DNA, 486 bp, Oryza sativa
  Clone ID: PAT_MRT4530_82037C.1
atgccgccgatgatagccaccgccgtctgcacgcagagccgccgatacgacggcctccggttctctcaacggaagccggtgaacgtggatgtctacccgttgtatcatctggcgccatctctgtgcgtcacttacttgatggcgctccaggccgacgaggatgtgagttggggaatgagcgcgcgcgcatggcaacggcttgaggtcgtcgggacgtacttgctctcctcctcgtcagtggaggttagtgcacgatctcgtgctgcgatcgatctgccgaaggaaggcgtcgttgttcgtcgcacgttgttggtgaatgaggtcggtccgcctagcgccgtctctgcggatggctgcctccccgtcgtcctccgtgagcgttgccggccagggatgtgttggacctccctgccacgcaccggcagggccgcgcgcgtccgtctcgctcgaggcttctttgtgtgtatatatgttgttgatgaatag

SEQ ID NO: 82627 - DNA, 217 bp, Oryza sativa
  unsure (1)..(217): unsure at all n locations
  Clone ID: PAT_MRT4530_82038C.1
acggacatcatcaagagccgggtcaacaacaaagatgtcgcaggagtacnggaaccacctggtcgggggatnctggaggcgtgggcgccngancacngggagagccanccacaacttagtatggacgagatcatcggcgagtgcaagacattcttctttgggggcacgacaccacctcacaccttctcacatggaccatgttcctattgagcacaca

SEQ ID NO: 82628 - DNA, 372 bp, Oryza sativa
  Clone ID: PAT_MRT4530_82039C.1
atgaggcaagctccacgacgacgggcgcctgcctttcttccgcccatggtctccaccggcttcccttccgctgccgccgatctgctccgcgttggcgagctatacggaggagccaacgtccttcgtcctcgtcggcggccgccgttccgccttcgtccgctggcggcctccagatcaccaccatcgcccacgcccgctgccctcatccgccgcccgtggaggacgctgaggagtctattggcacaaatccctgttcttggtgcagaggcattgagtattgttgttctaattgctcatgtgcatatggcatatccttcactagttccacaggtgcggatcaaggacaccaagggagttttcatccatgaataa

SEQ ID NO: 82629 - DNA, 408 bp, Oryza sativa
  Clone ID: PAT_MRT4530_8203C.1
atggatccttgcaggaggggccgccaccagatcggggttggggagggcaaccaccgattaattaatccgggcggggagggtcactgccactggatctgggtgggggagagtggtggcggccagatcggtgcaggggagatctgccgctgtcggatccgagcgggggaggaccaccgccgtcacccacgcccgtcgccgccatcccactcgttcaccgtcgccgctggagcctgcacctgtcgtcctcgcgctccaccgccatcgcccttgtcctccaccaccaccctcgcccgccactgccgtcagagtgagggaggagagggaagaggaatggggactaggagagtgagggccgccagatccacccgggggcggtggcggccgctgccgctccctcccgcttggtga

SEQ ID NO: 82630 - DNA, 1155 bp, Oryza sativa
  Clone ID: PAT_MRT4530_82040C.1
gtggccacggcgtgcagagcgctgaccacggtggcgtctggcggtagctcagcctcaccaggctccccaccatcctgtaccgagaccgcgccctcaccgtgacggcgagcggcagcccgccgccggactcgagcaggtcctgcatgccgcgccccgccgcgtacatcggcttcccctccgccgccacgaacagcctcaccgtcctcttgccccgcgccccgacgtcgtaggaggacccctcctcctccaccccctgcggagaaattggacattctgccactgtcaatatttctttcacctcctccggcaaacatgtgggaagagacgaggctgtgcgaggagaaggggaagaggcggcgttgtgcgaggagatgttccgaacaccgtcgccaacaagagaaggacgagccggccgtcctcgtgaagcgtgagcacccgagcagcgctgtagcggtcgacgcggcgaggcacgagcgcttggaccgcgcggcggtgtctgactcggcagccgcgacctgtgatttgtggtcggcgtttgactcgatgacgcggcggaaggatactcttgatggactgaagctataatccggcgacgagcactattgggccgacgcatgcgtgcagttggttgggttcacagcggcgctggtgttcgccgcggccgggatctggttcgtcgtgttcggcgtcgcttgccgccgcgtacgtaatttctccggtcacctcgccgccggtgagtaaactaaccaccgcgccattgttgcagcatggggtacatgacgggcaggggcagcgagccagtgaacgttggtcatagcggtaccaacggcgtcgtcgagacttagcggtggtcctcgcttgtgacggtgacgaggtcgcggccgcgcccccaccgcgtcgccgtcctcctcctcctcctcctagcctcctccccggccgcccgcgcctggaagaaggacgagttccgcaactgcaaccagacccccttctgcaagcgcgcgcgcacccgcgccccgcactcgctcgacgcgccgctctccctcgacgccgcctcgctcgccgtcgccaccgacggctccctcaccgcctcgctctcccacccgtcccgcctccgcccgctcctgctccgcctctccgcgctgcccccgcacgcgc

SEQ ID NO: 82631 - DNA, 303 bp, Oryza sativa
  Clone ID: PAT_MRT4530_82041C.1
atggccgccggggagatcttccgccggcgcgcctccaccatcctctggcaggtcccactagttcttgcaatagggcctgaaataccacttttacaattcccttcacaacagttaaccatagtgacattttttttgcctgcacttcttggtgatcttataagcagatccatatcctacatattcctcattgatatatactactggaatcaagcagcggtgtggagggagaatctgacatggttacattgcggcactgctgtcaatggaagctttcaagctgtgctggttccagatgttggctaa

SEQ ID NO: 82632 - DNA, 153 bp, Oryza sativa
  Clone ID: PAT_MRT4530_82042C.1
atggcgcccaagcgctacgcaaatgagtgtaaaggcaaaagtaatatcaagttggcacaatcaagacagggcaagacggcaatgagcatgagggtttatagcagtatagcaccactcagcatggaccgacagtaccattgtatagtggtgcag

SEQ ID NO: 82633 - DNA, 265 bp, Oryza sativa
  Clone ID: PAT_MRT4530_82043C.1
tcggttgtgtcttctttcaatgacatgtttgaagacatttcgctgagtcctgtttaagggttgcctagcaatttgttttatagcatccagatggggcactataggatgtctgagtacttggattcggggtgccaacgacctgggtatgatactaccaagggataagatgtctgatcttgcaatagcttttatttggtaccgcaaggggtatttgatgactgagcaggtgctcaggaccgaggcgacgaggttaagtagcgatgtg

SEQ ID NO: 82634 - DNA, 414 bp, Oryza sativa
  unsure (1)..(414): unsure at all n locations
  Clone ID: PAT_MRT4530_82044C.1
ccgctggaacggcgtgncccagggcgacgcgcgacaggcgaggcgagctagccccagccgtagtggcggcgaggcgcagagatgccggcgacgggacgcggcggcgcgggtgaagtgggggagaaaccagctctcggcgcgggggcgggtgccgaaaagcattacnccgacccatgcttctctatccgagtgcagcaaggctggccacanngcgcacacagccgcagcccgcagcggagttggcttgtcgtatccatggcggaggagttggctggccagtcgttaggattnccgacgcacggacaaagtgcatcctctcctcttgctcgaacgaaaatcccaagtattagcccttgttcttgctcaaataaaaatccccagatattagccttggcttgattntcaaaaaaaaaa

SEQ ID NO: 82635 - DNA, 228 bp, Oryza sativa
  Clone ID: PAT_MRT4530_82045C.1
atgcagattcgaattcggaatcgtggccgcggctcggcggggcgcgccatagcgctggagctcagccatggcggcgacaaggtcactctcgaggaggcagccaagggaggtggaggtcacgacaatggcggtggcgggggacggaggctgagtcgcacccttctgctactggcaacggtggtcaccagaggactagggaaaacaaagagggggtggaggccgaactag

SEQ ID NO: 82636 - DNA, 4263 bp, Oryza sativa
  Clone ID: PAT_MRT4530_82046C.1
tatgtaatgacgatggtattagggtagtatctggtagttttgacgtgtgtctaaattacgggatatcattatttttggttatatgctgatgatgaggtgggctgggacctgcactggagttaagcagatctcccaggcctcgtgtttttgtcaacacgcttttggcatgcccagtgggacgcttaagaagtcagatgacagttcttcctcatggccgaaaaatagccaccaccgccatctagcccaggttccattaaaggcaaggtgttgaagcagggattgactgacattattgatgacaacgtcatgctgattgatccagagaaattcacgcctgagcagaaggcggagtttgaagcaactctgcagcaggcacgggatcagttcctgaattcattcatgcagacccgtaaggggacacttgttcaaaagtataaaataaaagtggttgctgataattctgggactagttcttctaaagatggagaggggaaacaagctccagatggctcgactcagccaagcatcaaaggtgctaccgacggctctttaggaaatcaaggtgacaaccctcaaggagtccatggagtacaaggtgatggagtgcatggagctcaagatgtgatgagggagcaatttgggctcaaaccaaaggaaactggaaacttgtaccgacaaccttatcatgagtggtttgaaagagtttctctacctcatcggtttaaagtgccagatttttcaaagttttccggacaagatactacatcaacctatgagcacataagccgatttttagctcagtgtggtgaggcatcggctgtagatgctctgagggttagattgctccggttgtcattagctggatcggcttttacgtggttttcctctttgccgcatgggtcaattaacagttgggccgacttagaaaaacagtttcataattatttctatagtggggtccatgagatgaagttgtccaatctcacgtcgatcaagcaaaagcatgatgagccggtgcatgagtatattcaaaggttcagggagatgaggaataaatgttacagcttgagcttgaccgatgcccagttggccgacttggcttttcagggaatgattgctccgattagggagaagttctcattggaatattttgaaagcttgtcgcaccttatatagaaggtatctttgcatgaacaaaggtttgcggaagctaggaagaactctaggaagattaatcatgtttatccttatatgtatgcgtcggatgatgaggatgatgattctgaaatagctgcagccgagtgggttaggagcaaaaaggttataccatgtcagtgggtaaaaagttctgaaaaagaggagaagtatgattttgatattactaaagctgataagatctttgatctgctactccgagagaagcaaattcaacttcctgctggtcatacgatcccatcggctgaggaattgggcaagaagaggtattgcaaatggcacaatttctcattctactaatgattgtaaagtttttagacagcagattcaggtggctattgaagggggcaagattaagttcgatgactccaagaagccgatgaaggtcgatggcaatccttttcctattaatatggtgcatacagctagccagacagtcgacaggatccgtgcaaagggttttcaggtgaattcggctagggttatcaacaaatatcagaggaaatatgacaagcagaaggacaagcattatgaagaacacgatgatgggatgaggttgccatctattgaaaattgccctgggtgcagtgatattgtcgagagttcaagccgatcatataacaggggtaatcggctgaggcaggcaagagtttctgttcatcaaagattgggtcctgtgaatcaagatcgtggccaagaggatgaggtaaccaggaagaatcaatggtgtccttctggtattttcacgaagaatcaaaaaaggagggaaagcaagaccatgacatgagtgccgtgttaagaatcaggttcatgcagccgatgacgttgcagctgatgaggcgaagaagttggcaaaagggaagagtgttgtaacagcaccaattaacatggttttactttgccagctgagttcggaatcgatcaagccgatgtcgaagaagtggaacaggaatcggctaagttggttctgtcaccagaacaggcagtgttcgagaaacctgaggggacagacaatcggcatcttaaaccgttgtatgtaaattgttacgtcaatgggaagctgatgtcaaagatgatggtcgatggtggagctgcggtaaatttgatgccttatgctacgttcaggaagttgggtagaaacaccgaggacctcatcaagacaaatatggtacttaaggactttggtggcaatccatcggaaaccaagggtgttctaaatgtggagctgacagtcggcagtaagactattcctactacgttttttgtcatcgatgggaagggttcttacagtttgttgctcggaagggattggattcacgccaattgttgtattccttcgactatgcaccaatgcttaattcagtggcaaggcgacaaaatagagatcgtgccagccgacagccactcaaagatggagaaccgaagctattactttgagggcgtcgtggagggttcaaacgtctacaccgaggacacggtagatgatctcgatgacaagcaaggtcaaggttttatgtcggccgatgatttggaagaaatagatataggtccaggcgatcggccaaggccgacatttattagcaagaatttatccccagagtttagaaccaagcttatagagctcttgaaagagtttagagattgcttcgctttggagtattacgagatgccagggctcagtcggtcaatcattgaacatcggctacctattaaaccgggggttagaccacaccagcaaccgtcgagaagatgcaaagccgatatgctcgaacctgttaaggctgagattcaatgcttatacgatgctggttttattcgtccttgtcgatatgctgaatggatttctaatttgaataaagctaacccaaaggacaaatatccaatgccagtggccgatcagttggttgacgctgcttcgggacataagatattaagttttatggatggaaatgcgggatataatcaaatcttcatggcagaggaagacattcataagatagcttttagatatcctggtgcaatcggcttgtttgagtgggtcgtgatgacttttggattaaaaagtgatggagccacatatcaaagggcgatgaattatatttatcatgatctgatcggctggttggttgaggtctacattgatgatgtggttgttaattctaaggagatacaagaccacatagccgatttaagaaaagtttttaagaggaccaggaaatatggcttgaagatgaatccgacaaagtgtgcttttggtgtatcggctggccagttcttgggttttcttgtccatgagaggggaattgagataactcaaaggagtattaatgcgattaagaagatcaaggccccggagaacaagacagagttgcaggagatgattggcaagattaattttgttcgacggtttatttctaatttatctggaaggttagagccttttacgccgttgttaagattgaaggccgatcagcagtttacctggggggcagagcaacagaaggctttggataacattaagaattatcttagttctcctccagtgttgattcctccacgaaaggggataccttttcggttatatctgtcggccggtgagaagtcaatcggctcggttttgattcaagagctcgaagggaaagaaagagttgtgttttatctaagccatcggcttttggatgcagagactaggtattctcctgtggaaaagttatgcttgtgtttatatttttcatgcacaaggttaaggcattgtttattatccaataaatgcaccgttatatgcaaggccgatgttatcaagtatatgttgtcggctcctattttgaaaggacgggttggaaagttgatattttccttaactgagtttgatcttgcggtacgagtcaccgaaggtgattaaaggccaagctgtcgccgattttattgttgatcatcgtgatgattcaatcggctcggtcgagattgtgccgtggtgtcgtctccaaaaaggcaatgttcctacttatcttagttctttgagaatttacaccttttcagcaagcggat

SEQ ID NO: 82637 - DNA, 480 bp, Oryza sativa
  Clone ID: PAT_MRT4530_82047C.1
ctattcaggcagttcctcccatcccatcaccagctcagccgacggcaccagcgtcggctcccacgcttgctcctcggaacacggttgatccaactcagcagcagccgattcaacaaacgccacccaggcgacaagttgtgcaacctgttcaacaaacacccccaatccaacaggtcgcgcaaccgatccagcaaacaccaccaagtcggccggttgtacagccgattcagcagacgccgttgagacagcaggtcgttcagtcgactcggcagcagggcttaatggatgtatcagctggattcgcatcgcacgctggtcagtgtgctccaaatcaggttgtcccagagcacttgatccatcacgtgcagccagatgacacagtagtaccctaagtgatccctgagcatttggtgcgtggtatccaaccgaaccttcacaattaccagggaggcaatttgaattatcaatatcagcctacat

SEQ ID NO: 82638 - DNA, 4821 bp, Oryza sativa
  Clone ID: PAT_MRT4530_82048C.1
atggactccccagcgacccccgtgggcttagctctgccacttctcagtctggtgctccacaatgaaccatactacacaaaagataagtgtgggcaaaagtctgccgtaaagacttgtgatatcttagagtttgttagagataacagtcgtgtccggatcaaatcaactggcacgctcatacatccgaaggcgagctttggacctgcactggagttaagcagatctcccaggcctcgtgtttttgtcaacacgcttttggcatgcccaccaccaccgccatctagcccaggttccattaaaggcaaggtgttgaagcagggattgactgacattattgatgacaacgtcatgctgattgatccagagaaattcacgcctgagcagaaggcggagtttgaagcaactctgcagcaggcacgggatcagttcctgaattcattcatgcagacccgtaaggggacacttgttcaaaagtataaaataaaagtggttgctgataattctgggactagttcttctaaagatggagaggggaaacaagctccagatggctcgactcagccaagcatcaaaggtgctaccgacggctctttaggaaatcaaggtgacaaccctcaaggagtccatggagtacaaggtgatggagtgcatggagctcaaggtgatggtgctcaggggtcgcaaggaggaaatcttaatcagaatagtgaagtggcacaagactttttcaacaatttccaagatcgggtcgactatgctgttcacaatgctctgatcaatcagtccggggtgttggttaacactttgtcaaatatgatgaagtcgatagccgatggttcaatagctgagcatcaggctgcaggcccagtgtatttacaaggaggcgtcttcccaaattatcgtcctttgatcaccgacgctcagccatctattcaggcagttcctcccatcccatcaccagctcagccgacggcaccagcgtcggctcccacgcttgctgtgcaactttcagctccaggccaattgattaatccccaactgttggtgagagagcaaccacaccatgctggaccaaatgtgacccagctaacgcaggatcaggttgcatctatgtttttacctcctcggaacacggttgatccaactcagcagcagccgattcaacaaacgccacccaggcgacaagttgtgcaacctgttcaacaaacacccccaatccaacaggtcgcgcaaccgatccagcaaacaccaccaagtcggccggttgtacagccgattcagcagacgccgttgagacagcaggtcgttcagtcgactcggcagcagggcttaatggatgtatcagctggattcgcatcgcacgctggtcagtgtgctccaaatcagcctacatcaccgcaagtccagtaccagcaggccgaatcggctcagccccagttggttcctcagtacaatcagttcgggcctacacctcaacaacctcaggggacacctcagcaacggccatgggccgatgtgatagccaatgtgatgagggagcaatttgggctcaaaccaaaggaaactggaaacttgtaccgacaaccttatcatgagtggtttgaaagagtttctctacctcatcggtttaaagtgccagatttttcaaagttttccggacaagatactacatcaacctatgagcacataagccgatttttagctcagtgtggtgaggcatcggctgtagatgctctgagggttagattgctccggttgtcattagctggatcggcttttacgtggttttcctctttgccgcatgggtcaattaacagttgggccgacttagaaaaacagtttcataattatttctatagtggggtccatgagatgaagttgtccaatctcacgtcgatcaagcaaaagcatgatgagccggtgcatgagtatattcaaaggtttgcggaagctaggaagaactctaggaagattaatcatgtttatccttatatgtatgcgtcggatgatgaggatgatgattctgaaatagctgcagccgagtgggttaggagcaaaaaggttataccatgtcagtgggtaaaaagttctgaaaaagaggagaagtatgattttgatattactaaagctgataagatctttgatctgctactccgagagaagcaaattcaacttcctgctggtcatacgatcccatcggctgaggaattgggcaagaagagacagcagattcaggtggctattgaagggggcaagattaagttcgatgactccaagaagccgatgaaggtcgatggcaatccttttcctattaatatggtgcatacagctagccagacagtcgacaggatccgtgcaaagggttttcaggtgaattcggctagggttatcaacaaatatcagaggaaatatgacaagcagaaggacaagcattatgaagaacacgatgatggctttgatcctcattggggttgtgagttttttagattctgctggaatgaagggatgaggttgccatctattgaaaattgccctgggtgcagtgatattgtcgagagttcaagccgatcatataacaggggtaatcggctgaggcaggcaagagtttctgttcatcaaagattgggtcctgtgaatcaagatcgtggccaagaggatgaggtaaccaggaagaatcaatggtgtccttctgctgagttcggaatcgatcaagccgatgtcgaagaagtggaacaggaatcggctaagttggttctgtcaccagaacaggcagtgttcgagaaacctgaggggacagacaatcggcatcttaaaccgttgtatgtaaattgttacgtcaatgggaagctgatgtcaaagatgatggtcgatggtggagctgcggtaaatttgatgccttatgctacgttcaggaagttgggtagaaacaccgaggacctcatcaagacaaatatggtacttaaggactttggtggcaatccatcggaaaccaagggtgttctaaatgtggagctgacagtcggcagtaagactattcctactacgttttttgtcatcgatgggaagggttcttacagtttgttgctcggaagggattggattcacgccaattgttgtattccttcgactatgcaccaatgcttaattcagtggcaaggcgacaaaatagagatcgtgccagccgacagccactcaaagatggagaaccgaagctattactttgagggcgtcgtggagggttcaaacgtctacaccgaggacacggtagatgatctcgatgacaagcaaggtcaaggttttatgtcggccgatgatttggaagaaatagatataggtccaggcgatcggccaaggccgacatttattagcaagaatttatccccagagtttagaaccaagcttatagagctcttgaaagagtttagagattgcttcgctttggagtattacgagatgccagggctcagtcggtcaatcattgaacatcggctacctattaaaccgggggttagaccacaccagcaaccgtcgagaagatgcaaagccgatatgctcgaacctgttaaggctgagattcaatgcttatacgatgctggttttattcgtccttgtcgatatgctgaatggatttctagtatagttcctgttatcaagaaaaatggtaaggttagggtgtgtattgattttagaaatttgaataaagctaacccaaaggacaaatatccaatgccagtggccgatcagttggttgacgctgcttcgggacataagatattaagttttatggatggaaatgcgggatataatcaaatcttcatggcagaggaagacattcataagatagcttttagatatcctggtgcaatcggcttgtttgagtgggtcgtgatgacttttggattaaaaagtgatggagccacatatcaaagggcgatgaattatatttatcatgatctgatcggctggttggttgaggtctacattgatgatgtggttgttaattctaaggagatacaagaccacatagccgatttaagaaaagtttttaagaggaccaggaaatatggcttgaagatgaatccgacaaagtgtgcttttggtgtatcggctggccagttcttgggttttcttgtccatgagaggggaattgagataactcaaaggagtattaatgcgattaagaagatcaaggccccggagaacaagacagagttgcaggagatgattggcaagattaattttgttcgacggtttatttctaatttatctggaaggttagagccttttacgccgttgttaagattgaaggccgatcagcagtttacctggggggcagagcaacagaaggctttggataacattaagaattatcttagttctcctccagtgttgattcctccacgaaaggggataccttttcggttatatctgtcggccggtgagaagtcaatcggctcggttttgattcaagagctcgaagggaaagaaagagttgtgttttatctaagccatcggcttttggatgcagagactaggttaaggcattgtttattatccaataaatgcaccgttatatgcaaggccgatgttatcaagtatatgttgtcggctcctattttgaaaggacgggttggaaagttgatattttccttaactgagtttgatcttcggtacgagtcaccgaaggtgattaaaggccaagctgtcgccgattttattgttgatcatcgtgatgattcaatcggctcggtcgagattgtgccgtgcacatgctctaagtctgtttgcgtagttatggtcagccacacaaaagaaacatga

SEQ ID NO: 82639 - DNA, 3339 bp, Oryza sativa
  Clone ID: PAT_MRT4530_82049C.1
atggccgagaaacaacctccaccaccatctagcccaggttctgctaaaaacaaggcgtcaaagtcgggattggatgacatcattgaaaagaacgtcatgccaatcgatccagaaaagttcacacccgaacagaagaaagagtttgaagcaacgttgcagcaaacacgggatcagtttttgaactcatttatgcagacccgcaaggggacacttgttcaaaagtacaagataggagtggttgctgatgatcctgggaccggttcttctaaagatggagaaggaaaacaagctccagacggctcagctcagccgagtatcaaaggtgctaccgatggctctttaggaaatcaaggtgacatgtctcaaggagttcatggagttcagagtgacggtgctcaggggccacaaggagggaatcttaatcagaatagtgaagtggcacaagacttttttaacaatttccaagaccgggttgactatgctgttcacaatgctttgatcgatcagtccggggtgttggttaacactttgtcaaatatgatgaagtcaatagccgatggttcaatagctgagcatcaggctgcaggcccagtgtatttacaaggaggcagctcctcccattccgtcgccaccgcagccgacgacaccagcatcggctcccacgtttgctgcgcaacttttagctctgggccaattgatcaatcctcaattgttgggggcgatttgaattatcagtatcaacctacatcaccgcaagttcaataccagcaggcagaatcggctcagcttcagtttgttcctcaatacaataaatttgggcctataccacaacaacctcagggaacgcctcagcaacgaacatgggccgatgtgatagctgatgtgatgagggagaaatttgggcttaaaccaaaagaaactggaaatttgtaccgacaaccttatcctgagtggtttgaaagagttcctctacctaatcggtttaaagtgccaaatttctcaaaattttcaggacaagatactacatcaacctatgagcacataagccgatttttagctcagtgtggtgaggcatcggctgtggatgctttgatggttaggttattccggttgtcattggatggatcggcttttacttggttttcctctttgccgcatgggtcaattaacagttgggccgatttagaaaagcagtttcatagttatttctatagtggggttcatgagatgaagttgtccgatcttacgtcgaacaagcataagcatgatgagccggtgcacgagtatattcagaggttcagggaaatgaggaataagtgttacagcttgagcttgaccgatgcccagttagccgacttggcttttcagggaatgattgctccgatcagggagaagttctcatcggaagactttgaaagcttgtcgcaccttacacagaaggtatctttgcatgaacaaaagtttgcggaagctaggaagaactctaggaagattaatcatgtttatccttatatgtatggattggatgatgaggatgatgattccgaaatagctgcagccgagtgggttaggagcaaaaaggtcatactatgtcagtgggtgaaaagttctggaaaggaggagaagtatgatttcgatgttactaaagctgataagatctttgatctgctactccgagagaagcaaattcaactttctgctggtcatacgatcccatcggccgaggaattaggcaaaaagaggtattgcaaatggcacaattctgggtctcattctactaatgattgtaaggtttttagacagcagattcaggtggctattgaggggggcaagattaagttcgatgactccaaaaagccgatgaaggtcgatggtaatccttttcctgttaatatggtgtatacagctagccaaacagccgataggatccatgcaaggggttttcaggtgaattcggctaaggttatcaacaaatatcaaaggaagtatgacaagcagcaggagaagcattatgaggaatgcgatgatggttttgatcctcattggggttgtgagttcttcagattctgttggaatgaagggatgaggttgccatctatcgaaaattgccctgggtgcagtgatatcgtcgagagttcaagccgatcatataataggggtaatcggctgaagcaggcaagagtttctgttcatcaaagattgggtcctgcgaatcatgatcgtggccaagaggatgaggtaataaggaagaatcaatggtgtccttctagtattttcacgaagaatcagaaaagaagggttcaaagattgaggagcagggagcgcgtccaggaggttgaacaggaaattaaccatcggctgaggaaagcaaagccaaggcaagagtggcgtgttaagaatcaagttcctgtagctgatggtgtcgcagccgataaggcgaagaagttggcaaaagggaggagtgttgtaacagctccaattaacatggtttttaccttgccagctgagttcggaatcgatcaagccgatgtcgacgaagtggaacaggaatcggctaagttggttctgtcactagaacaggcagtgttcgagaaacctgaggggacagacaatcggcatcttaaaccgttgtatgtaaatggctacgtcaatgggaagccgatgtcaaagatgatggtcgatggtggagccgcggtaaatttgatgccttatgctacgttcaggaagttgggtagaaacgctgaggacctcatcaagacaaatatggcactcaaggactttggtggtaatccatcggaaaccaaaggtgttctaaatgtggagctgacagtcggcagtaagactattcctactacgttttttgtcatcgatgggaagggttcttacagtttgttgctcggaagggattggattcacaccaattgttgcattccttcgactatgcaccaatgcttaattcagtggcaaggcgacaaaatagagatcgtaccagtcgacatgtcagttaatgttgccagtgccgatttaggtctttgggagatggatggccttgattgtttatctggaaaggtttgggatggagattttctaaagagtaaagtccatcaccggtccctagacttgtaccgctgtgtcatcctggtccctaaactcgcaaatcgactattcatgtcctcaaacttgttcgactgtgtcatcccgatccctaaacttatagatcactcgtttaggtcctccaacttgttcagttgtgccacctcggtccctaaatttggatttgaatatcatctgggtcaaataggacggtctaaagactttatatttaaaaataattcataa

SEQ ID NO: 82640 - DNA, 363 bp, Oryza sativa
  unsure (1)..(363): unsure at all n locations
  Clone ID: PAT_MRT4530_8204C.1
nnaatctcatngnacgaaaagaaaaancncctanncaaatcgaaacccctctctttgatctcgncgccgnggaatnaggaggagagagagcaanggccgccgaggagggagnnccgaccgcctgccacaacaaggacgacgccnacgcccacatgaccaaggccaccgacgccggcacagcgcgcataattgacttcactgcttcctggcgagccccttgccgctccatcgccccagcgtccgctgaatacccccaaaagctccctggcgctgnccctcctgcacgccgccgccccaccacccgcacgcacgcnnctgcaaaccccaccgccccaccccncgccccccctccctcacccatca

SEQ ID NO: 82641 - DNA, 339 bp, Oryza sativa
  Clone ID: PAT_MRT4530_82050C.1
atggcgccgccgacgagacagccgcgatctggtggacggaggaagcgacggatggcggccgccggcgatggcggtggcggcgtcgcggccctgatgccggaggacatggtgcgcgaggtgttgctgcgcctcccggccaaggcggccgcccgcttccgcgccgtgtgccggccgtggcgcgccacgctctcggacccgcgcttcgtcgccgcgcacgccgcgcgccggggcgccctgctcgtcgccaccggcgccccgtgccgtaccagccgcgggtcgggcggccacgtcgacctcgtgggcctcgccggcgacgttctgcggtggactcccgcttag

SEQ ID NO: 82642 - DNA, 261 bp, Oryza sativa
  Clone ID: PAT_MRT4530_82051C.1
atgatgaggggaggggaagggaaggggtggagagccgacggcggaggaggggcgacccgtggtgggtttggcgcggacggcgggggcgaggaagcggtggttggcacgggggtcgggtggtggggcgaggaagcgacggtcggagccgacaaccgggtggagaagcgatggtcgaaggtagtgatcgggcagagaagcgatggtcggaggtggcagccaggcgtggcgaagctgtgggcggcggcaacagcaaacgcatga

SEQ ID NO: 82643 - DNA, 1933 bp, Oryza sativa
  Clone ID: PAT_MRT4530_82052C.1
cgggctgaggaatcggcacgagggcctaaaccagacactagtaccatgcactgagcctgtaaagtttttgcaaatctactgcaaaggaagcaggatacagatggcgctctctcgctccgtcgaggtggccgtgcccgccgatccggccggcgatggcgatcgagataaaattcggctgcggcagctcggctacaagcaagagctgaagcgcggcctctctgttctctccaacttcgccttctccttctccatcatctccgtgatggccggtgtgacgacgacgtacagcacggggctccgctacggcgggccggtgtccatgacgctcgggtggctcgtcgtgtccgccttcaacggctgcatggccctgtccatggccgagatctgctccgcctacccgacctccggtggcctctactactggagtgccaagctcgccggcaacgactgggctccctttgcttcttggatcactggctggtttaacatcacgggacagtgggccgctaccacgagcgtggacttcgcgttggcgcagttggtccaggtgatcgtcttgctcagcaccggtggagccaacggcggtggctacatggcctccaactacgtcgtgctcgccatctacggcgccatgctcgtcatccacggcgctatcaacagcctcccgatccagtgcctctcttggttcggccagcttggagctttttggaatgcggcaggtgtctttgtgctggtggccttgatcccggctgtcgccacggaaagggcgagcgttgagttcattttcactcacttcaacacagaaaacggcatggggatacgcgacaaggcttacattttactcatcgggttgttgatgagccagtacgcgatggccggctacgacacatctgctcatatgacagaggaaacgaagaatgcagattggagtggcccgatcgggatcgtaacctcggttgctctctcgaccgtgttcgggtggatctacatagtgtcactcacgtcggcggtgacggacattccctacctgttgagccccgacaacgacgccggcggcaacgcggttgctcaagctttctacaccactttccaccggagatacggcagcggcctgggagggatcctctgcttgggagtcgtcgctgtcgccgtcttcctctgcggcctcgcctgcatcactagcaactcgaggatggcgtatgcgttctccagggacggagcaatgccgttctcgaaagtctggcaccgagtgaacaagcaagaggtgcctataaacgccgtatggctctctgtggtggtggcgttcatcatggctctgacatcgctgggaagccaggtggcattccaagcaatggtgtccatcgcgacgatagggctctgcatctcctacgcgctgccgatcttcttccgggtgacgacggcgaggggatccttcgttccggggccgtttcaccttggcaagtacgggatcgtcgtcggctgggccgccgtgctctgggtggccgccgtcaccgtgctcttctcgctgccggtggcgtacccggtggcggaggagacgttcaactacacgccggtggccgtcggcggcgtgctgctgctcaccgtcggcgcgtgggctctccgtgcccgcttctggttccaagggcccattactaacactaatgacggcccgctgtgacggcccataactgtatgggccgatgcatgtgtgctacggcccatggagttctacggctgacaaggaagcccacgtacatgtagccttgttgggcggcccagtaagaggccgttctttattttgattcgtattcccatgtccttggatggaaattcaacggtctacgattcggctgattatgttagaaaaagacaggcatgaggtacagaactatactaaaaaagcagcatgcgtgcaataattcaagcatagttt

SEQ ID NO: 82644 - DNA, 3096 bp, Oryza sativa
  Clone ID: PAT_MRT4530_82053C.1
atgaggaccaccgtcgacaagaacgacaaggagatcgtcaccaagaacccggactacaccaagtggatggctcaggaccagcaggttcttgcctatctgctgaattccctgtccaaggatgttccgcaacaagtggcgactctcgacacttcggcgcaagtttgggatgccctcaccaacatgtatgcatctcaatcacgcgcacgcatcaccaacctcaggatcagcctcgccaacactaggaaggggtccatgaccactgcagtctacttttccaagatgaagggactggctgacgatcttgcgtcggttggcaagcccctggatgacgaagaactggtgtcgtacatcctcgtgggcctcgatatcaactacaatctgctggtttccaccgtggtaggaggcggacaaatccaatcttctgccaacgccgcctcacgcggacgtggcaacagcaacgacaacaacttccgcggtcgtggtgccggcggcaatggaggtcgtggccgtggcaatggcgaacgcggtggaggtccacaaggaccacgtccgtgctggtataggtttgatcaaacctatcagcccgaagagaaggttgcagcagcagtgaattccgcctacggcatagataccaactggtatgtcgactgcggtgccaccgaccatatcaccggggagctcgacaagctctcagttcgtgagaagtataatggacagcatcaagtccatacagccaacagcacagcacccggtagtccaagtcctggtgattcaagtctcaataagaatgccttgagcatcatcaagccatcttcgactaggtggcattatcgtttaggtcatccagcttttccaattgttagtcgagtcattaaaagttttcagcttccttgttctagcgagtccaataatgtagaacacatttgtgattcttgtcaacgggccaagagccatcaattaccataccctaaatctctgagttcatccaatgttccgtttgctcttgtattctctgatgtttggggaccggcgcacacttctgttgggcgacatgattactatgttagtttcatcgacgattttagcaagtatacatggatctatcttctcaaaaagaaatctgatgtttttcaagccttcctaaactttcaacggtatgttgaacggcagtttaaaaccaaaatactcactatgcagaccgattggggtggtgagtatgaaaaactaaactccttcttccagaagataggcatagctcatcatgtctcttgccctcatgcgcaccagcaaaacggctcggcagaacgtaagcaccgtgacatagttgagaaaggtcttgcccttctatcccaagcctcggttcctttgaaattctgggatgaagcctttcttactgccacatacctcattaataggttgcctagttctgccatttccttcaaaacaccgcttgaacaactcttctctgaaaatcctgagtccagtcacttgcgcgtgttcgggtgtgcctgctggccaaacctgcgaccatataatcatcgcaagctttcaattagatcaatccgtcttttcgttgcctccctgcatcccaatgccggcgcccgtctccagcgagagatttctcttttgccttcttatttgctatccaccaccgatcaagggggagaaattactaatgatcatatgctaacatgttctactgaccctacttgtggtgatcaagcaacaggagcacagattgctggagaaaattcgatgcaaaatggtggaaatccggggcaaaacggtgaagatttgatgcaaagctcacatgaaatcatacctggatccgtgaccaatcaaacttcaatgtcagatggctcaggatcccaagggggccagagctcaagccatgcagccagtagccatgcggcagcaagcggaagttcaagccatgcagcgaacaaccatacgacagcgagcagcagtagccatgcagtgggcagcagcaatcattccagctcaggttcacatccaggatcttctgcgcagtctgctccagcacagccaatacaaccagaaccagtcaggcatcgtacccggttgcaaagtggtataactaaaccaaggttagatgttgatggaactattaagtactctttggcttgttctacaggtgaaccaacagatgtgcaagaagcattgggggactcacgctggaaacaagcaatggatgaggagtacaatgccctggtgaggaacaacacatggcacttggtgaaagcaccacaagataagaataggatggtcactaaggcaattagatgttcagaatgcctttttgcatggtattctagaagaagaagtttatatgaaacaaccaccagggacttaggtgagctacattatttcttgggtatagaggtgaagaaaatacctgatggtatactgttgaaccaagcaaagtatgctttagacttgctaactaaagttggtatgaaagattgtaaatcagtttccacgccgctagctgtgacagagaagttgatggcacacagaggagatcctcttggtaccgaggatagcactcggtacaggagcattgtaggaggattacaatacttaacactcaccagaccagatttggcttttgctgttaataaggtatgtcaatatcttcatgctcctacttcagaacattggtcagctataaaacgaatattgagatatatcaaaggaactgttgatgttggtttgcactttaagaggtctagttctactctagtcagtgccttttctgatgctgattgggctggtagtctagatgacagaaggtctacaggaggttttgtaatttactttggacctaatattgtgtcatggagtgctaggaaacaaccaacagtatccaggtctagtaccgaagcagaatataaagctatggccaatgctactgctgagttaatttgggttcattcagttcttgaagaattgggagtaaaaattgctcaaccacctgtgttgtggtgtgacaatttaggagcaacatatttatcatcaaatccagtctttcatgcacgaacgaagcatattgagattggttatcactttgtataa

SEQ ID NO: 82645 - DNA, 460 bp, Oryza sativa
  unsure (1)..(460): unsure at all n locations
  Clone ID: PAT_MRT4530_82054C.1
tctttaaattaaatgaggttggagaggaatatgaacacaaggtggataatctagttggtcccatcacttccttttatttcttttccttgatttgttttccatgtcggcatccaattaggaaatcatctaggacagtacaacctaggtacgtgcgcaaggacgtcatttcagttttgactgtagaggaattagttctggaagagttcagaaagactaaatagacctttgtcctgttcatagagaggtttcgttaaaattcagtgtatntgtaaaactcagcggtacatttttaattgtaaactcagttggggagaggcttcttagcttatcccgtttgattgcatcaacgaggaaatggctgtgactgcatcatggatgttgcaattgtaccctgtcatggaggcccatttgaattgacttgatttaattttgctgagttcagactaaaaaaaaaaaaaaa

SEQ ID NO: 82646 - DNA, 2910 bp, Oryza sativa
  Clone ID: PAT_MRT4530_82055C.1
aagattgctatgattcatatttgtcaccgtgggtaccagcactatgtcctgggactggtaccgagatcgcggtttcgtaggaagcggttcgcgccgttttccctacgacacgctcctgtcaggtgccgttgtacggtggtatcagattggggtgtgacaaacatcgactacaatccgctggtttccaccgtggtaggtcgatctgatccaatctccttgagtgatttgtactctcagatggttagctacgacaaccggatggatcatcttcaaggaggcggacaaatccaatcttctgccaacgccgcctcacgcggacgtggcaacggcaacagcaacaacttccgcgatcgtggtggcggcggcaatgcaggccgtggccgtggcaatggcggacgcggtggaggtccacaaggaccacgtccggtctgtcaacggtgtggcaaaactggccatacggtgctcaagtgctggtataggtttgatcaaacctatcaccccgaagagaaggttgcagcagtagcgacgaattccgcctacggcatagataccaactggtatgtcgactgcggtgccaccgaccacatcactggggagcttgacaagctctctgttcgtgagaagtataatcgacatgagcaagtccatgcagccaacggcagaggtatgaacattagtcatatcgatcattcagtaatttcaaccccaaacaaagatttacatctgaaaaatatactttatgttccctctgcaaataagaatcttgtttcagcaaatcgcttagcctttgataacaatgcattcgttgaaatttaccccaaattctttaacatcaaggatcaagcaacgaggaagctgcttcttcaaggcagaagtaagggacggctttatcctttggctccagcacccagtgattcaagtctcaataaacatgccttgagcattgtcaagccatcttcgactaggtggcattatcgtttaggtcatccagcttttccgattgttagtcgagtcattaaaagttttcagcttccttgttctagcgagtccaataatgtagaacacatttgtgattcatgtcaacgggctaagagccatcaattgccgtaccctaaatctctaagttcatctaatgttccgtttgctcttgtattctctgatgtttggggaccggcgcccacttctgttgggcgacatgattactatgttagtttcatcgatgattttagcaaatacacatggatctatcttcttaaaaagaaatccgatgtctttcaagccttcctaaactttcaacagtatgttgaacggcagtttaataccaaaatactcaccatgcagaccgattggggtggtgagtacgagaaactaaactcctttttccagaagacaagcatagctcatcatgtttcttgccctcacacgcatcagcaaaacggctcagcagaacgtaagcatcgtgacatagttgagaaaggtcttgctcttctatcccaagcctcggttcctttgaaattctgggatgaagccttttctactgccacatatctcattaacaagttgcctagttcttgcatctcattcaaaacgcgtttgaacagcttttcttctcaagtcctgagttcagccacctgcgcgtgttcgggtgtgcctgctggccaaacctacgaccatataatcatcgcaagctttcttttagatcaatccgcaacaagagcacagatcgctggcgaaaatttgtggcaaaacggtgaagatctgacgcaaagctcacatgaaatcataccaaccgacagcgagactaatggcagcagcactgaatccgagaccaatcaaacttcaatgtcagatggctcaggtgaaccaacagatgtgcaagaagcattgggggactcacactggaaacaagcaatggatgaggagtataatgcccttgtgaggaataacacatggcatttggtgaaagcaccacaaggtaagaatgtaattgattgcaaatgggtatataaaatcaaaagaaaagcagatggttctttagacagatataaagcaagattggtagccaagggcttcagacaaaggatggtcactaagacaattagatgttcagaagcttttttgcatggtattctagaagaagaggtttatatgaacaaccaccagggtatgaaggacttgggtgagctacattattttctcggaatagaggtgaagaaagtatctgatgatatactattgaatcaagcaaagtatgccttggactttctaactaaagttggtatgaaagattgcaaatcagcttccacgccgctagctgtgacagagaagttgatggcacacaaaggaaatcctcttggtactgaggatagcactcagtacaggagtattgtaggaggactacaatacttaacactcaccaaaccggatttggcttttgctgttaataagtgcctttctgatgctgattgggctggtagtctagatgacagaaggtctactggaggttttgtaatttactttggacctaatattgtgtcatggagtgctaggaaacaaccaacagtgtttaggtctagtaccgaagcagaatataaagctatggccaatgctactgctgagttaatttgggttcagtcagttcttgaagaattgggagtaaagattgctcaaccacctgtgttatggtgtgacaatttaggagcaacatatttgtcctcaaatccagtctttcatgcacgaacaaagcacattgagattgattatcactttgtaagagaaagagtagcaaataagatgcttgatattaggtttattggatcaaaagatcaaatagccgatgggtttacaaaggctttgtctatacagagtcttagatatttcatgtacaatcttaacttgtccaagttatga

SEQ ID NO: 82647 - DNA, 255 bp, Oryza sativa
  Clone ID: PAT_MRT4530_82056C.1
ccgacgcgtgggcacgttagaacaacattctactggtagtcatatgtggccagcattagcttatgtcatgttgattttgaggggattacagtcaaagcttccattccatgccgtagaccatccgagcatatatgctattgagctgattagagtgaagcaatgtgtattctagctgaatttacgtaccaccggcagaggcatggctatacgtatgctaccaatcggtcttgtaaaaaaacacctctcatgggctat

SEQ ID NO: 82648 - DNA, 1440 bp, Oryza sativa
  Clone ID: PAT_MRT4530_82057C.1
atgacgcctccaccgccgtcgccgccgcacgagaggaaaacgtgggcggagtcggtggccagcgagtttcgggcgcagcgcggcatcgcgttccctctcatcgccatgaacctcacctggttcgccaagctggccgtcaccaccgccttcctcggccgcctcggcgacctccagctcgccgccggcaccctcggcttcagcttcgccaatgtcaccggcttcgccgtcctcaccggcctctgcgccgccatggaccccatctgcgggcaggcgcacggcgccagcaacgggaagctcctccgcaagacgctggtgatggccaccatcctgctgctgggcgcgtccatccccatcgccttcctgtggctgcacgtggacgccgtcctcctccggttcggacagcaggcggacatgagcagcaacgcacgcagctacgtggtgtgcctcctcccggacctcgccgtcacctccttcgtcaacccgctcaagtcgtacctgagcgcgcagggggtgacgctccccacgctgttcgcctccgccctggccctggcgctccacgtccccctcaccatgtggatggccaggaccaggggcatccagggcgtcgccaccgccgtgtgggtcagcgacctggccgtggccgtcatgctcgccggctacgtgctcgtctcggagcgacgacggaaggcgggagggggcggcggatgggtggagcagacgaggggtgagtgggtccggctcctccggctggccgttcccagctgcctcaacacctgcctggagtggtggtgctacgagatactggtgctcctgacgggacgcctcccggacgcccggcgcacggtggcggtgatggccgtgacgctcaacttcgactacctgctgttcgcggggatgctgtccctgtcggtgagcgcgtcggtgcgcgtgtcgaacgagctgggcgcgggggaggcgtgggcggcgaggcgcgcgggcatggtgtcgatcgtgggcggcgcggtgggcggggtgggcggcggggtggcgatggtggcggcgcggcgggcgtgggggagcatatacagctcagacgccggggtgcgggagggggtggggagggcgatggaggtgatggcggtgctggaggtggtgaacttcccgctgaacgtgtgcggggggatagtgcgagggacggcgaggccggcggtggggatgtacgccgtggtggccggcttctacgtgctggcgctgccgctcggggtcgcgctcgccttcaaggccagacttgggatccagggcctcctcctgggcttcctggtgggcgccgcggccagcttggcggtgctcctcaccttcatcgcgcgcatggattggcccgccgaggcccaaaaggcgcggactagaaccacagcaaccgtggcccaattccaccaacacgacgaggtcgtccagccttga

SEQ ID NO: 82649 - DNA, 318 bp, Oryza sativa
  Clone ID: PAT_MRT4530_82058C.1
atggcgatgaagattacctcgctcttctttttcatggcaatagagaaccccggcttggattggcgcatggagactgcgcagaagatcctggatgtgaacctgagctggaatgattgctgctgcccactgcatggctactgctgctcgctgtcgtatggttgttcgctgcatggcttgaacttccgcttgctgccgcatggctactggctgcatggcttgagctctggcccccttgggatcctgagccatctgacattgaagtttgattggtcacggatccagcaatctgtgctcctgttgcttgatcaccacaagtag

SEQ ID NO: 82650 - DNA, 8807 bp, Oryza sativa
  Clone ID: PAT_MRT4530_82059C.1
atggcgagttcctcttccacatctgcgccggctgcacttggtccaccggtgacagagaagctcaccagggacaactacgttctctggcgtgcacaagttctccctgcgcttcgcggagcgctgctcaccgactacctcgacggcacggctgtggagccggccaagacgaggaccaccgtcgacaagaacgacaaggagatcgtcaccaagaacccggactacgcaaagtggatggctcaggaccagcaggttcttgcctatctgctgaattccctgtccaaggacgttctgcaacaagtggcgactctcaacacctcggcgcaagtttggaatgccctcaccaacatgtatgcatctcaatctcgcgcacgcatcgccaacctcaggatcagccttgccaacaccaggaagggatccatgaccactgcagtctacttctccaagatgaaggggctggctgacgatcttgcgtcggctagcaagcccctggatgacgaagaactggtgtcgtacatcctcgcgggcctcgacatcgactacaatccgctggtttccaccgtggtaggtcgatctgatccaatctccttgagtgatttgtattctcagatggttagctacgacaaccagatggatcatctccaaggaggcggacaaatccaatcttctgctaacgccgcttcacgcggacgtggcaacggcaacggcaacaacttccgcggtcgtggtggcggcggcaatggaggccgtggtcgtggcaatggcggacgcggtggaggtccacaaggaccacgtccggtctgtcaactgtgtggcaaaactggccatacggtgctcaagtgctggtataggtttgatcaaacctatcagcccgaagagaaggttgcagcagcagcgacgaactccgcctacggcatagataccaactggtatgtcgactgcggtgccaacgaccacatcactggggagcttgacaagctctctgttcgtgagaagtataatggacaggagcaagtccatgcagccaacggcacaggtatgaacattagtcatattggtcattcagtaatttcaaccccaaacaaagatttacatctgaaaaatatactttatgttccatctgcaaataagaatcttgtctcggcaaatcgcttagcctttgataacaatgcattcgttgaaatttaccccaaattctttaacatcaaggatcaggcaacgaggaagctgcttcttcacggcagaagtaagggacggctttatcctttggctccagcacccggtgattcaagtctcaataaacatgccttgagcattgtcaagccatcttcgactaggtggcattatcgtttaggtcatccagcttttccgattgttagtcgagtcattaaaagttttcagcttccttgttctagcgagtccaataatgtagaacacatttgtgattcatgtcaacgggccaagagccatcaattgccgtaccctaaatctctgagttcatctaatgttccgtttgctcttgtattctctgatgtttggggaccggcgcccacttctgttgggcgacatgattattatgttagtttcatcgatgattttagcaaatacacatggatctatcttcttaaaaagaaatccgatgtctttcaagccttcctaaactttcaacagtatgtcgaacgacagtttaaaaccaaaatactcaccatgcagaccgattggggtggtgagtacgagaaattaaactcccttttccagaagataggcataactcaccatgtttcttgccctcacgcgcatcagcaaaacggctcagcagaacgtaagcatcgtgacatagttgagaaaggccttgctcttctatcccaagcctcggttcctttaaaattctgggatgaagcctttcttaccgccacatatctcattaacaggttgcctagttctgctatctcattcaaaacgccgtttgaacaacttttctctgcaactcctgagttcagccacttgcgcgtgttcgggtgtgcctgctggccaaacctacgaccatataatcatcgcaagctttcttttagatcaatccggtgtgctttccttggctatagtcctctccacaaaggatacaagtgccttgagatatccactggccgtgtctatatctcgcgtgatgttgtcttcgatgagacagtctttccgttcgcctccctgcatcccaatgccggcgcccgtctccagcgagagatctctctcttgccttctcatttgctgtccatcaccgatcaagggggagaaattactaatgatcatatgctaacatgttctactaaccctgcctgtgatgatcaagcaacaggagcagtacagatcgctggcgaaaatttggtgcaaaatggtggaaatctgaggcaaaacggtgaagatctgatgcaaagctcacatgaaatcatatcaaccggcagcgagattgatggcagcagcactgaatccgagaccaatcaaacttcaatgtcagatggctcaggtcagagctcaagccatgcagccagtagccatgcgacagcaagcagcagtccaagccatgcaacaaatagccattcgacagcaagcagcagtggccatgcagtgggcagcagcaatcattccagctcaggtttgcatgcaggatcttctgtgcagactcctccagcacaatcagtacagccagaaccagtcaggcaccgcacccggttgcaaagtggtataactaaaccaagaaaagcagatggttctttagacagatataaagcaaggttggtagccaagggcttcagacaaaggtatggtatagactatgaggatactttcagtccagtagttaaaattgcaacaattagacttgttcttggtattgctgtctctagaggatggtcactaagacaattagatgttcagaatgcctttttgcatggtattctagaagaagaggtttatatgaaacaaccaccagggtatgaaggtaaatcaaccttagtttgcaaacttgataaggccatctatggattgaaacaaccacctagagcctggtactctaggttgagtcacaagttatttgaactaggttttacttcgtcaaaggcggatacttccctgttcatttataataaaaatggaataactatgtatatgttaatttatgtggacgacattattgtcacaagttcctcaagtgatgcagtcatagccttgcttaagaacctaaggtctgattttgccttaaaggacttgggtgagctacattatttcttgggaatagaggtgaagaaagtttctgatggtatactgttgaatcaagcaaagtatgccttagacttgctaactaaagttggtatgaaagattgcaaatcagcttccacgccgctagctgtgacagagaagttgatggcacacaaaggaaatcctcttggtactgaggacagtactcggtacaggagtattgtaggaggactacaatacttaacactcaccagaccggatttggcgtttgctgttaataaggtatgtcaatatcttcatgctcctacttcagaacatttgtcggctgtaaaacgtatactcagatatatcaatggaactgttgatgttggtctgcactttaagaggtctagttctactctagtcagtgccttttctgatgctgattgggctggtagtctagatgacagaaggtctacaggaggttttgtaatttactttggacctaatattgtgtcatggagtgctaggaaacaaccaacagtatctaggtctagtaccgaagcagaatataaagctatggccaatgctactgctgagttaatttgggttcagtcagttcttgaagaattaggagtaaagattgctcaatcgcctatgttatggtgtgacaatttaggggcaacatatttgtcctcaaatccggtctttcatgcacgaacaaagcacattgagattgattatcattttaacccagtagagtcagcagacgctaggcgaaacttcttcacaattgcctacaaccagttaaaggcatgtatgcagagaataatcacttggatgcagcaggaacggttggtacataggaagataagaaacactttggtgcatgagccactaagggcacttaggcatcgaataaccgccttgattgagaaggcacttgtggcacgaactacgccaaattttgttagaattgtctacaacaaactggaggcatttattcagagaataatcgcctcgcggcagcagcccctcgaggagataaccaatgaagacacaccaccatccgatggaacagggctcatcgatgacgcttggtccattgctgaagagctcctgaagttagatgacgaggagaaaatgtggagggtgattgaaggcgtgtgggtggagatgctctgcttttcagctgccagatgtagagggtacctgcatgctaagagcctcggcacgggagggaagaagctgtcaagagcagacctccaaaacagagaattcttagctaattcatccactacccatgttggtgagccctccggcataattgagcgagttgctgagtgcgcagcccagcccaccaactatgggccaccccaggttatattgagcctgctccaccacaggcccaaccggagctacaactttagtcgtgctccctcatcatcaattaccgatgtgggattaaacacaacaatctcccccgtcacatcaaccaatgtgaccccgaagacttgttacctgagcctcgggtctaacaatctcccctgtcacatcaacccatccgccgctaccgccaccaccgagtgccgcgccgctgtcgctgttgctgccgccgctgcgtcgtcctaccgcgccgtcgtgccgctccgcatcgccctgccgcgccgctgccgcgtcaccctgtgccctagccgccagccgccgctaccgctgctcctgccgctgtgtgccatgcgccgccgctgcagccgagcgccgccgtcgctgcctagccactgcttgtcgctcggtagcagagttgcgttttcatgccccataacttcgatttcatgataggaggatggaccagcgccatcttcatcaccataggctcctctagcatgagaagtcgatgcaccaggagcttgctctttgccataggagtctccagcatgtttagtggatgaattacctgagcgtgctccgtttgggagctctgctctcgccagcttctctgccaaggtctccattcccatgtaatgcagaaggagccagacatagcttaggaactccccgcctgtgccgagactcttagcgtgcaggtagcccctgcatctggctgcagagaagcagagcatcccaacccagacatggtacatgagctcacaccgcgtctcgtcgtcgagtagcagcagctcctgcgtgagcctgcaagcttcatggacgagaggatactcattgggacctgggcccgaagtacttctcataaagatggtgtccaccatggccatgtcatcttggatggaggggcgcttgaagtgacgcccggcccgcagcttgaggatggcctcgacttgctgcatggcctcggcgaagagatgctgcctgctgccggtcaagagcatgtcggggcggaagttgagcaggtgtgccatgtagttggagatggcctccgtgatcacctcgcgagggtgggcggggaaggtgggaggctggcaggtgaagcataggtcggtggcgatgtgccagaagaggacgcttctatcgaacgacccgagcagggtgctccgtacctctgtcccttcgccgcatgcccttcgccccaggtcgtggctcagaatccagttgttcatctcagagtccaagtttctgtagctgccgaggtcgagaccttctatctgatcgcttcgcagtaaatcaaagaccagatatccggcgaccttgctgtacagcttgtcgtgcttggtgtcgaagtagccctcatagcagccaatgcgggtcgcacacttgatcagccacccagttggctgtaacctccggagagccgcgtcgatgaggttgtactgcgcgatccactcgcacaaggatggaacctttgcaacaaacatgaccaggtgtatcagcccccggaagaagaaggcggaaatgtctagcacggcggtgaagcacaagaggatgtaggtgatcttcacgtccgtggcgttgtagcggccacgcttgtggctcacggcgaacagcgtgatggaggcgacgtgcagggctggaaccagcaggagatggtaggccaagtaggcgggagtccacgtcactttggctctggtgtagatgagcccgaatgcgttttgcaaccatctcttggagaacctctccgcccctattgcccggcttagaatcgccgtgccctcctggtccacgctatccagaacgccccttctcttgagctcggatacagcagcgaacaatgacatgtccgagagtagcatgtggacacggtttcttgttgtcaggcctcgcttccgagcgctctgctcctccaagtcggtgaagcagaagcggtacgccttctcccacttgccgtcatgccgtgtcgtcccttgtaccagggacgacaccgccgccagcttttggattctggctctcttgaaggcccatggcttctcgctgaagctcaacaccccgatgacaaacatcaggatcgccgacacccatagcctcttgtcagtggagttgggccacaacttgtagaaggcgtacaccgccaccgccacctgagacaccagggtcacggcgtgccgcgtccacagctcgttgtcctcgatgttgtaggcggtcagctcccgctgcccgccaaggtggataaggaggacgggagcccacaggatctcaaggacgccggcttggccgccattggcattggtaccgccgcagctggcgccacttcttgccttggcgtgccggttgaagagggtggccaacgcgtagatggccaaggcgtcactgctaacgtaggccagccagatgcaggtcctcaacaacctcgggatggtgtacttgcgcatcggggcggccaccagcaagaaccattggaggcccaggctgcccagcaccaagatgcgcagctgccactcgtcccaccatcgcaccgcgctccacacatcgatcatcatcttcttcttcttcttcttcttcttcttcttcttcttcttcttcttcttcttcttcttcttcttcttgatgtgttccggtagcttcttctcgtctagcgtatatgtgtggttcggcttacttatcatgcacgggtttaggtaggcgacaggctttttcatcgcttcggcttccacgtaattcatcctgccacaatggatgatcaaatgagctacgcatataggtgtaatgatccccacggcaactgtgaatgaatcgatgcctttcatggtgcttgccctaatgtaccaattgtgccatcttcttagttgccacggtccttctcttagttgccagtcataaatgaatggtttgccattctcaaactcatgtggcacgtctggggaattgatatagttgagatagtcatcgaaggtctgtttgaacccttttaattttctattatcaaattcggcatttatgatatctttgtcccttcctcggaatgccgttaccatataatgtttcttggacgcactttttgctttgtgcttgtgcgtccttaccatcactggcacatcggcacgcttaggttcctctggttgcgattgctctggttgatcgggcattggatccttttctgtctgaggtgatgcaacgggaggctccagtactggaggtgatgcaacttgtggctctggtactggaggtgatgcaactggtggctctggtcctggaggtgatgcaactggtggctctggtctagagggtgaagcaataggactatccctcggactggctacgactggtggacgtgacggtgacaccggtatccttggtggacgatcagttccatccgttgaccctagttcaatatcattcttgtgccatagtatgaattggtcgacggcatctccaaggtacacaatctgctcagtagttggaaagtcgagctcgtgcatccggtaagcctcaatgaccgtccggacctctaccttggcgtagtcatccggaatgtcttggcaatgaaacctgtggcctggtatgaacctcccagttgcaacgagtattttctttcccaccctgctgaccggaatcaagagcttgcacggagtatcctccgttacatcatcgaaaggatagctcggctcaggctctaaaacagcagcaccgtgcttcattttctgactccagtatatattgcattcgtcacgagctgctgccctagcctcgtggagcttctgatccttgaatactacatccccctcaggggtgaaggccggtgttcttgcacgcacccagttcctgcttcgtgggttgtgatttttcataggaacgggtttcccagccttctccatctcttcatcttgttttgcccatttcttcaccgcttgctggtaattggtcgatcctaaatgatgtggatattcattccttcttgctagctcagccatcttctggctcttctccttttcttctgccgatgtcttaagggcaacgaactcatcccactgggcctgtgttatccttccgtagtccttaaacggcgtgagtcccttttgatggaaagctctcggagtcatctttccaatggatccagcctcatctcggaattctatctcgtttggctgtattgggccaatgggcttgtaactttgtttgggaccctggcccat

SEQ ID NO: 82651 - DNA, 513 bp, Oryza sativa
  unsure (1)..(513): unsure at all n locations
  Clone ID: PAT_MRT4530_8205C.1
ttttctttccacacgtcagcctcttatatggagacctgtcagatgaggagaaggaggttgcaaggaagatggtagaggagatagacaaggagatttgtggattgcagtttgagatctccgagcttgcgctgtataggacggataccgaggacaaaagcttggagtcatgggaattggtggagatctgccaccttgagaggaagtgattaatctcctcccgttggtgcttctgccataagttaagtttgaggtgagtttgttcaataataaagcttgcccaaatgcaaagcgatgcctaaaatttaagttttgagttattcctactgtaaaagttacatatatacatatatatcttgggttcttcccagataatatttggcttattaattatctgatgtactgataactgagttatgtcatagacangctctgatcaactcttaatgtgtatgccacattattatcacatttagagatgcactctaaatatatagtgctgcattcgagattaat

SEQ ID NO: 82652 - DNA, 1683 bp, Oryza sativa
  Clone ID: PAT_MRT4530_82060C.1
tcaggggacaagccagattggaggcgagcaatccgcggtaaatccacgagggaattgccgggagccggctctgatcttcttaccatccctgtaaatgcccatgttgtacctgctcccgttgttcatcaccatggagtcgcacatgtcgacgttggcgtcgtcgaggaagtagatggtgtcctccttgagcatcttgaactgcgacacctcgaccgccctggagcagcctcgccggaggaagagcgcccgcccggacagctcgtggatctccagccagtacgcccccgtggggaggaggctcatctcgaagacccggaacatgcgcgtgcgccgccgcacgcgggggttgcccgtgcagtggcgcaccaccatgagcagcttcccgcgggactccaccaggtagcgcgtcgcgatgaacgacgccggcaggtggttggcgcggcggcgcatctggtaggatgcgcaggtcatctccagcagcgcgttggggtcgcggccggcgcggggcgcgaacaccaggacttcctccctgttggtgaggacgtggaagccctgcttctcctcgccgctgtagtagatgatgtcctggatcacgtccggctcaggccggctcgcgatccagtgcctggacatcccaggctgccagaaggcgatgttggaggcgctcgagacgtgcgcggcggcgatgcagtccggcgaggcgggcggcgcggagaagacgatggtgcggacgagcatggggtggtggctggtgacggtcacgggcccgtacccgtgggcgtaggggacctcgagcctcagcttctccgggagggtaaccctcacgccggtgaagaggttgacggccgcgaaccctcgccacgggtccacggcgacggcgacccagccgccgtcgtgggcgccgcacaggcgcgcgccgcggacgccctccgggagggtgaggtggcgggtggcgccggagtggaggctgaagaaggacggcgcgtcgcgggacgggaggagcagccacgggagcccccgctgcggggcgtcgacgaaggccgcggcggtgcgccacgggcggcagacggccgcgaagcaggcgcggtcggcgaggcagctcagctgctcgaagatgacgccgagaagctcgggcgggaggccatcggaccacggcggccgtggcgaacgagccatgagagaccttacctttcaaatttacggattaagggagctgattggagcctggccaccgtcgccgcgcgccgccggctgacggcgaaatccggcgccgcccgtcgccgatccgattcatctgaagcttcatctgatgagtgtccccctgtcgagcttgccaccaccatcagcttcaatgtcacagttcaaactttacaaatttcagtggcacacaccgataatgcgaataagaatggcggccatgtgcttgttgctgaggatgcctttagaagaagctccgcaacaccactacgccgagctcggaaaatgctaggcggccatgtgcttgttgctgaggatgcatgccgtgagcagcgtggccttggtggtcttctgcgaggagacagtgctcccaataacgctgacaagcgggccgcacatgccgtgcgttctcgagatggcatccagaatgaggtcgagatggctgccggacgaggtgagctcgtggagcacgatggctagctgcat

SEQ ID NO: 82653 - DNA, 487 bp, Oryza sativa
  Clone ID: PAT_MRT4530_82061C.1
aagaataaagttctacgccgcggaaaaaaagcaaaaggatttatgacgtcatcgatgacatcatcgccggccatggcacggctccgacacctacgtgaagaggacgacgacgcgaactcaccggtgcaagaaactatgacggacgacgacgtacggcgaccggcgacgaggaccaacggcggcgcggctcagctcgacgacggcggcggcgttccagcggcttgcgacgacggcgaaggggcggccaaggtactcctccaccgtgcgaacccggcggcggcgacggacagcgacggcgacgacgctagcagccgcgcgacgtcactggagagtcgccggcgacggcggcggcttgagctacgcagcggcggcgctacgagcaacgcctgcctcccgccggcctccgcgccacccgcagaggacgtctagatccgcactcccctccggccgcacagccgccgacgcccctcccctccgccagatctag

SEQ ID NO: 82654 - DNA, 2256 bp, Oryza sativa
  Clone ID: PAT_MRT4530_82062C.1
atggggattgacctgaacacggtggaggaggaagcggaggagggggcggcggcggcggtgtgcggggagctgtggcacgcgtgcgcggggccaggggtggcgctgccgcggcgcggcagcgcgctcgtgtacctgccgcaggcgcacctcgccgcggacggcggcggcggcgaggtgccgcctgccggcgccgcggccgtgcccccgcacgtcgcgtgccgcgtcgtcggcgtcgagctgcgcgcggacgcggcgacggacgaggtgtacgcgcggctcgcgttggtggcggagggcgagatgttgcagcggaacttccgcgagggtggaggtgaagatggtgcaggggagatggagggttgtgatgcagaaaagaagccccggatgccacacatgttctgcaaaactctcacagcatctgatacaagcacccatggaggtttctctgttcctcgccgggctgcagaggactgtttcccacctttggtgatacacttaaaagaaaaacttgtaacttttaatgactataagacagttagaccttctcaagagctgattgccgtggacttacatggcacacaatggaagttcaggcatatttatagaggtgatgatggccaactaagattgggtgtaaggagagcagttcaacttagaaatgaggccctctttgaacctgtcaacagcagcgattcaaagctacgcattctatcttctgttgccagttccttggaaaataaaagtgttttccacatttgtttcaacccaaggagtggtgcgtcagaattcattgtaccgtattggagattattgaagagcctgaaccatccattttccattggaatgaggttcagagtttgctatgagagtgaagatgctaatgagaggtccgctggattaatttcaggcattagtgaagttgaccccataagatggcctggatcaagatggaaatgcctactggtaagatgggatgatagtacagatagcagccaccaaaacagagtttctccatgggagatcgagagagttggtggcagtgtctcggttacccattccttgtcatctgggtctaagcgaaccaaattgcactttcctcaaggcagtttggatactccatttcttaatggaaatggtcacccggactccatgggaactgaaaatttccacagggtcttgcaaggtcaagaatttaggggttctaggtcccatggtgttgtatgctctgaatcacctggtgtaccaaactttcaatctcctgacaataggagattttctgctgatatgcggggctacatgatgccagcaagtgggcccccacagcggaacacagagtttacttatcagcccataggcttcagtgagtctcttggattcccagaggtcttgcaaggtcaagaaatgtcacaagtagttcctttgttccgaggagctacttttggcgctcgtacacagaatgacagagttgtctctgctaattctgtgcatagatcagctgcacagagtggattgctagcttcaactctagggcatcccatctcgcagtttactctgtcatcgtcaaaggtatcttctccctcgtcggttctgatgtttaaccaagcgacagctccaaatcatgaaacagtaagcggaaccaacaacaaaggtatgcatgtcagccagtttgcttcccaggagatgctctcagaaactgtaacctggcccggcacacaacgtcaaacgccgagcgaaatcacgagcaaccagttcgccctggcgagaatcccagctcctccaagcggagctgaatccggattgcccaagagggatgccgggagaagcagctgcagactgtttggcttctccctgacaggcaacatgctgggagaagatggagaaggcctagatgatggagccattgaagctggttgcgaaaacccgcccgtgctggagctgtttgggcacagccattctactcccggtgctcttcatgccctgtgtgctgctgctcccctgggaatgtgatgctgctgcagtactgatggtttgctctggggaaatggtcgttgcatcaagctacctagctgaaacaaactgaataatgtgttagctacttcctagatttcttcggcacattcttgtaaggattgcagcggcgccatttgtatgttggtgccacatgatgcatgtaagactgtaactgtaccttgaaatttcggctgtttgtccgtagcttatgacatgaagactatgcagaagcagatcctcgaactt

SEQ ID NO: 82655 - DNA, 1188 bp, Oryza sativa
  Clone ID: PAT_MRT4530_82063C.1
atgtcgacggcgacccccacgcccaacgtcgtcgacggcgactgcggcggcaccccgccgtcacggtcagcctccaccatcatcgcggcacgaaccctccatgtgctcacgattcatggctactccgacaccttgaaatccaacgtcgaccctagccagcacctgctcctttcctctccgttcagcgctggaggacacacctggtgcatccgctactgcccaatcgggtgcactgaggaaagcaaggacttcatctccatctacctcgttctcgaggacaccatcaccgacgtagtatcggcacaggttacgttcagcttgctcgaccaacaggggaacccgatgccatctcacaccctcacaaccccactgcttaaattctctcttcaaggcactctacctaaggccctggggtataacagcttcatcagaagagacgacttagagcgatctggacatctcaaggacgattgctttgccattggggtccatgtggttgtcaccaaggaagcagaaccgtcatccatcaccgtgccaccatcggacatgcacctgcattatggcgatcttctctcgagtgaagaacggtacgccaccgatgttgagttcctagttggcggcgagaccttcaccgcgcatcgattggtgctcgcagcacgatcacctgtcttcatggtggagctttttgggccgatgaaggagggtactactgtaaacaagatacatatatttgatatggaggcgcaagtattcagggctttacttaagtttatctacacagacatgttgccggagatggatcaagaagatgagaccgcaatggttcaacatctacttgttgcagcggataagtatggcttgcataggctgaagatgatctgtgtagaaatattaagtaaccatattgatgcctactccgtggcaaccatcttggtgctagctgagaagcactattgctatggtctcaaggaggcatgctttgagttccttaactcctcagcaatattgtccgcgattgtaaatacaagtgactttctgtatttgatccaaagctgccctgatgttttggaggacataagtttcaacatcgttgctcgtcaattggagagagcaattttcctatcagaaaaccaagaaggccaaatcaacagcgtagaaatcagaattaattcggtcatgacaaattga

SEQ ID NO: 82656 - DNA, 117 bp, Oryza sativa
  unsure (1)..(117): unsure at all n locations
  Clone ID: PAT_MRT4530_82064C.1
atggggacaaaatttgnttgccgtcaccgaccgttcaacaccgaagcgcgaggagcacagagccccgagcgcttaaagccgcgcatacccaactggacggttctcgcccttggacaa

SEQ ID NO: 82657 - DNA, 116 bp, Oryza sativa
  Clone ID: PAT_MRT4530_82065C.1
gttacgtttgaaagggatcaagcaaaacatcaggagtaaatcaatggatatgaggcatcgagctaagtaaaggaatgagagacggtaacgcattcatgtaggcaacaagtgtattt

SEQ ID NO: 82658 - DNA, 384 bp, Oryza sativa
  Clone ID: PAT_MRT4530_82066C.1
ttgggtaccgacttttcgatatattattcgagatatacttgtctagctagcttactcaggagatgcaattatgtgggtataatgttcatttatatgtttgcttatttcatgaggatgatagtagagtagtatttggtagcataagcgaggtgcttaggctattgaatattattatttggggttatatgctgcagaacagtagaggtgggccgctgatggtgatagctcagtatgggtattcctccatgttagtatataatcctaagttactttcctgtggagggtactcctccatattttgccccatttggatggcaatgaagggttgtcgtaaggaactcggcaaccaggggtggtctctcgaaacgccaggagggcatcgta

SEQ ID NO: 82659 - DNA, 1674 bp, Oryza sativa
  Clone ID: PAT_MRT4530_82067C.1
atggagaggcagacgagcttccgattgggcgcgctggagaagctcaagagcttcagggggatggagaagcagaagagcttcaagatgatgtccacggacaacttccggaggcacagggacagccccgggaagcgcggcgacacgccgctccacctcgccgcgaggtccgggaacgccgccggcgcgcagcggatcatcgccgagttcgacccggaggtggcggcggagcgcgccgcgcaggccaaccacgacggcgagacgccgctgtacgtcgccgccgagagggggcacaccgacgtggtgcgcgagatcctcaaggtctccgacgtgcagacggccggcgtcaaggcgaacaacagcttcgacgcgttccatattgcggcgaagcaaggccatctagaagttctgaaggagctgttgcaggcttttcctgctcttgcaatgactacaaattctgtaaatgctacagctttggatactgctgcaattctgggtcacactgaaattgttaacctcctactggaatctgatgcaaaccttgcgagaattgcaagaaataatgggaagacagttctgcattcagctgcaagactgggccatgtggaaattgtaagatcattattaagtagggatccaggaattggtttaagaactgacaagaaggggcaaacagcactacatatggcttcaaaaggacaaaatgctgaaattgttatcgagctgttgaagcctgatatctcagtaattcatctggaagacaacaagggaaacagaccattgcatgttgcaacacggaaggccaatatcgttatagtgcagactctactatcagttgagggaattgaagtaaatgcagttaacagatcagggcacaccgctcttgccattgctgagcaactcaacaatgaagaacttgttaacatcttgagagaggctggtggagtaactgcaaaagagcaagtacatccacccaatccggcaaagcaacttaagcaaacagttagtgatatcagacatgatgtccagtcccagatcaagcaaactaaacagaccaagatgcaagtccagaaaatcaagaagagactcgaaaaactccacattggtggtctaaacaatgccatcaactccaatactgtggttgcagtgcttattgccaccgtcgcctttgctgccattttcaccgttcctggcaattttgtggaagatatcactcaggcacctccaggcatgtccttggggcaggcatatgtagcaagcaacccggccttcctagtatttttggtctttgatgccttggctctcttcatctcacttgctgtcgtcgtcgtccagacctcgctaattgttgttgagcagaaagccaagagaaggatggtctttgtgatgaacaagctgatgtggctggcatgcctctttatctcggtggccttcatagcactaacctatgttgttgtcgggcgcgacgactggtggctagcttggtgcacaatggcaatcggtgcagtgatcatgcttacaactcttggttccatgtgctactgtatcattgctcataggatggatgagaggaagatcaggaaggcgtctacaagccaatctcgctcatggtctcaaacagttgactcagatccagatctactcaacagtgaatataagaaaatgtatgcactatag

SEQ ID NO: 82660 - DNA, 507 bp, Oryza sativa
  Clone ID: PAT_MRT4530_82068C.1
atggcagccgggcttgagtggttttggtggcggcgaccagtggtgctggcggcagcgacggtggctgctagcagcggcgggcgcgaagccggctggagctgcgctggcatgcagggagatgggacacggccggcgcacgggaggaggatgcggtggactggcgtgtcgacgacggcgatagccagagaggaggcgaggaaggaggtgaccggcaatggggaagaaggagagcgacggccgcatgcgggcatggtgggttgtgggcgacagcgacggcgtgagcagtttgatggctgcggagcaaggccggaggctgacacggcgcgaggaggcgcggacgatggcgatggaggccgacacggcgcgaggagatgccaccggtggcaacggaggccggcgcagcacgtcgaggcgcggtcggcaggtggtggaggctggcgcggcacgcaaaggctaaccggtggggagagccggtgcagtgaagcccacgcgcctgtggaggcttga

SEQ ID NO: 82661 - DNA, 588 bp, Oryza sativa
  Clone ID: PAT_MRT4530_82069C.1
atgccatcgaagagcatcaagaaagaaggagagaagaagaagaagaaggcgatgagcaaagaagggatcaatgcaaagagaactcacttgacctcaggtggtgcctcctctgcaaggctctcctgctcctcgtcacctccaggcaatgcacccctcctcctcctcccgcaccaagtaccaggaggaggaggagcagagcgcaagccccccacgccatcactgaccttcacctcacctcacctcactgagaccagagagagagagagagagatggaaagaagaagaagaggaagaccgagtgaagtgtgtgagagagattcttgggtggtggtgggggtggggtttcttgcgggcgcatgggaacaaaggcgcaggagctggcttggctggcggctggaggacgcgaggggtgggtgggccccgcggcgcggtggtggtggtcgctgcggcctgggtggggtgagagccgagaggaaggaagcggaggaattattgagtagtagcggggggacttcacatgcatgtcctcttgctcggcagccgcagcagcggcagacgcgcgcgcgctcgtcgtcgtcgccgagctga

SEQ ID NO: 82662 - DNA, 491 bp, Oryza sativa
  Clone ID: PAT_MRT4530_8206C.1
cgattgtagaaaataaaacagccgacattattcatgaaacacgcaaattgaacataggaagaaaaggagctggctcaactacacaaggagaagctccacaaagatttactcaaaggaatcttccacaaaatccacttgactacgaaactcaattgaaggcatctcgcgacgtaaggtggccaatatgtgtcactagatatgttgcttagtgctacattttgcatcttggaatccacgtggtttccaaatttaatctggtggcatttttgataaacatcatttttacctgatagctgttcaagttttttttttgtgttgagcgtgatatctgtgtgattatattctttgcaaagtatttttcattaaacatagcctttcagtgcttatttcatcctgccctttattttttctctggttgacgaacagtggcatcagtttagtaatcttttgtctctcatcggcctttctgttggagtggattagtgacccat

SEQ ID NO: 82663 - DNA, 215 bp, Oryza sativa
  Clone ID: PAT_MRT4530_82070C.1
ctaaaattacaccaaacggcggggtttaataataaaccaaaacaccccactacaattatattcttaaactcagccccataaacacatctctaaatccaacacccagttcacagaaacccaatcttattaaacacacattcccacacacacacatcacgcaaaacacaccaacaccactgataccaatgcagtgacaccattcacccattggtaaa

SEQ ID NO: 82664 - DNA, 1365 bp, Oryza sativa
  Clone ID: PAT_MRT4530_82071C.1
atggcgccaccgtgcggccgcgtggtcctcttcccgatgccgtacccgggccacaccatccccatgttccacctcgccgccgtgctccgctcccgtggcttctccatcaccgtcctccacaccgagctcagagcgccggacccggcggcgcatccgccggagtaccgcttcgtggccgtggccgacggcaccccgcccgagctcgtggtgtccgaggacgccgcggcggtcctgacttcgctcaacgagacctgcgccgcgccgttcgcggaccggctggccgcgctgctcgccgaggagggcggcgtcctgtgcgtaatcgccgacgtgatgtggtacgcgccggcggcggcggcgccagagctcggcgtgcccctgatcctgctgatgacaagcagcgcgtcgagcttccggacgttcatggagtaccctcttctgcttgaaaggggcttcttgcctgtcgacgatgcccaaaaggacactctagtcgacattctcccccctttccgagtgaaggatctacagcgcattgacacgacaaacctctacagcttcgccaacgtgcttgccaatgtagtcgccgcagcgcggctgtcatcagggctcatactcaacaccttcgacttcatcgagggtgacaacatttgcaggatccgcgacgagctctccatccctgtgtttgccattggtccactcaacaaactcataccactcgtcggaagaagcagctttcttcccccagattgtgattgcctgaggtggcttgacacacaagcccctagctctgtgttgttcgtgagcttcggcaccatggccaccattgatgctcaggagtttctggaggtggcatggggcttggctggcaccaagctaccatttctatgggtggttcggccaagccttgtccgtgggttacggctgcattccagtgagctccctagtgatttgcaggaagagatcaatggtcgaggcaggatagtctcttgggcaccgcaagaaaaggtactaggtcacccttctgtccgcgcattcatgacgcataatggatggaactcgacgatagagagtatatctgaaggcgtgccgatgatatgtaggccatgttttggagatcagatgggaaatgcgaggtatgtttgtgctgtttggaggttgggtgtggagatggaggtagggagtgttctgcagagggcaaaagttcaaactgctgttgagaaattagtgaatggggaggaaggtcaaaatgtgaaacagagaatgagaaatctgaggatagaagctgaaaaatgtgttagtaaaggaggatcatcagacaccggtctacgtaacttagtagattcgatattatcttttggaaaatgttga

SEQ ID NO: 82665 - DNA, 749 bp, Oryza sativa
  Clone ID: PAT_MRT4530_82072C.1
ttgcaggcttcccagtattagccaagatgaaattggacctcagtgaagctgtgggttatgcacttactgcaccaacagggcagatggatctttcactatgggagcgattttatttgcatggtatcgaatcactgcagactttgtatgaattggactactggccgccccaagacaaggatgtgcaccaccggagcctgacattgccagccgtgggattgatccaacgctgcgttggactcaggaagcttttcatccatggcaccacacatgagcacttcatgaccttcttcctttcaattccaaacttgcgggacatgcagttgcgggaggactattatccagccccagagaatgatctgatgttcacagagatgcgggctgaatcttggcttaggtttgaggtgcaactgaacagccggcaaattgatgattagttatgtgggcacaaaatggtttgaagctgaatacagagatttatctggatggtgccattgctccactgtgcaatggcaggggattcctggtgagttggttatgattatgggtggagtcgtgtgtattgctcagtgccattgaggagagtagtatactggcagcacttggatctgtcagcaaagtaaccttctccagttgcttttttaccccctttttgatgtaataagagagttgggtcggaaatgagatatttgcaggagataagattataaactaggcttcatggaaaattttccaagaaaaaaaaaaaaaaa

SEQ ID NO: 82666 - DNA, 251 bp, Oryza sativa
  Clone ID: PAT_MRT4530_82073C.1
caccaccaccgtttcccctcccaccagatctggcaaagaggagggcaccgccgcagtcactaggccgtcaccgcctcccctccaatcggatggagcggaggggagggcgtgccacggggccgctgccacctctgcttccgccagatctggtggaggggagggcgctgccgcctaccctcccaccgccaggccaccgctgcctccgcctggtggtgtggtggagagagagagggggcgagagagagagctga

SEQ ID NO: 82667 - DNA, 296 bp, Oryza sativa
  Clone ID: PAT_MRT4530_82074C.1
atgacctatgaggtggcggaccagcggtgggcaatggataaggcggggtcagcagcaggcaaaggggaggtggcggtggaggaagaggggcaattcaccagaaggaggaagaaagggctcgcaggagagttgtcatcgtcgccatcgcttgctccgctccgcttgcgtgcactaaggcggcaaggtcagaggctaacagggacctccaggcagctggatccggtgacccccaacctccatgctgctagatccgctgccctagtcactagggagaagaggaggtcaccagtggtcca

SEQ ID NO: 82668 - DNA, 701 bp, Oryza sativa
  unsure (1)..(701): unsure at all n locations
  Clone ID: PAT_MRT4530_82075C.1
ccggccggggaaaaaaaaaaaaaaattccccacctcactagccaaagttgtccagccaggacggctggccatctggtgtaggtcccacccctctctctctctccccctttccctatcccatcccggctaccttcttgcccgccgcctattccgcccagtgccaccgccgtcgtcctcccggcgccgccgctgccgtcttcccggtgccgtcgttctcccggcaccacccccgccgtcgtccttccggctccgccgcacttcgtcttcccctcgaccattcgggatctggagcggggcggcgacggcaacggcgacgacgacgacgagccggccctgccgtcgccatccgcgcactccgcgccgccgacctcgaggtgatggcggtgggctggggtcgggggaaggggaggtagccgccgcccgcgcctacgagggacgccgccgcgactccgatgagaccgctgccgcgcctacaagggacgccgccgcgactccgacgagaggctgccgcccgcgcctacgagggacgccgccgcgactacgccgaggccgccgcccgcacctgcgacgccgccacgactccgcggaggccgccgcccgcgcgtacgtcgccgccatgactccgccgcccgcgcctacgagggacgccaccgcgactccgccgaggccgccgnccgcgcctacgacgccgccacgacttc

SEQ ID NO: 82669 - DNA, 2184 bp, Oryza sativa
  Clone ID: PAT_MRT4530_82076C.1
atggagatcgctgagaaatctagacaaaaggaattggaatctgctcaagaaaaaaacaccatgggaaatcctacaatctcaacaaccaaggatttctcatcagaaaagcagatcgcaaaatccattcagatggaagagagcacaaaccctagagcaaacttgtcttctgcaggtaccaattctacagaaatagcttatgggggacagatgttacatgaagagtacgcgttgctaagcttgcaaacagagctgggacaacaaatgagctacacagcactgatgcagcaagttattcaaagtcaaagtcctaagataaacttgcataccaatcagggaaggcttgctgaaatgaactatcaccttcaatcaccaataggatacagtaactcaatgattctcacaacaaacagatgcattgataactttgatcaagcagttcttgaagcagaacaagaagtgcaggtacaaattactagcacagagaattcagcacttgagcaagtaaatggtgcagtgcaagctagcatagcttctacagaagataatgcagaaataacagacaaagaaaataaagaaagtgcagcagatgaagaggaagctgacaatgatgagatagatagccgtcatataccttgtgaagggatgcaattcaagactgatgatgaagcatacacattcttcaacttctatgcttatttaattggattctccattgtgattgcccacagcctgaagaccagtgacaagaaaaggaacaatgaagtcatcaaatacacatacaaatgcaacaggcatggaaaaaatcaggacaatgcaaccaaccaagttcagaaaaagaaagggacaagaaatacaaatgttctagtgagaactgattgcaaatgtgtgatggttgttagagaaaataatggcatatggagtgttataagactagatctcagtcacaaccacaatctttgccccccagaagagagaaaattcctctactcacacaaagacatgacacaggaagagaagagcttaattctaacactaaaagaatgtaacataccaacaagaagcatggtggtgatactggcatcactccgtggagggttatcatcgctgccatatacaaagaaagacatcagcaacgtcgcttcatcaagtaattcagaaacaaagaacaaggacatgagtcaagtcttgcggtatttaaggaaaaaagaagcagaagatccaggttttggacagatggcagatgtagggatttatatgagcagtttggagattttggaaaaaactagcaccacattcacaatcacaagcaaaacagatgaaacaaagaagcagctatacaaagattttgatgatattgtgcacaattgtctgactgagcaagagtttgaaactctttggccacaaatgattgagaaatataacctacagaatgtgaaatatttacagctaatgtttaaagcaagggcaacatatatccctgtatacttcaagaatgattggttcccatttatccatagcacaactctaagcgaaggaacaaatgcaagaagaaggcaagacatatttggtgtttgctgcaacaaaccaaacaagacaagaatggaggccgagaaaaagattccagacaaatacatcattgataggtggaggaaaagagagaaaaaaatagccacaaatgttgaaagatttacatacaatggggataatttagctttaaggtacaacatactatcaaaaaaaggtgcacttatatcatcaaaagcatgtaagaaagtggagacttataattacctgctggaagaaatggataggttggataaacatattgattccatgcttgcacaagaggaacagatcacaacattggtagatattgcagaagattcaatgattgcagaagatgaaacaatcacagaaccaaatgaagaggaacaattgcaggaaaaagaaacaaatgaggaagaggaaattcaagacccagatcaagctaatacaaaaggaaggaaatcaataaggcgcaaaagaatagtagagcagatgatagacaataacaataagaaaaagaaaagaagcaaaggagagaagaaccatgcaaaaaaccaacagagatcaaacagggcagcagggcaaaagcaacaaaagaacagagagttggagagcagtaacaaaacaaagaagaaatag

SEQ ID NO: 82670 - DNA, 438 bp, Oryza sativa
  Clone ID: PAT_MRT4530_82077C.1
atgaggccctacgcccaagtcaacatcacgaccttcggcgagctcgtgagcctcctcgtggcggaggccgaggatgaggcgcgcgcctcacccacccccgcgcgccgtcgtccaccgctcgtcgctgcgcgccccgctgcagcctctcgcccgcccgctgcgctcgccgcatccgccctagcacgtcgccatccacaactaatcgttgcgtgccccgccgcagcctcctgcccccaggcttgctctgcctccacctccaccgccggccacccgagctaccgccgaccacctggaggtcaagtggcgccacggtcaacggcgaggaggttggggatagggaagccactgtcggtcacccgagctcgctccgtctctgtcctcggccccgcgcttctcccccacccctgtctccagcacggcgatgtcctccgtcgatga

SEQ ID NO: 82671 - DNA, 5141 bp, Oryza sativa
  Clone ID: PAT_MRT4530_82078C.1
gggacgcagcaaaagatagttttttttttttttttcaaggaattaacaatacagagtaaaaaacgctatcatggcaaatgcttaacagtctctacaacactatgtacatctgaagataggacaggtggacaaccagggtccacggttgtttaattttcaccgagcaacaattgttgctttgaaacgacatcctaccatttctgttacaaccttttcacccccggataaacttaagactacaagcctaacaaccatacaacagttcaaaagatgaaaccccactaaaaactgggaataaaaataaacgaatcttcaaggcaaccccaaccatactattagacaggctgtggatcatgatgcttgactaggagctgtactgatggatagtgatgaagcgattctggaaattctacatctgcataatctatagcagggatggccattgacaaatcctctgtagagaacggtatacttaaatcatcatctaataaaaaggaatttgatacgagattctgagtatatttgtttacttcctccctcattgcagaaacaacctcattcgatattccttgggtattgtatttgtcgtcccagtacattgagcatatcctgtatatttggcgtacactcaagttcgggcaaagatcttgcctaatctcctcaagcgtcttcttccttttttgatgtatgaccaaaaaaccaacagcttgtctgatataatttagctcatgcctagatgttcctgcaaactcatccgtggcatcagtaatccatttctccagcaatgacagaccggctttgacatattccccattggagaaagtacagcattcgcgccgaagaagaaggctgttaaaaagctgtatattgataaaagagaatagctgagtgataagtttacgtataaagaatgatggcacataattttcatgcaaagtgtccataagcaggtcaagaaatttgacaatattgtcccaatgggagtttgatggtggttgagcaccaatcccaggtgatttggttgcttttccaggctgtgcacgtgatgattttggagcctgaatgcagacactaagaagtggtgatatttcctttttcagattatccctaagttgcccaaaaatcttttcaacacatgcagttagttgctgtttgaataatatggctggataccgagcatccacttgtccaagagtatcactgcgtcccataagctttgaaggagatctgagtgtttgcactatcttgtcaccaatccctagaggtccaccagacctgcgggatggtgtagcaaataatccatttgaccgtaaattcttctgcagaaggcatagcaatgaagaggtattggacaaccaataaggtaatctaccgtcagcctcttcccccttgagaacattatttatggcttcaatgacatgatcaaaaatagcagtcctctcagattcaaaagcacgccagtgtaaaaggcaactgtagataatgcatgcggtgactggtttaccatccttgaatcctagattttcctttatgcatcgtaataagatttcatgattttcctcctgcctttcaacaggcatcctggttctccttgatctagttaaactctgtggaagtgaagcgagatattttgctggtggtggtgtttcatatccgtgcttctgctcgccatttggaagcccaatcggtgtagcgaatttctgaggaaaagcctttgtagtcatgggcatattgttcaacggagacatgtttaatgccttttgcctaagaacatgattttcattttccatgtttgtaagtttttcctgcaatttgtccaaattttgctggagatggttgcattttccctctacgtctttcaatttcttcatcgtagcatcactacctttacgagctgaggtgagttcatattccagtgacgaattcctctttgataatgactcaactaagttcttcagattggagttctccttttctgcttctgctgtcataatcttgctaccccgcaacatagttatctctctcaacgaatcatccaattgcctctggagtagccgatttttgtcatgttcactttgagcatctgacttggctgcagcacattcggcacttaatgattctatcattttgtcgcgctttaatatttctactgactttgcttcctcaccagcagcacgcagtcgcctttctagagttagtctcagagtaaggtcatccaactttttctcaagtttattcttcgcctcacgcagtgcacctgcttcgtttgcagccattttgagtctccttagttctcttcttgcaagtttctgtctccaagcacactgaattttcacagtggcttgcctgtattgttggaaaagaattataaccttccgttttctccacaatgactgtatcaccaaagcagctttctgctctctgataactgagaaataacggcgagcgataaatcctcgaatacaggactgaataagaagagctgctgaatgagcttgctggtaagtccgatgaagccgccatctccggacatacttctgaacaattatagcagccgccgtttctcttttcaccatatacttcttccttgccaaacagcctctgcaatatgcttgtatagaaattgaagcctcccttgttttcacaaactctttgcgtgtaatgaatgttctgaaacgaccttgaatgtggcgtgcagcgttctccaaaacttcagcacgacgcatatctaatattgcgatttgaccagctctaaggaaaaccttagtgctaccaagttgaaaattatcaagcttcatcttttcaagaattccctttgtcaatgccctctcatcataacttccaagcatcaactcgggaaccagaacaccaaaccggtcaacaaattcagcataagtccttctggtaggatagccagcaagactgatgcgaacagcctctaaaacacctccgcagcgtagttgatgcaggacactctgattttcaaaaatctgaggctgattaacagagttaggcttcacgcagcgtacgtagtgaggctctgtcgagttgagggtttccatgagggcttgaagttgttgcttaaatcttgaagcaactgatgagaacttgtacgacgatctcaaagattcttctggtaatgtaccaaaaagtccagaaactaaagggcatcttgacgaagataaaagattgcagtgctctgcaacaatataatctctattcttctccaaaaatgattctgtttgatacgtcaccttcccagcataatgggagatagtaaaatctgtctccgagaattttgtcttctcaagcctatgatgcgaagagaaattcctgaacatctttgttgcaaaggtctcatgagtagattttgggaacatgcaagcttcatccagcagtgcaataattccaatcggtttctcattgaaatgttgctgaagcttttcattggcgaagttgatgcagaattgctcaaaactgttatttttgaagctctcaaaaccataaatatccaagataccaatttgtactttggaatcaacatcttgaccaatagatttgttaatattctcaacaagccagtcaaatagtcttgcatatacagtctttgctagagcatcacgattagctgctgctgcagaacagtctaatgcttttataattgctccttcgagagtgttaatggcgcgtgtacatagagttgagaccaacagatctggatcacacatgaatagtttggctgccatttgaaggtgaaaatttgatgttggatccttaatttttgaagaatcaatttcctttccaggagaaaactcaatgttgccaagatgaagaatggctgccagtatccgaaatatagcatcctgatcatttctgctaattccgacaatatccattgccctttttgtcttccagtactcgtcttcattatttgttccttccaattcatatgtcttacttttattcaagtaatggaaactccctgggtgaccaagcttgtacagttctgcatcctttccagacgcacataactgataaaagcaatgaaaatttctttcaggatcattaatctgcacaacacgggacctttccaaaagataggtcctaatagcagccccagatattctaccatttgcatcaaattgcatctccacaaatttgccaaaccggcttgagttgtcatttctaactgtttttgcattgccaaatgcctccagaagagggttagattcaagaacctgctgttcaacagttcgatcgtcaatagcagctctaccaccaacatacgtaagatattgcatgataaactttgttgtctcagtcttgccagcgccactttcaccactaaccaggattgactggctccgggaatcattcaccatagccctgtatgatgcatcagctactgcaaaaacatgtggactcaactcccctagtcggacacccttgtattgctccatcatgtactcattgtacaggtgaggaagcctcgtgaatggattaacagcaatcaagatgcttccagtgtatgtatatatctcattcaatgcatatcttctcttcaaattgtatagaacacctggttcattaagataagtcagtttggtcatgtcatcgacatgccccccacctagatcttcatctgtgtccctgggcagacacttctctgccaaaactgtaatctgcctttttgcaatagggaatacccacctgtaagacctcatcttccatcttcccccctctctctctctctcatcatcttccacgcggtctttgttcccaacggcgcgcggccacggctccgcggagtagacgacccccgtcgtgcccgccgccttccagtaccccgacggcgtggtctggctcggtcgcccgccccgcacctcccgctcctgccgcgggcagaagtagaaccatccgctccccctcctcgccgcgggcaaaagtaggtacacgcgtgtgctggtacctgagagctgcaacgggtcgacggagtagatgtcgaagacggggatgacgcgctcgatgtcgtcgcggaaaccgtcgagcttgttgcggaggtataagcatatcagctcctcctccgtcgggtagaagcggaacacgggagccagccgccgcctccacctccgtctccgcat

SEQ ID NO: 82672 - DNA, 333 bp, Oryza sativa
  Clone ID: PAT_MRT4530_82079C.1
atgcagtggaagtaagtgctaagtagccgaagaaacgccggggacgtagcgtgcgtcggtgtagaggaagtagtcgatcgcaacagctcgacgttctcctccttgtgcgttctattcgccgtgctctcacaccgatcagcatcgccaaccatcggcacctctaccggatccatgactcgggtctccaaggcccataggactcctattcagatccctatccgaagttcatttacactcggctgcaacccgaaaaccatttttcggtccacgtgtcaacagcggcccctagcagaatgtattgacccactgggcatacatgaagatcatatcgat

SEQ ID NO: 82673 - DNA, 347 bp, Oryza sativa
  Clone ID: PAT_MRT4530_8207C.1
gaaatcaatcacctcatgtatggcaaatgcaaggatttttgaggagaaatcaaggttttgaagctggagccaacacatcaaacattgacccatggtccatcattggagatgaatcctctgttcacgtgacaactgatcgctcatcctgtttcagtcaaaatcctgttgctgtaaggatagaggttgtctgtgacgattgtccagccggtggtgttggaatttacaatccaggattttggggcatgaatgtagaagaaggaaaggcatataatctggtcatgcatatcagatcattagaatcggtggagttgacagcttcactcacatgctcaaatggatcgcaaaat

SEQ ID NO: 82674 - DNA, 4822 bp, Oryza sativa
  Clone ID: PAT_MRT4530_82080C.1
gacgcagcagaagatagttatttttccatggcaaatgcttaacagtctctacaacactatgtacatctgatgatctgaacataggacaggtggacacccagggtccacggtggtttaattttcacctagaaacaattgttgctttgaaatgacatcctaccatttctgttacaaccttttcacccccggataaacttaagactacaagcctaacaaccatacaacagttcaaaagataacgccactaaaacctgggaataaaaataaacgaatcttcaaggcaaccccaaccatactattagacaggctgtggatcatgatgcttgagtaggagctgtactgatgcatagtgatgaagagattctggaagttctatatctacataatctattgcagggatggcaattgacaaatcctctgtagaaaacggtatacataagtcatcatctaataaaaaggaatttgatacgagattctgagtatctttgtttacttcctccctcattgcagaaacaacctcattcgatattccttgggtattgtatttgtcgtcccagtacattgagcatatcctgtatatttggcgtacactcaagttcgggcaaagatcttgcctaatctcctcaagcgtcttcttccttttttgatgtatgaccaaaaaaccaacagcttgtctgatataatttagctcatgccaagatgttcctgcaaactcatccgtggcatcagaaatccatttctccagcaatgacagcccggctttgacatattccccattggagaaagtacagcattcgcgccgaagaagaaggctgttaaaaagctgtatatttataaaagagaatagctgagtgataagtttacgtataaagaatgatggcacataatttgcatgcaacgtggacataagcaagtccagaaaattgacaatattgtcccaatgggagtttgatggtggttgggcaccaaccccaggtggtttggatgcttttccaggctgtgcacgtgatgattttggagcctgaatgcagacactaagaagtggtgatatttcctttttcagattatccctgagttgcccaaaaatcttttcaacacatgcagttagttgctgtttgaataatatggctggataccgagcatccacttgtccaagagtatcaatgcgtcccataagcttcgaaggagatctgagtgtttgcactatcttgtcacctatccctagaggtccaccagaccggccggatggtgtagcaaataatccatttgaccgtaaattcttctgcagaaggcatagcaatgcagaggtattggacaaccaataaggtaatctaccgtcagcctcttcccccttgagaacattatttatggcttcaatgacatgatcaaaaatagcagtcctctcagattcaaaagcacgccagtgtaaaaggcaactgtagatgatgcatgcggcgactggtttaccatccttgaatcctagattttcctttatgcatcgtaataagatttcatgattttcctcctgcctttcaacaggcatcctggttctccttgatccagttaaactctgtggaagtgaagcgagatattttgctgctggtggtgtttcatatccgtgcttctgctcgccgtttggaagcccaatcggtgtagcgaatttctgaggaaaagcctttgtagccatggacatattgttcaacggagacatgtttaatgccttttgcctaagaacatgattttcattttccaagtttgtaagtttctcctgcaatttgtccaaattttgctggagatggttgcattttccctcaacatctttcaatttcttcatcgtatcatcactacctttacgagctgaggtgagttcatattccagtgacgaattcctctttgataatgactcaactaagttcttcagattggagttctccttttctgcttctgctgtcataatcttgctaccctgcaacatagttatctctctcaacgaatcatccaattgcctctggagtagccgatttttgtcatgttcactttgagcatctgacttggctgcagcacattcggcacttaatgattctatcattttgtcgcgctttaatatttctactgactttgcttcctcaccagcagcacgcagtcgcctttctagagttagtctcagagtaaggtcatccaactttttctcaagtttattcttcgcctcacgcagtgcacctgcttcgtttgcagccattttgagtctccttagttctcttcttgcaagtttctgtctccaagcacactgaattttcacagtggcttgcctgtattgttggaaaagaattataaccttccgttttctccacaatgactgtatcaccaaagcagctttctgctctctgataactgagaaataacggcgagcgataaatcctcgaatacaggactgaataagaagagctgctgaatgagcttgctggtaagtccgatgaagccgccatctccggacatacttctgaacaattatagcagccgccgtttctcttttcaccatatacatcttccttgccaaacagcctctgcaatatgcttgtatagaaattgaagcctcccttgttttaacaaactctttgcgtgtaatgaatgttctgaaacgaccttgaatgtggcgtgcagcattctccaaaacttcagcacgacgcatatctaatattgcgatttgaccagctctaaggaaaaccttagtgctaccaagttgaaaattttcaagcttcatcttttcaagaattccctttgtcaatgccctctcatcataacttccaagcatcaactcgggaactagaacgccaaaccggtcaacaaattcagcgtaagttcttctggtaggatagccagcaagactgatgcgaacagcctctaaaacaccatgaaaatcccttgcaaaggtgggatagtggagagagatttttctttttgttcctttccttacatctgccacactattcatcactaccttaaatctggaagcaactgatgagaacttgtatgacgatctcaaagattcttctggtaatgaaccaaaaagtccagaaactaaagggcatcttgatgaagataaaagattgcagtgctctgcaacaatataatctcgattcttctccagaaacgattctgtttgatacgtcaccttcccagcataatgggagataacaaaatctgtctctgagaattttgtcttctcaagcctatgatgagaagagaaatttctgaacatctttgttgcgaaggtctcatgagtagattttgggaacatacaagcttcatccagcagtgcaataattccaatcggtttcttttcgatcaaatccaaaacatcttgattatcaataaattcaatgtagctccaatcgattttttcgcttttgtactcctcctgctccatcttgaatacatgctcattgaaatgttgctgaagcttttcattggcgaagttgatgcagaactgctcaaaactgttgtttttaaagctctcaaaaccataaatatccaagacaccaatttgtactttggaatcaacatcttgaccaatagatttgttaatattctcgacaagccagtcaaatagtcttgcatatacagtctttgctagagcatcacgattagctgctgctgcagaacagtccaatgcttttataattgctccttcgagagtgttaatggagcgggtacatagagttgagatcaacagatctggatcacacatgaatagtttggctgccattcgaaggtgaaaatttgatgttggatccttaatttttgaagaatcaatttcctttccaggagaaaactcaatgttgccaagatgaagaatggctgccagtatccgaaatatagcatcctgatcatttctgctaattccgacaatatccattgcccttttcgtcttccagtactcgtcttcattatttgttccttccaattcatatgtcttacttttattcaagtaatggaaactccttgggtgaccaagcttgtacagttctgcatcctttccagacgcacataactgataaaagcaatgaaaatttctttcaggatcattaatctgcacaacacgggacctttccaaaagataggtcctaatagcagctccagatattctaccatttgcatcaaattgtatctcaacaaatttgccaaaccggcttgagttgtcatttctaactgtttttgcattgccaaatgcctccagaagagggttagattcaagaacctgctgttcaacagttcgatcgtcaatggcagctctaccaccaacgtacgtaagatactgcatgataagcttcgttgtctcagtcttgccagcaccactttcaccactaaccaggattgactggctccgggaatcattcaccatagccctgtatgatgcatcagccactgcaaaaacatgtggactcaactcccctagccggacacccttgtattgctccatcatgtactcattgtacaggtgaggaagcctcgtgaatggattaacagcaatcaagatgcttccagtgtatgtatatatctcattcaatgcatatcttctcttcaaattgtatagaacacctggttcattaagataagttagtttggtcatgtcatcgacatgccccccacctagatcttcatctgtgtccctaggcagcaacttctctgccaaaactgtaatcttcttccgctggcttgtgagcacgaagacggcccggtccttcacctccaccacctccgcctccacccacccctcccctttctcctccacccacaccttcaaccccttccggtagctcat

SEQ ID NO: 82675 - DNA, 363 bp, Oryza sativa
  Clone ID: PAT_MRT4530_82081C.1
atggcaaggacacatgaccgtgcaccagtgatcccgggcttcgatatgtgctggcaaatcccggtcattgacctctcgtggaccacctcggcggatttggtccacgagagctggcctcccttcctcgctgaccgtgaggcccgcctgttgacgccaggtgtctttgttccgcggccggcggcggcccaccttcagcagatgcagcagctcgcacgcccttgtggtccggtcgcggccgcgcgcggcgcaagggcggcgtccggagaccacccgatccgcagcttcaccgcccaaaaccgatgctccgcccgcctccacgtccgccactcgacagtcaaggttgctgtagacgtagacaagtag

SEQ ID NO: 82676 - DNA, 2229 bp, Oryza sativa
  Clone ID: PAT_MRT4530_82082C.1
atggccgccgccgcgagtgcttccctcgagggccgaggcaacccctccagctccggcgggcgcactacttgcctcgagctcctcttcgccggagctcgtgcacaacgaccctcgagctcaccggcggcggccgcgtcgctccccggcgccgcggctttggatggcctatgttgtgatcgacccgaccatagtgggccaaatcctgttggaacaaaaatctacagcaataaagttcttgaaggctggatagtaagggtgcggaaggtcgcttaccgtgttgaggacataacagatgagtacagctataacatagctcttgaacatgaaaaccattttaaaaggttaatacacaagttcttctatccaactgcttttcatcgcatcgctattgagcttaaagatatcgaggaagagatcaagcacttgtcacagctgaaaagggattatcgagaaatgttcaatgaattacttgacaacactagtgatagtgctcatattcatctcctgtcatctaatggttctcctcatgccgttaaaggagatgacattgttgggatgaaagaagacatggagctgcttggcagatggctagatcccaaggagttagatcgaacagtaatatcaatatggggttttggtggattgggtaaaacaaccctagtcaggaaggtttatgattgggagaagggaatgaagagctttgactgttattcatggattgcagtatcacataactataacatcaatgctatattaaggcagttgattcaagagctgagcgaggaccaaagcaaaatccccactgatcttgacactatgcaccatgacggctacttcactgagctgatccaacaaagcatgatgcaacttgttgagaacgatgagattggtagagtggtaagctgcaggatgcatgacattatgagggaattagcactctccttttctaggaaggaaagatttggtctggcggacataaaccttgaaactcaaaagaaggatgatgttcgccggctgttagtgtcaaactttgatcaggtgaatcagctgataaaatcaagcatggaccttcctcgtctccggacattcattgcagccaacagagttgctaattatcagttgttaaccttactaatttccaggtgtaaataccttgctgttctagaactacgagactcacccttggacaagattccagaaaatattggggacttgttcaacttgcgctatcttggcttaaggaggacacgtattaagtccctaccaatatcaattaaaaagctcaccaatttggaaactctggacttgaaatcaactaacattgaaaggctcccaagagaggtagctaaattaaagaagctgaggcacatctttgcagagcaattgtatgacccagaagagaggcaattgcgttacttccgtggtgtgaaattgcctgactgtgcttttgatttggcacagctgcagactctccagactgttgaagcaaccaaggaatcggtgaagctactgaaatacttgcctgagctgaggcttctgtgtgtcgagaatgtttgtcgtgctgactgtgcaacactgttttcttccttatcaaatatgaaccacctttatgacttggtcatcagcgccaacgatctgaatgaacctctggattttaatgctttcaatcctatatgtacaaagctagagaagctcacaatcagaggatgctgggacaatgagacattccgaagaccagtgttctgtgagtatggtgcaaatatcaagggatgttgggctgaggacataattctccgtgcaggatggtttcctcagctgaggactctttggttgggaaaattggaggagttgagaaggctagtcattgaggaaggggccattattaggctggaagtgctgcttctgctgtcgctcccatccctcagggaggttcctaaaggtttggagcttcttgcatccctcaagaagctcaatgtcacgatgcaacaccatgaactcaaggcgtcgtgcgagccgagccgatggagcctccggcgaatctccatcgccgccggcaccgtgctctggctgaccacttcgcgccgccgccctccgcctcgccgccgccagaggaaggagaggggagaagatgttgcgggaccagctccagtgggggcccaagagagcgtcttccgcaagagggcccgagtaaccaatggggttgggcccaaaagcctactcacgccttag

SEQ ID NO: 82677 - DNA, 936 bp, Oryza sativa
  Clone ID: PAT_MRT4530_82083C.1
atgccgtggctggacgctaaggaggccaggtccgttgtgtacgtgagcttcggcagcgccgggcggatgccggcggcgcagctgatgcagctcggcatgccactggtctcgtgccactggcctacactctgggtaatcaacggcgctgacacgttgcccggcgacgtgcgggactggctgcgcgagaacaccgacgcggacggcgtcgcgcacgcgcacagcaagtgcctcgtggtgcgtgggtgggctccgcaggtcgccatcctggaccacccggccgtcggcggcttcatgacacactgtgggtgggggtcgactctggagagcgtcgccgccggcatgcccatggtcacctggccattcttcgccgagcagttcatcaacgagcggctgatcgtggacgtgctcggcatcggggtgtccgtcggcgtgacgaggccgacggagaacgttctgacggctggtaagctcggaggcgccgaggcgaaggtggagatcggggccgatcaggtgaagaaggcattggcgaggctgatggatgaaggggaagacatgagaaggaaggttcacgagctcaaggagaaagcaagggctgctctggaggaagggccggcggaacgtaagaataaccccttcgctggatatcgaaagctgatgcagccccgcgtcagccgctggcggcaggcggccgtccccggtgacgacgatgaactcgcgagcgcggcgcgggacggacttgagaggcgcggcgcggggctcgggaggcggcgcgtggcggcgggctcgaaagacggcgcgcagggggcggtgatggtggcggccagagcggatctggggacggcggccctcccccgagcggatccgggggcgccggccagcaaaatatcttcactatatcgaggcgaggttacaacgccgtacggcggcttacaatag

SEQ ID NO: 82678 - DNA, 815 bp, Oryza sativa
  Clone ID: PAT_MRT4530_82084C.1
cataatgaggatattgaaggactacaatcagtatgtcatgaggaatttagcacgtggatactcaaggaaagatttaggcgtagcttatgttaaggaaaagcaactccaggtcaacatgaagataaataaactgcgagagactgtaaaggcgcatcaagaaaagttgcaaacggtggcgaagacagctggaataaatcatgaagaatggttggccaatgcagatcgctgggttgctggtttcttggagaagtttgaggaacactgccacaacatggaaactgccatcaaggggcgtatccaggagaaattgaggaggcaaacaagcagagggataattgggggtctaatgcagcaaccggtggcagcgtaataagttgtagaggagagatgacgttgagttggagtaagctgccctggggtcaccacggacgagaaatgtagtgaagatgccttcttggttggcggttatagtgtgagtgtgtgcttgtgtcatggaatgtgatgcttgtacgagttgttacagcttaattacatgggagaggctttgtttcttgtttattttttttgcggggggtgggggtgttggtttccttgtatacaaatgtctatagcagaggcgtttggtgcataatccagagtgtgtagtaggtgttggacagatgaagttgagtggtactgtagtgttgttgttctcttcccttgggttttgtctgtaacgtcgagagggagagatgttgacgctggctgaaagcacaacacaagcagagtgatattatactactactagtaatttacttattaaaaaaaaaaaaaaa

SEQ ID NO: 82679 - DNA, 384 bp, Oryza sativa
  Clone ID: PAT_MRT4530_82085C.1
tgaaaaaaaaaaaaaaaaaaaaaaaacaatataaaaaaataaaaaacttacatactcttacaataccccttcattacactcttcctatactgccacactaattcctattttattggcccctccatttacaacatttactactccgtaaatcccttgcgttacctcatttaaaacatcttgtcactcatcaccttttcctcctctcacctcttccctttttcgcctcctccgatcatccttaccaacacttctccaacctttcttaccaatggctacactccctgtatctactcattaacccccccctgtgtcgcatttacccccaccctggccgtttctcttaccagcgccctagctcctcttcttttcgctttcttacctccc

SEQ ID NO: 82680 - DNA, 469 bp, Oryza sativa
  Clone ID: PAT_MRT4530_82086C.1
gggtggggttttttttttttttttttttttttttttttttttttttttttttttttttttatttttttttttttttttttttaaaaaaagaaagacaactttttttctatttatatcacccaaaggttcacatggcacatttgatgatatcggggcttatttttaacttccgaacccctatactggtaaaactcattacaagacaccgccaagggggggaaggggcctgggggccccattggccctaggggagataccatatctagaggggccgttaaaagccaacagagcttgggcttgggccagattccgatcaaaggaaagatccccaaactggtgggggtggagccgctgccctttggcccgaacaaaggtaatgtcccgatagggggatgggtgcccccccaacgcgagctgtggccagacttgggtggttctcaggtgaaacccatctgatggcaagaagggg

SEQ ID NO: 82681 - DNA, 312 bp, Oryza sativa
  Clone ID: PAT_MRT4530_82087C.1
ttgtgtggaatagccgggaaaggccaatgcactcttccatgaaaccataagcacaacacgaaaatgatgcattatgcacaagacgacaggctcaaaaccattctttgcatggacactcgtggtcacaatggagccggttccagggggggagcgcacgctatttaagaccgataacaaacgcgaacaaggcgcaacagtgggtgccaaaaatgggctccccccagaacctaaacttggaaaggagaccgaagacatccctgggagaaatgagcacctgcggaggttttacaacccatggtcgctgacaagacc

SEQ ID NO: 82682 - DNA, 246 bp, Oryza sativa
  Clone ID: PAT_MRT4530_82088C.1
atggcggcgaacactgcggcggcggcggcggtggcggcggcgctctgcggtgattcatatgggagcgtgctcagcaccttcacacggaacacggcctgcaagttcgtagaaattgatcagaactcagaatttttgcagcaactcaacgcaaatggttcttctgaacaaaatgagaggagacaatgggaagttcggaggtacgcgatagcgtctaccttcgttgctggagagtccacatgggactga

SEQ ID NO: 82683 - DNA, 1501 bp, Oryza sativa
  Clone ID: PAT_MRT4530_82089C.1
gaatgaaatggcatactatcatattccaggtatttaggatatcatttaaatttcttttccaagcataaaatagtcctgacaaaaatatttgtctgtcatacaatcaatcaatcactttcttgttatttaagacatcatttaaacttcttatttcaggcacaaaatagtcctgaaagaaatatttggcctagtggcgccgccctgctggaactctaagaccactcttttcccagacgcagtaattgttgccgtgagcaacgacatggaagtctgacgggatcaagttgcccacatcataccgagtcccaatctttgtgatcaccttgtcatcgatcatggcgacgtagacatctccgtcagcagcaaggatgttcagcttgctcccaggatgaattccatttcttgacctcaccgcggccaatgtgctgatctcctgcttcaagttccagtcaaacacatggtcgtagaaaatgcagggtactccagggtgtgtgaggatgtaggcgtagccctgcatgaccttgtcggaggggaacggccatgagttctgtgtggagccagtgtcatgattgtcgatgaaggtgacagccttctccggcagccagccaatcatccccggcgccttgccgttgccatccttcatccgccacagctcaccttgcaccgctgcctgcagctcgcccttggtcgtgaagtcgaacgccgatgcagggccaccgacggcctgcgcccagttcaccaactcctgccggtcaccgtcctggttccacgacggctcaccgttgccgtcgtaacgcatgttgctccatatctcggcgacgacgaaggacgggtcggtgttgtccacgtacgtcttggcgacggtcgccgagtatcccttggcgaagtcgaggcgccagccgtcgaagccgacgtcggacttgagccagttgagccagtcggagagctctgtctgcacacgcgtgttgaggtggtcgatgtcgggcgccgcgccgaagtctgcgccagtatcgcggtgaccgcggccgttggagtactgcgtgtcgtcgctgcagatcatgtcgggaccccagtcgaggcggctgtccggcgtgccaccctcgaagatgcagtagatgccacggctatccttgtaatccgcgcaccggtggttgatgacgatgtcggcgacgcacttgatgctcttgctgtggaaggcggcgatcagcgacctgagctctgcccccgtcccgtacttggacgcgtccaggtcgtagagccgtcccggcatgtatccctgtggcgcgacggagtgcgacggcggcgggagccagacgtgtgtgactccggtcgcggcgatgtcgtcgacgtggctatggaggaagttgtaccacccaccctgcttcttccatgactcccagttgaatccctgaaagagaacctgagcctgggctaagtgagagcccaaacagagcaagacgaagaataggaggcagctcattgtggtggaatgctttgccat

SEQ ID NO: 82684 - DNA, 629 bp, Oryza sativa
  Clone ID: PAT_MRT4530_8208C.1
atggggctcctgtgggtggatccgacagtgacggcttctgctatgggcagatccaatgaaggtggtggctctcgtgggcagatctggcatcggcgcggcggggaaactgagccagcgaagctcctcctcggcacaggaggcggagcggagcgtgtcggctgggtccgggccccccgcggcccgacccagtgcccccgcgcagatctggccggggagcagccggcgagggtggctgtgtgtggtgggggtgacaacgcgcagtgggagcccatggacggcttcgcgtggacggcaccgatggcagtggaaggccggctccagtagctggcagtggatgtgtcgacaatgctgggtggaggctcgtggccggcgagtgcagcatggaggtggcgtgaggccgacggcgacggtaggcagcgcgacacgagtttatgtggctgggggcagcgggaggccgatgcggcgtgagtttgcgtggttggcagcgggaggttagtgtggcacgaggatgcgtgttggaggccgacatggagcgcgcgacgagggtggtcgtgtggcagcccgcggaggctggctagccctgttttggccgggctggcaacgatggcatttcgggcatcacttcccat

SEQ ID NO: 82685 - DNA, 498 bp, Oryza sativa
  unsure (1)..(498): unsure at all n locations
  Clone ID: PAT_MRT4530_82090C.1
ccgctaccctcttctcgccgcaagcgaggcgagccaagcaaacgcgaggccgacgacgacgacgaggaggaggaagcgcagccactagtcgcggcggcggcggcggcggcggcggcgggtgatcggaggagggatggtggggcttgtgggagaggaggttggagggtcggggatgatgcggcgggtgggggtggctgcnttgnctgccggnncttccnccttctttccgtccgtcggtttctttttcgtgtcttgctgtttgcttctccctgcgcgtcctgttgctttttctgcgtcttcgncttctgccctggggggtgcttccncttcttctggtgggctttcctcctttggtcgccttgctcctcttgctgtgttgcctttgcgtttgtttttttttcggtgcttcgcttttgtttgttgttcgcttttttccgtcgttgccctgtgctctttgtcttgtccttctctctgttgttgtgcctccctcgcttgctt

SEQ ID NO: 82686 - DNA, 533 bp, Oryza sativa
  unsure (1)..(533): unsure at all n locations
  Clone ID: PAT_MRT4530_82091C.1
cgtaatgcgtggattatatctaagcattgaatgcatgaacaccttgaatgaaggtcttgtgttgcatcatgcatcggttgggtgtccaaaaccacaatggtcaaaatatctgagtttccttaagagcagacggttttcagagcttacaaaaccaaagcattggaacggtcaaacgattgaaaatagaaatattgtgcaacatgttgcatccttgaaagaagatcacaagctaccaaaaatacatacccttttctctactgaatgtacgccatattttgactggcaaactgttggactcatgcacagccttcgtgtaagcagacaacctggtaatattacacgcttattgagttgtagcgatgaggacttgaagaactataagggccacgaccttgctcccacacattatgttccatccatgaacagacatccattgacaggggactggtaccctgcaatcaataaaccagcagcagttctccattggattagccatgtagagaccgatgcttgaantcattgtatcttggatg

SEQ ID NO: 82687 - DNA, 973 bp, Oryza sativa
  Clone ID: PAT_MRT4530_82092C.1
gtggatccccgggctgcaggaatcggcacgaggaccgccagccaccgcgcgggatcggggagagcgatggcgggcgtccgcttttagtgcgcgtaaaataaattttcgttaagaactttcctgaaaagatacttaattgtgttttctaattcgtgataaacaagataaaacaggttccagtacagtgtcatgattttcttttgcagactgttggtgcccatatctttaaactgccccccccccccccttttctgtctttgttacagtgccgccttgaattgttactctaaatttaggattgtctcagtccgttcattgtcaatacttaacttgcaggaaattgatccaaaggtcgaaaatgatgacttcgctaatgaaggaatggaaggattcctttcagaactgacaaatgcaattccaggagttgatgaagctatgagttttgctgaaatgctgaaactggtccaaacaatggattactctgttgtagtttttgatactgctccaacaggtcatactttacgattgctccagttccctgcaacactagagaaaggtctagagaaaatgatggccttgaaaaataaatttggtggactgttgaatcaggtgttccttatatatttcaagatactatgcgtgttgctttagttatttgaaactatactgattgttggttgataattttgttaatatatactttgacaggcaactcgattgtttggtcttggtgatgaactgaatgaggatgcaatgctagggagacttgaaggcatgaaggatgtgattgagcaagtgaacaggcaatttaaagatccagtaagtctaaccaaaacctgcagagaatcagaatttttttattaactatcaagacagactcttagcctgtttattatgggtggtcagccaactccatgatattgacatcttgaacaactcaggagtttcaagtgttattaagctagagcctata

SEQ ID NO: 82688 - DNA, 556 bp, Oryza sativa
  Clone ID: PAT_MRT4530_82093C.1
atgacgccgggagtggttcacgtcatcccgtgctcgccgtgcttctcgacgaccattgatttgatctcgaagatcgccagtaccacgaggtggaggggtagcttgtcgaggatcgtaaggtgtttccctcagtatggcctaaacagccctgatgtgttgggctggggcgcggatttcagcatggacgttgatgaatacccagcaatcttgaagagtatgtttcttggttttatggataggacaccaagacctgcgacgaccgccgagcggctcctgcttcgccggctgggggccgcacccgagggcagcgcaaagccatgccacgacgtcggcggtccggttaggtggtcgtgcaaacggcgacgagcgctgagcggcttggacctcgtcggtggtaggggcgacaccaagccgacacttcccgtcttcggcaaaggacggtggaggggtgctccaggacagcgtgcgcaggaaacccgacacgactgcgaggaggtgaaggtgcggtggtgccgcttcccagaaagctccagtgagctcaggggcttcaagtctg

SEQ ID NO: 82689 - DNA, 315 bp, Oryza sativa
  Clone ID: PAT_MRT4530_82094C.1
atgtttgcttatgcaattactctaagtcatgatgaggatattagagtagtatctagtaatttaggcgtggtgtctagattactgggtatcattatttgggtttatatgctgtggaagagaggtgggctgctgatggtgacagctcagtacgggtattcgtccgcgcatgtatataatccttagttaatttcctggggagggtattcctccgtatttagctccggttgtatagtcatgacgagctatcgtaagaaactcggcagttaggggcggcttctcaaagtaccaggagggcatgagaaagaggatattagc

SEQ ID NO: 82690 - DNA, 231 bp, Oryza sativa
  Clone ID: PAT_MRT4530_82095C.1
atgacgccgggagtggttcacgtcatcccgtgctcgccgtgcttctcgacgaccattgatttgatctcgaagatcgccagtaccacgaggtggaggggcgcggatttcagcatggacgttgatgaatacccagcaatcttgaagagtatgtttcttggttttatggataggacaccaagacctgtcggtaatccgttctctgtttcaacgggtggatttttcgacatgtag

SEQ ID NO: 82691 - DNA, 1662 bp, Oryza sativa
  Clone ID: PAT_MRT4530_82096C.1
caatatagattagatagatagtttaagtctatagcccgacaataaagcactgtcaagtagacttggaggaattcttctgggtcggtgctcccatcatacttttcaatagctccgggtcggaatctctcaggccatcggacatcacgtagggaacgaccgaaagccctgcacccagcgcttggagcggcgggttgtcggcggtcgcgtgaccttcgtggatcttggtctgacgatgaagaggactcggatgatgatgatgatgacgatgggtcgcttggttccggcgtacgattacgagggtgacgacctggatctcgggaatcttgtcttcgtctctcgctgttgtctcgacgccgatcttcttcatcttcgtcattacggcgacggccatgaccaatgctgtccggcccccgccggtcgcgatcgtcgtagtctcggtcctcgtttggacgacttcttcgatcatggtgtcgtgaggagacatgacgccgggagtggttcacgtcatcccgtgctcgccgtgcttctcgacgaccattgatttgatctcgaagatcgccagtaccacgaggtggaggggtagcttgtcgaggtgattctctccgttctagaatttcaccgttagcatcgccgacgggagatcggttttgttgggctgcggtggcggcttcttcgaacgcgttgctgaggttagtcaccgatgcccgtagttgttccgtccaacgctcgaggtcgtcgtttagaacaggatcgtaaggtgtttccctcagtatggcctaaacagccctgatgtgttgggctggggtagtcgattgattcgccgtctccgcgttggcttgtgctgacgtgccaacgccatcgatagccaacacctcccgcgccgcgtctgatatcgatgaccccaacgaatcgatctggggccggagtcgctccttgttccttgccgttatccctgacggggacgtatgacttaggagacggagttttcatagcgccgagtagaactttgcaactcgagaggtcgtgattctttgtcttatgaataggacaatagacgtcccgagttggagaagtacgttgaattccacgttctttgcaggcgcggatttcagcatggacgttgatgaatacccagcaatcttgaagagtatgtttcttggttttatggataggacaccaagacctgcgacgaccgccgagcggctcctgcttcgccggctgggggccgcacccgagggcagcgcaaagccatgccacgacgtcggcggtccggttaggtggtcgtgcaaacggcgacgagcgctgagcggcttggacctcgtcggtggtaggggcgacaccaagccgacacttcccgtcttcggcaaaggacggtggaggggtgctccaggacagcgtgcgcaggaaacccgacacgactgcgaggaggtgaaggtgcggtggtgccgcttcccagaaagctccagtgagctcaggggcttcaagtctggtaagtaacccgaacccttagtttgttttaatgtttttttggtcctttttttcgttattacggacaacagaaacatttttaattttttaagcagtagagatagagaagatagagatatatagtaccgtgtcaaatataataggattcgatttttttaccgcgtcacgtataat

SEQ ID NO: 82692 - DNA, 607 bp, Oryza sativa
  Clone ID: PAT_MRT4530_82097C.1
ggaaagcaaaaaaaagcttcaatctatgcttcaatcggcaggtcccaaggcagggggaaccttttgcccaggggaaaggccccccctcctaaatcattcagggaagggcccaaattatttggggcatgcccaaacggaatggggggggaaggcagcaaaccatgaaccccaaacccaaagggggggtccatcctaaaaaaaaggttgtttgccggggtatggccagcagtggggactggccggaatcaaccataggcgggggagttcccaaaagaattcatgtttatgaaagcagggttccttcctccaaatgcagctgcaagggtaccccgcctgcttgcataagggcccaaccgttaaagggacagccgatccttttgaaaaagacaaaaaacattcccccgggggagggtctctacattcaggaaacccaatattttttttggaacagccttttcgaggccaagcgggtaaacagcagccacaaactttggggggagttaaacaaaccacacaaccctgggtttttttgggggggaggaggccccattctaattacggggctaatgaaaaaaaaaccatcatccccattctcatctctactttt

SEQ ID NO: 82693 - DNA, 195 bp, Oryza sativa
  Clone ID: PAT_MRT4530_82098C.1
atgggtggcatcgttgtggtgcagttggacgcttccgaaacaatcagagaaaacctcgagaagaaagaaagggagacatgcagagactctgtctgtgctgtccaggggaaatggatgaatgatttgattgcacaagagcgaggtaaagctgtcatcatgtaccacgacctggatgcacctgtaacaagtttgtag

SEQ ID NO: 82694 - DNA, 2256 bp, Oryza sativa
  Clone ID: PAT_MRT4530_82099C.1
atggacttcttccttacggttacggactccagtattgggcctccgggcgcggcccaatacgcgaatgggttgttgggccttgacgcgcgcggtgcggcccattgttggaagacaagaatagggagaggggaaggtggtaaatgggtggccgcgcggaggcgcggaggcgcggcagggagaggtgggaggtggccgatctcgccggcgttggtggagcggagcggggtaggcgaagcttctccggccgcgggtcgccggcggggtgggtgggaggccgtgatggagacggcgcacgaggtggccatttacatcgaccgcttccacaacctcgacctgttccagcaaggatggtaccggctgaagattagtgcggcgtgggaggaggatgagtacagggcgcccgtatctcctgccagggtcgtgcaatatgaagttcctgatattggttcgaagggagcatttggcctttggaaaatagatgacgttgacaatagcttctatacacaaccattccagattaaatattctagacaagatatttatctatcagttatggtgtctttctacatacccaacaccgaagatgagggcccagcaacctcgtctgtaatattaaaatttgagctcatctatgttccaacattggaagacaggactgagattgaagatccaagtgacatatatgtcccagtgcatgaatttagaatcccatacaaagcactcctgggtttacacgcatattttcctgtccattttgatgctttccaccctgtgcttgttgatctaacaatgcatatcgtgtacctaaaagctggtgtgaccaaatcgtctcagaaggcatctgagcaaggtttatgctcaaaatcatgttatattataaaagcactattaagttctagagaaattttgcttgaggaagtgatgaagatgagtgctggcattggtaaaactcttgaagatttagatgatgctgatttaactcttggtaaacatgagccgatcgattcatcaaaggcaggcttgcctaaatatagcaaagggctctatatacccacgaagtgcattggccatcttactggtgttttacatgatctaatagagagatctgataatgtggttcggagcactaatgacattctgctgtacaccctttccaaggaagatttgttagaattatttcaagctcctgtacagaattcttcttcacgggcagaactccataggagaagtattgcacaaatgaaggtcggtagtcagtcaatgttgaaaactgaaacaatttgcattactccaaagaaaaggatactgacacaaatcattctgcagattaatgcacggttcattcaagatatgcaaatttatgctaatccttcagaaattcctgttgttcacatagaacaacatgtcatggttgttccacaacatggttctagcaagcgtttgggacatcatctggatttacggcttattagaaaccaatggatactgtgtgatcctggagctgagtgcctactgtctcagacaaatgaagacagaacatgtggagattttaaggaaatgggcagaaggctatcaaatgaggtagttgcattcctcaaaaggaaaattgataggtattcaagaaatggaggctgcaaagatttgaagcttagctttgttggtcattccattggaaacattattatcagaagtgccctagcagaccccaagatgcaaccatttctgaagaacctctacacatacatgtcaatatctggacctcacttaggttactggtacagctcaaattctctgttcaactctggtctgtggcttatgaaaaggctcaagggagtccaatgcatgcaccagctcactttcagcgatgaacaagatccccagaacacatttttttacaagctatgcaagctgaatacattagataacttcaaaaacatcatcttggtatcatcgccacaggatgggtatgttccatatcattcagcaagaatcgattcctgccctgcctcatcgtcggataactcgaagaaagggcaggtgttcaccgagatgctcaacaactgcctggaccagctccgagccccatcgtcggagacgcgggtgttcatgcgctgcgacgtgagcttcgaccagtcctcccatggccgtcgccggagcctcaacaccatgatcgggagagctgctcacatcgagttcctggagaatgatttgtacgccaggttcatcatgtggtccttccctgatttcttcagatga

SEQ ID NO: 82695 - DNA, 503 bp, Oryza sativa
  Clone ID: PAT_MRT4530_8209C.1
ccagatcttagcccatcgttgagttcgtaagcaacagtgcaagcacagtgccaacccccttctttccaaatcacccgtgttcaaactgagaaactgccaagtcatgcagcagctgtgctgccaacagctcaggtatgatcgcgcaacaagtctcactgccagccacaattagctagtgttcaggcagattgtgcagcagctacaagctacaaacaagtttgctggcgtctactgttgatcaggctcaagctcaagcccaagcctatgttgcgccactaaacttcgccgtcaaaatatggcggtatctacaccaagctacaaacaactgctccactgtagcattcctaccgtcggtggtatcatggtattgaattgtaccaagtatagtagtacaggagagaaaaataaagtcatgcatcatcgtgtgtgacaagttgaaacatcggggtgatacaaaatctgaataaaaatgtcatgcaaatttaaaaaaaaaaaaaaaaaaa

SEQ ID NO: 82696 - DNA, 341 bp, Oryza sativa
  unsure (1)..(341): unsure at all n locations
  Clone ID: PAT_MRT4530_820C.1
tctgaacaaaagcttcagttttcagtgccatcttgcgttgcatctcctcctcgctttgccgcttgtttcgccaagtataaagcctggtccagtgaccctttttgtttcgatgtgcagggtcaaaacaaacacacacacacacatctgtctcttcttcaggtttcaggtctcctggctgctttgcttctgctgcctctgtgtggggctccagccttgctcagattgatgattggtgatccaaccatcttcatcacttacagagatggggtgtggtgcatcaatccctaagaaatgcaaggtagganggaaggggaagaagcgncggagcgtcatacaggagg

SEQ ID NO: 82697 - DNA, 870 bp, Oryza sativa
  Clone ID: PAT_MRT4530_82100C.1
atggagattaggattcttgtaatccgagcttcggtcttggggttccttgagaatcaagacgtgagtctcgaggagcgagaacccgaaaatttctggaaagaatcgtggaagttccagatcagaggagttgagcgggagaaggaagctggcgatgacgaagaggaagaagttcgcggggccatgcaaggcgacttatccgatcgaccggtgctagaggacgagccactgtggatcatctttgccaaggagatgatcatcaacctcaaggaggggatgatgatcaatagcgacaagacaatcgacaggcggggagcgcatgtgcggatcaccaatggcgtgcaggtgacggtgcagaactccaacaacgtgatcatccacaacatccacatccacgacatcgtgctcggcaagttggggatgatccgcgactcgctggagcagttcggcttccgcacccaatgccgatggggatatttccacgtggtgaacaatgactacacgcactggctgatgtacgccatcggagggagcaagaacccgacgatcattagccaggggaaccggtacactgctccaccgaacctgacggcaaagcagatcacgaagcatctcggtgcggcggaggaggagtggaagaactgggtgtacatggcacttggaggaggacctgttcatggaggggacctacttcaccacgtccggcgatgcgacccagaagcagttcagcaacaaggacctgatcaagcccaagcctggatcctacgtcgcgaggctcacgcgcttcgccggcttcatcccgtgcactcccggcaagaagtgctagaccgcgcgcggcgggcggctagccggagagacgattcttatttgtag

SEQ ID NO: 82698 - DNA, 810 bp, Oryza sativa
  Clone ID: PAT_MRT4530_82101C.1
atggcggagtcagcaagcgcggggaggcgaggcgagccggcggcggcaaggcagtggaggaggcgagcggcggcggggtgcggcggaggaggcgagcgcacggccgacgccatgagcgacaaccagccccagcccgacgccgtcgccatctccccccgcccgcgccgcgtgcctgtcgtccgtcgcccgtcgccgtcgtcgcctcgagccccgtccgcgcgccgtcaccccgcgccgcctcgcctcctccggcgcgctctcgccttctctgctgccgcgcttgcctcttccgtcggtgctgagcgcgtgcgggcgcatgtgccgccgccgccgccgccgtggcgcgagaaggtgacggcgtggggcatggggggtaattcggacgaccgcgatagttcagggagaccccagctctctttcctctccgtcgcggcgcgagcagggaagcagggcagctccagcgggaggcggcggcggcaggctggaaaagctaacgcgcacgggcggcacggattgaagaaggaggtgatgcgggtgagcaagagcggcgcaacggcggtgcggtggaggcgggcaaccaaggcagcgtcgaagtcggagttagcatcagaggcagcggtggcggcagcgcaggtggaaggaagcggcggagcgagcgggaacggggaggatagcaccgacgagcggcatggggaggcggagggaagaggcgcgcgacgtgaggagggcggcacaggcgtgaggagggcggcgcaggcggagggaagcgtccgagagagcggtgcgcaaacgccctacttctcgatctag

SEQ ID NO: 82699 - DNA, 1008 bp, Oryza sativa
  Clone ID: PAT_MRT4530_82102C.1
atggagattaggattcttgtaatccgagcttcggtcttggggttccttgagaatcaagacgtgagtctcgaggagcgagaacccgaaaatttctggaaagaatcgtggaagttccagatcagaggagttgagcgggagaaggaagctggcgatgacgaagaggaagaagttcgcggggccatgcaaggcgacttatccgatcgaccggtgctagaggacgagccactgtggatcatctttgccaaggagatgatcatcaacctcaaggaggggatgatgatcaatagcgacaagacaatcgacaggcggggagcgcatgtgcggatcaccaatggcgtgcaggtgacggtgcagaactccaacaacgtgatcatccacaacatccacatccacgacatcgtgctcggcaagttggggatgatccgcgactcgctggagcagttcggcttccgcacccagtccgacagcgatgacatcaacatcttcggctccaccaacgacggcctcatcgacgtcatcgccaagtccaccggagtcaccatgcatctccaactaccacctcaccaaccacaacgacatcaggctcttcagctccaatgccgatggggatatttccacgtggtgaacaatgactacacgcactggctgatgtacgccatcggagggagcaagaacccgacgatcattagccaggggaaccggtacactgctccaccgaacctgacggcaaagcagatcacgaagcatctcggtgcggcggaggaggagtggaagaactgggtgtacatggcacttggaggaggacctgttcatggaggggacctacttcaccacgtccggcgatgcgacccagaagcagttcagcaacaaggacctgatcaagcccaagcctggatcctacgtcgcgaggctcacgcgcttcgccggcttcatcccgtgcactcccggcaagaagtgctagaccgcgcgcggcgggcggctagccggagagacgattcttatttgtag

SEQ ID NO: 82700 - DNA, 998 bp, Oryza sativa
  Clone ID: PAT_MRT4530_82103C.1
atggctgcttcttcttggtgggttgtagcggcgtgcgtggtgttggcggcggcggcggcggccgacccgagggacgggttcacggcggtgagcctgggcgatggcaacttccagctgcagtggccgtacgacgtggagagcagctcgaggtacagcttcgacggcacggtgaggcggctgtgggtcttctccgacgacaagcccttcaagccgcagagcggaaccaacccaaggacggagatcaggatgacgggttatgactactcgtcaggggtgtggcaattcgagggcaccggttacgtcccctccggcaccaccggcgtgtccatcatgcaggtgttcggtggcgggaccgccaccaccctcatgctccacgtctatggcggcgacctttggtactaccaccagcaggtggtggagaccaacatctacgaccgctggttccgcctcaatgtcatccacgacgtcgccgcctcccagctcaccgtcttcattgatggccgggagaggctccgcgtcgccggcaagggtggcgactcgcactacttcaagttcggcgtgtacatgcagacgaacccgtccaaccgcatggagtctcgctggaaaggcatcagcatcctcaacaagacatagtaacctagtattgaaattagacataaattgatgttatgaataaatctatctagatttaataatattagattatgtcaaatccatcgggtataaagttattatattttaagatggagatagtacttggcgctaaattataactggacatttgtgtaaacacgcatgtctctacttgtgttcttacatgcgtggagtactatgcacatgcctatatgtatggttgtgtatgtcaattatgtatggttacgtatatatgatatctttgcattaagaaaagtacttaattatgtgataatacatttatgtgtactatctattgttaagaatatactccctatgttcctgaaaaaaaaaaaaaaaaaaaa

SEQ ID NO: 82701 - DNA, 681 bp, Oryza sativa
  Clone ID: PAT_MRT4530_82104C.1
tgcaggaattcggcacgagggacacgatcgcgcgctcgccggcgacggcgagggagccctgccggagcgcaccaaggcgcgcggacgccgtccctcaaccctctcctccccgggctacctactttggagaaagccaccgcgcacggcgcactgcctggacacgagcggctgctgcctgctagtcgatctccggcgacgagttccacggccgtacgtactgagcgtctgctgctacttgtccatctcccgcgacggggttgggtccatggttggttccccgctcctccgtcccctctcaccgaccgtcactatcaggtcctaaccatctaagcaggtgagcgcccctacactacgcccctcttgttgggcggctttccggcccgccctacgccggcttgtcctcaggcgcctcccttcgcacgctgaccgtgttcgattaagagcagtctgccacccatggcgctccaatgctgagatgcagtttgtcccccctccgcacccatggcgctccaatggtcagatgcagcctttcccccctccgctcccatggctcggcctccttgatgggacctttcttggcattgcatcttgtgcaattcactgcatgactgtgccagatgatgcttgctgccatggctcccttggcaactggctcttccttatgaaaagtgatggtgggtg

SEQ ID NO: 82702 - DNA, 2151 bp, Oryza sativa
  Clone ID: PAT_MRT4530_82105C.1
ccacgcgtccgcctgaaagcgtattcccttcgcgtgaacgaaagcgtaaaatgacccatcgttttggaaggccagcaatttctttcttctcgcctctgcgacggcgcctccgccatggaggtgtaccggaatctactcctcctccccctcctcttggccctcgtcgccgcggcggcgtccgccgctggcgacgagcgggcggtactggaggtatccggctcgccggagggggtggtatgggtggtccagctctcggatctccacttcagcgtccaccacccggaccgcgcctacgacttccgccgatacgtcggcccggcgctcgccatggtcaaccccgcgctcgtcctcatcaccggagacctcaccgatggaaaaagcaaagatctgctaactatgaagcaaaacgagatggagtggatagaatatagaagcaagttaaaggatgtaattgaaagtagcaagcttccaagaagcattttctatgatctgagaggaaaccatgatagctttggtgtaccttcacctggtggggaccatgatttctatcagaagtatagtatcaatgccatactaagacgacacagccgtgtccagagcatcactttggagaacagtggccggaagcatctgtttgttggctttgatagcacaatggagattggtcttagaggaccgacaaatctatttgggcatccaactgacaagcaacttatagaattggatcagtcactttctcagtgggacactgacttcaacaaggctcaggtgacaaaagtcgcatttgggcattttccaatgtctttctcaacattaacagagtcaggaaaaagtatcaaggatgtgtttcttaagcactcattagcagcatacttgtgtggccatcttcatacaaggtttgggaagaatttgaagcgctactatcatcgatcaactgagggatcaccattatcagaacattactaccaatttaacatgcaccaaggatatgaaatccacagcgataaggagagttgttctaaagaggctgtgcatgccgaagaagagttctgggagtgggagatgggtgattggagaaaaagtagaagtatgcggatattagcaattgatgatggttatgtctcctacactgacatagattttaggttaggctcaaagagtataattgtactaccgacatttcctcttgactcgagattcatgcagagggccactgcttctcgtgacttcaaatgtcaggtcatgggggcttcaacttttgacacagtgagggctcttgtattctctcgacatgagatagtatctgtttcagtaaagatatatgactcaagatcaggacatcttgatgtagtgtttgactctgaaatgaaaagggtaaacgcaaatgaaactagaggagatatgtatttagttccatggaactggagagcatttgcagatccctctctgaacagatattggctccaaattgaagtaatggatataacaggtgacgctagtgtcagccagttgaggccattctctgttaatggctttgcttcaaaagttagctggacatggaaggagttttttgtgatgggtattcaatgggctttggtgtatcatcctgcactgtgggtgactattgtgtggtctttgctcttggtgtatatgatatatttgttagtcttcccttggttgtttggtcaccctataactgaggatagtaacctcgcatccatgacatttagaggctggattcttggaaaatccaatagtggcagtgaagttctccatgctggcactccagatgtcatggtcattgttctccctcacctttgtttcgtggtattacccacaattgtgattttagctgccatggctgctgagagaacagcatatcgagaacagtatctttctcaatcaggaaagaagaaagatgatcactaccaaaagagcaggagacagaaggagcatgataatttttggaacagtcgttggacacggaaatttctttttcttctttgcctggcagttctgtggaaacattggaagcactgcagggctcttgtgaaggcttatgcgatgaaccctgtaatccactcgccagtacatttcttcttcattccagtgctcatagcgtttgctatctacaaaacctcgtcactttag

SEQ ID NO: 82703 - DNA, 1338 bp, Oryza sativa
  Clone ID: PAT_MRT4530_82106C.1
gaggggcagcaatggtcatcatttatttgattaaatccaaaatattagcaatatgacaatgaccatatttacacttgagatacatcacaagttgagatttaacctacaatattacaaaatacaagtctttaagtactgcagaaaaaagaaaaccttaaatatcttaggcatgtgcattacattggtagtccacattcgtcagaaaaaaatcatttatatcaggccagtgctcctttgatatcttactttcaggttgtgtgaaaatcttatttaaaaataaaagagaacattttttcagttttattattaactgagtcgttgactgtgtagatagaatgttatggactggagctgtccatctggacaaaatcaaaagaatgagtaccccttgcatctttggttggtaaaatctaaggcaatgatagaattgtcatatgtgagatcgtacgaagccgccattgtgtccttccctgagatcgtgttcaccagcttccaacctgctgctactactggtccaacggtggagcaagagaggattggacccccaatattcattattaagagatccacaaacaaaagcttatactgaggatcttacttttgaaaataaaagaaaacagaactatacggacaaattaaaaggttcattgtgttttgataaaatcacattaaatgttgtccagaaaattcattcatttttacaattacaaaatcaattttactttgcaattactcaaaccaaaatacatgattaaattgagaaatgcaaaaattggaatgcagaaattctgcaattgaatagtttgtggtagttggttataatgatccactgccgctttggaatactgtattattcaaattaacatagcaaaattcaaatagctctatctgaaacttctagagcgcatagaagattacgtgacaatttctagccataagaaatgttccatcagaaactggttgcaaaaaaagaaaccagagcaagcctacaggctgccggatccctttgataccagtaagctcagaacatagaagcactggccataagaatatggtgccttatcactgtgatgagtggaaaccataaggattgcaagcaaattagaacctctagtgacttgaatattttgatcagtgaggcaagggccttatgatttgaaagctcaggaagacattagcaagagacatgctgcatgttcgaatggctccaactcctggattcctatttttgtaggtgagatcctaggtttccagatgtcgctgaaggggtcttcgtgccggatgggcatgggtcggcccatcaaaataaaacatttttttggcgtctgctacaacaga

SEQ ID NO: 82704 - DNA, 248 bp, Oryza sativa
  Clone ID: PAT_MRT4530_82107C.1
ttttcatattacccaaggagaacccatctatggggacggctcatataaagtggggggcacccaagccacaactcaaattggctccctacgtgctaactaccgcatggaaatatcagaaaactgctactccatgaacatcaattacctcctcataacttaatcctgcacatacattactttgctacagataactcacaaaaatgaaatcttcttggaaatcttgcaatatttaacaacaacaacagtcg

SEQ ID NO: 82705 - DNA, 906 bp, Oryza sativa
  Clone ID: PAT_MRT4530_82108C.1
atggcgtcgctgtggcggctggcgctggcggcggcgatgtgcggcgcgctgatcctgtcgtcgtcgtcgtcggcggcggcggccgggaagaagaccgggcggatcacggtgtactgggggcagacggcggcggaggggcggctccgggaggcgtgcggcagcgggctgtacacgacggtgatcgtctccttcctcaccggcttcggcggcggccggtacaagctggacctcgccggccacgaccggggcgccgtggggcccgacgtgaagtactgccagtccaggggggtgctcgtcctcctctccatcggcggcggcatcggcaggtactccctcgcctccaaggccgacgccaaggccgtcgccgaccacctctgggacttttaccttggcggccgctccaagtcccgccccttcggcgacgccgtgctcgacggcatcgacttcgacatcgagctcggccgccccgcccactacgacgacctcgccaggtacctcaaagcttacagcgggaggaagccagggggtaagaaggtgtggctgacggcggcgccgcagtgcccgttcccggacaggatgctgggcgaggcgctgcgcacgggggtgttcgaccgcgtccacgtccagttctacaacaacccggcctgcagctaccgcgccagcaacgccgccgcgttcgccgcggcgtggaggaagtgggcgtccagcctgccgaggagctccgtctacctcgggctcccggcggcgccgggcgcggcgaacagcgggtacgtcccgccggcggcgctggcgggggaggcgctgccgatcgtgcagcggtcgaggaactacggcggcgtgatgctgtggagcaggtactgggaccggcgcaccggctacagcaagaagataaagcatgccgtgtga

SEQ ID NO: 82706 - DNA, 270 bp, Oryza sativa
  Clone ID: PAT_MRT4530_82109C.1
atggtggcgagtgtcggtggcggtgggcgggtggcggcagggccacgccaacggcgcgcgggagcagtgtcggcgacggtggcgggggcgggcggcggcgatggcgcgtgggctgagcggcagcggtggcggcagggcgacaccaaccaggtgttcgacgaaatgccaacaagggacgtgtcaccgtctcctcaaaggcgagaatatgacccggctggccccgtaggtccgcaaaagcgttgctaccttgcacggctgcacccgcggtga

SEQ ID NO: 82707 - DNA, 796 bp, Oryza sativa
  unsure (1)..(796): unsure at all n locations
  Clone ID: PAT_MRT4530_8210C.1
ttttttttgataatttagttcaaaaccaatgcgtaattccattgaatttttgccgtttgacaaattaaagcatagagacaaaagaagaacaaaaactctgatgataggaacaagtagaggcttcaaaaatgttgttgttcagcaagcgaggcctagctcagtttgcaaccctgcagtttgtgcggatctggccgtcgctgccggtgagcacctggatggcgcccatcttgaccatggcctggccgaacttggtggcgaagaggtacatgttgtaggcgttctgcgccacgagcgcggcggtggcgttgtcggcggtgagcgtctggtcggaggcgagcccacgcgtcccggcgaggaggttctggtagtagctggtgtcgaacgtgttctcgctgccgtcgtccatggccaccgtgttggcgctcccctgcgggcaactccgcgacagccgcgacgccatcgccgcgttcaggccgggtcctgccccgtgctggagttgtacccgtacagcctcgagctgaacgagctgcaatgcgccaaccctatcgtgtgcgcccctgaaaggatgaccatgtcgtcctggggaaagcccatgagttggcgaaactttgtgtganttggggcaaatctgaagtgggaaggggcaggttgggccatcgcgtcgggacgccaaggaagtgttgccgtcccttcctcccgggccggaangcggtaggggtnccgccgggccaacaaganggttgtttttgggcggcgaaagcgaagtattgtccgcgcaaggagaaccaaccccttt

SEQ ID NO: 82708 - DNA, 171 bp, Oryza sativa
  Clone ID: PAT_MRT4530_82110C.1
atgaaaaaacttgaagggactacgatgaaccgagtgcatagagacggtccacgggtcaatagaagtggaccccgtgtgtcaaccgaggcgagtggccgacaaacgaaccctactagacaccacgcgggctacacatgggaaaactacatggctaccaagcgggcacactaa

SEQ ID NO: 82709 - DNA, 560 bp, Oryza sativa
  unsure (1)..(560): unsure at all n locations
  Clone ID: PAT_MRT4530_82111C.1
tnctctctctcnnnagctcactgccccgcgccacgcgcgtcgcgtccgcgccggcgaaaccagccatgaaagaagccctaggaggcggcgcggcgtccacccggcggcggcgacagcgccgccgtgttccgccatggcgancggcgcggcgagccctcgctcgccgccagcggcgaaaaaacgggcggtggtggtggctggcgacngcgacaactccnacgtgttcgaccggctccccgacgacatcgtcctcgtcgtgctctccaggctcgccgccaacgccgcgtccccgccgacgtcgcctcggcggnactcacgtncangaggttccgggagctcncgacgcacccggcggtgctgtcncgcgcgtcngcggnggtcttntcngtgcggtggggcgcgttgtccgangcngctcaccgttcttgcggcggtgcgcggccgccgggcacctccancctgctacttcctcggcatggtgaggttctncngcctggggancanggcgacnggggcggnncttcttgggcncncgnggcnnngggnnncnccgcnctttt

SEQ ID NO: 82710 - DNA, 447 bp, Oryza sativa
  Clone ID: PAT_MRT4530_82112C.1
gcccacttcctgcgccatctcggcgagcaccaccttctgagacgccagctcatcccgcagtccacgggaacgtcgccgccggctggacttcgaggagcgccgtggccgtgtgttatatgccgccctctcgacgggacggacaacgccaagacggtgctccctcctggcatctatcccctgtcactcgcagggaagaggcgaagacctgagagaaagaaagggcggccggtcggcggtgcccagcccagagtgggcgcaggccaaggcggagtctgggcacgcgctcgtcaactgttccctcctcattcgtctccatccatccatgtctggatctggtgcggcctagtgactggctgcgcggcggaggcgctgggcccctaccgcctccaacgaagtctctcgctccacgccgtcgttcccttgcgcttccagcacctccgcctctag

SEQ ID NO: 82711 - DNA, 877 bp, Oryza sativa
  Clone ID: PAT_MRT4530_82113C.1
ccgaaaattttcgtgctggaaggaagtgccactcccaaagtaccattttttggatgagggccctgtccaacaggaggatggtctgttgcacactacctgtggaactcctaattatgttgctcccgaggttatcaacaacaaaggatatgatggagccaaggctgatctgtggtcatgtggagtgattctctttgtcctcatggcaggctaccttccatttgaagactcaaacctcatgtcactttacaagaagaggattaccatcgcagagcttatcaacaatgagtggttcaagaagggatatcagcctccaaggtttgagacagcagatgttaacctggatgatatcaactctatttttaatgaatctggggaccaaacacagcttgttgtcgagaggcgagaagagaggccatcagtgatgaatgcttttgagttgatctctacatctcagggtctcaatcttggcacactctttgaaaagcaatcgcagggttctgtgaagcgagaaacaagatttgcatcaaggctgcctgcaaacgagatattgtcgaaaattgaagcagctgctggacccatgggctttaatgtacagaagcgcaactacaagctgaagttgcaaggagagaatccaggaaggaaagcttgtgctactactctttcctgggtttatagactgaaatcagttcatccatttctaaaggtttttgaagtcacgccctcgctgtacatggttgagctccgcaaatctaacggcgacactcttgaattccataagttctaccacaacatctccaatggcctgaaagatgtgatgtggaagccggagagtagcataatcgcaggcgatgagatccagcatcggaggtcaccgtga

SEQ ID NO: 82712 - DNA, 1826 bp, Oryza sativa
  Clone ID: PAT_MRT4530_82114C.1
ttcgaccaccgcgctcgtcccatcccatgcctgcggccgtgaccgcgaggttgtgaggagaagagagtcccaagagaggaggatcgatgcggcagcggcaggccggcgagcaggaggcggagctgttcgtccagtggaggccctgcgacaagaagcggtcctagtcgcccgccgccgctcgcccactcgccggcgtcgtcgatctgagagggacaggggaagaggaagaagcacaggaggaggaggatgagcgtgtcgggcgggaggacgcgggtggggaggtacgagctcgggaggacgctcggcgagggcaccttcgccaaggtcaagttcgcccgcaacgcggactccggcgagaatgtcgccatcaagatcctcgacaaggacaaggtcctcaagcacaagatgatcgcccagataaagcgcgagatctccaccatgaagctcatcaggcaccccaacgtcatccggatgcatgaggtgatggccagcaagaccaaaatatacatagtgatggagcttgtcaccggtggtgaacttttcgacaagattgcttcgcgtgggaggctgaaagaggatgatgcaaggaagtattttcagcagctgatcaacgctgtcgattactgtcatagcagaggagtctatcaccgggatctcaagcccgaaaatcttctgcttgatgctagtggcactctcaaagtatcagattttgggctgagtgcactgtctcaacaagtcagagaggatggtctgttgcacactacctgtggaactcctaattatgttgctcccgaggttatcaacaacaaaggatatgatggagccaaggctgatctgtggtcatgtggagtgattctctttgtcctcatggcaggctaccttccatttgaagactcaaacctcatgtcactttacaagaagatcttcaaagcagacttcagttgcccgtcttggttctctacaagtgcgaagaagctcatcaagaaaatactagatcctaatcctagcaccaggattaccatcgcagagcttatcaacaatgagtggttcaagaagggatatcagcctccaaggtttgagacagcagatgttaacctggatgatatcaactctatttttaatgaatctggggaccaaacacagcttgttgtcgagaggcgagaagagaggccatcagtgatgaatgcttttgagttgatctctacatctcagggtctcaatcttggcacactctttgaaaagcaatcgcagggttctgtgaagcgagaaacaagatttgcatcaaggctgcctgcaaacgagatattgtcgaaaattgaagcagctgctggacccatgggctttaatgtacagaagcgcaactacaagctgaagttgcaaggagagaatccaggaaggaaagcttgtgctactactctttcctgggtttatagactgaaatcagttcatccatttctaaaggtttttgaagtcacgccctcgctgtacatggttgagctccgcaaatctaacggcgacactcttgaattccataagttctaccacaacatctccaatggcctgaaagatgtgatgtggaagccggagagtagcataatcgcaggcgatgagatccagcatcggaggtcaccgtgattggcagtttggcaccaaaagttcagtgatagtataaagtagataaccagccaggaaaacctactaaggaatggcctgtggctgtttttttttttttgggttcttttaccttttaagttgaagtactatctaatctagacatggttgtaaacaaagtttgtatggagatggaatgtgaatgaagaatgtgc

SEQ ID NO: 82713 - DNA, 1020 bp, Oryza sativa
  Clone ID: PAT_MRT4530_82115C.1
atggactctgcactgttcagaaatgaggacgccgacaacgtcctgccacgcctgtgcccccaccttgaccgcgccacgccgatgctcccgcgcccctctgcttccgccgccgccgtgcgccgtcgcgcgccgccgccggccggtctctcgccgattcccggcgccgccaccacccccgagccctctcgagcctccccggtgcgccgccgcggccgcgcccgcgccgtgccacccatcccgccgccgcacggccgccgtcgccagccgccgccgcgccgcctctccctcatccgcaccgttgaattagctccccttgatccccgcttgcttccggtgcacgccgcccctcccggttcgccgccgctcgccgggaaacctcgcatgccaatagttgggaacgccggggcggggtcagttggagccaacccgggttcctggcttcccgagtggaagcggattgttgtgctgctgggcagctggactctgggagtccaagaaaatgaaaaaggctctgggagccgatttaatcaagtgaaatggctctgggagccgagaagtaatgatctgacccgggagcaacaatcaatggacgtgccgttcttcctcgccttcgcaatcatcgcgctcctgtccaggtacgtccccttcgcgctgccgccgatggcgcgggacctcctcgccgacaactccgccgagccggcgcgcgccgccaagtgcgcggtgtcggtggccgtcgccgggctgatgctgctggtgtcgctgcagtgcggcgccggcggcgagcagtactgccccgacgtcagggtggaggggagggcgctgtggctcaactgcgcggcgctcttcctcggcatggtcgtcggcggcgtcgcggtggtggtgatgccgccgctcgccgccgtgtcgccgcttgtccaggtgatggtcgaacacctgaccaggttcacggagaccatcgcggtgaccgcgttcgcgcatgacttctgcatctttatcaagctcgtgaggctgaaacaatga

SEQ ID NO: 82714 - DNA, 345 bp, Oryza sativa
  Clone ID: PAT_MRT4530_82116C.1
ggtcggaatccagttcgatccacgcgcccgcatgcgttttaaccgggcgcccaaaagacaggtgcagttaggcgatcagttccgagaaccgccccgaaaggcctcccgccgccgccgggatatctcttccgcctccggccaggcggagcggaagggcgccatcctcggcgcggccggcggcatcgggcagccgttctccctcctaatgaagctgaacccgttcgactccgccctttccctctaacaatatcgggggaacccccggggatggccgcagacgtttcccacataaacgccccggcccaggtgaaggggttcatgggggatgaccagctcggggaggca

SEQ ID NO: 82715 - DNA, 702 bp, Oryza sativa
  Clone ID: PAT_MRT4530_82117C.1
atggcgatgagcgctctgtttggtcagcggctgccctgtgagttctctcctttgttccttcttttttactttttcttttttttattatgtctaacaatgacgcacaactgcgtcatgtatttaaaaaacaaagagaaagctgctggttcagtgaaaggaaaaactgcaatccctgctactccaaggagatgtcgtagacctgatggatccaatccagcctgtaaaatgagatgggagaggccgccggaaggatggatgaaggcaaacgttgatggctcctttgacagccaactgcttaagggtgggattggtgtcgttatcagggactgggagggggcgattatctttgcctcctgcaagtctatgtgcagatgcagctcccctcttgaagcagaacttctggctcttagagaggggatctatctgttcctcatttggacgctcagaccagttatcctggaaacagattgcttagttgccttgcagatgatacagtcgaaagaaagagcgacgtctgagctggcttatcttgttagggagatcagggacctcttgaatggaagtagagaatttgttctctggaaaattcggcgtgagcagaatatggtcagccattttcttgctaataagcgtcggtgtgaggacctctctagtcgtgtttctatttcatatcttgtaagaaacaatattattcctgagtaa

SEQ ID NO: 82716 - DNA, 1379 bp, Oryza sativa
  Clone ID: PAT_MRT4530_82118C.1
atgctgacatggtgtttatatggcaatactatcctaaaaattatgggtccatatgtcaatatcaaggaaaataaaaatagaaaagccccctaccaaaaacttcaaccaaaactaggccgttggctcagcgccaagccctctggcactgaggtcatgctcaatagcgccaacggggctggcgctgacctcgtgccaccatgctggccgagcgcctccccatgccgacgtggcaggaacatcagcgccaaccgcattggcgatggatgtttaggaaggatagcatcggctatgccccagagcagctgcctccaccaggatagttttggccaaaggtactggatgtgccgcaactatgcgtacaatctagagaaacctaagcccgtgcctaagggaaagaagggaaaggcgaagatgccggtgaagtggatttacaaggagatgactgagttctataaggggatgattcagacctggcgcgagcaccagaaagaacatgaggagcggcaacggcagcgtgccgcaaaggagaaggccgagagggaaaggagagaggagttggacctaagggagtttgctagattgaatagggaaaaggaagagggggctaaagatcaggcgagaaagttggtggccaagtccctccccagtcaatatgttcagctggctagtttgcaggcagataggtcagcaccagcaaaaatggcgcttggcctagggaccttagcgccacaagcgctggcgctgaggtcggacttagctgcctcggtcgagccccagacctgtaacccttctagatggctgcgggttaggacctcagcaccagcaaaaatggcgctctgcctagggacctcagcgcaagcaaaaatggcgctctgcctagggacctcggcgccataagcactagcgattaggtcggacttagccgcctcggccgagccctcaacgccacaagcgctggcgctgaggtcggacttagccacctcggccgagccccagacctgcaacccttctggaaggctgcgggaatcgctggcgttgaggtcgcacttagctgcctcggccgaggcccaggccatccaaccttctggatggttgcgggctaggacctcagcaccagtgcatgtggcgctgttcctagggacctcagcgccacaagcgctggtgctgaggtcgcacttagccacctcggccgaggcccaggtcctccaaccttctggatggattcctgccatgtcggcaaggggaggcgctcggccgccacggtggcacgaggtcagcgccaccccgttggcgctgctgagcatgacctcagcgctacggggctttggcacatacctcgcctcgagcatgggtaccccatccccatatcctgtcctcat

SEQ ID NO: 82717 - DNA, 1591 bp, Oryza sativa
  Clone ID: PAT_MRT4530_82119C.1
agaagaaaatttatcgataatatatagcaaaattgattccaaattgttgtttcagtcaaacgccacctctcactatcaaggatatggtaaagaacaagtagatccaagtcaaatgcctacgctggttgactagttgtaatggatgaacaatttattccaacaacttcacacgattgcacaaagaaatgcaaagcatctttttttttttgagatagtaagctaagctgcagtggcgactgccatgcgttgcacatctagccgaggcgaaagttgttgcaggtcgtttgccggaacaggagggaggagctgaaccccagccgcgatcccaccaggtcaaactccagcaggttgtcctccatcatgtgaccgccgatcaccaccgacgtttccgacgccacgccgccgtccaccacaccgaggcagagagcgccgcccttggtggccaccatcgagttcgccccgaacaccacccacgacgtggcctcgctctggaacaccagctcgaccgtcggcacggccggccccacgcgtgtgcccgccaccttgctcccgtcgtagcacagcttgaacggagccacggccggcactcgcgggatcatggacgtctcggccgcgaacgcgtcggtgaccgccttgtggatggaggtctccagcacggtgtagggggtcaccgtgctcagcttggtgccgcccactcccttcttgttgatggcaagcagcgtcgtgttcagcggcacggcgcggccgttcaccttgatgcgcgtcaagccgacgaagtattcggttgatttgtcccccttggtggacacccccgccgtgctcaccgggttgacgaggagtggtgtgtagatgagcgacttggagaggtcaacaccaggctggaacacgtagggcgcgtcgccgaagatgacgacgccggccgcggcggccggcgggaggcagagcgcgaacttgcgggagaagcggaaggtggcggcgagctgcgtggggaaagcgaagcgggcgcggctgagagacaccatgccggtggcgccggcggcgaggccttcggtcaggaacgtggcgccgcatgtgaacaggaacgccggcgcggtggcgagcggccccggggccgggcggaaggtggtgggcagggacagcacgtcggtgatgatgttgccgctggtcctgacgtgcgtgaccgtgttctccgggaacccgccgcaggtgtcgttgaggcaggccggcgacggcgcgccgtcgcagctggtggcgcacgcgttggtcttggcgaggcggcactgcttggacccgcacggcacgcgcgcgtacgacgacgacacgtacccggcctcgcagtccacccacagcgtggcgccggcgaggtccagcacggccttcacgggcgcctgcggcgtccgctgccggaacatcgtcacgtactgctgcgtcgcgtcgtccttgctcaccggcagcagcacggcggacgggtcgccacctgacgccgcgcggcacggcgagaccgagacgaagaggaggagcaggagagccgtgcaagcgacagcgagaggaggaggcatgcgtgccatgctgggaaggcgaaggatgtgac

SEQ ID NO: 82718 - DNA, 684 bp, Oryza sativa
  Clone ID: PAT_MRT4530_8211C.1
atgggattcacgttgcagcccagacgcacccgtcccagcccaacactccacgcaaggaaaaagctagcagctggccgaagggtggggagaagaccgcaggggcaatgcgggagaggaggagggcgtcggtggccagcggcgggcggcgacgcggcagcaggccaccgcgccgggtggggaggaggcgggagaggaggagggcgtcggtggccagcggcgggcggtgacgcggcagcaggccaccgcgccgggtggggaggaggcctgctgccgctgggcgtggtcaccgcggcgaacgagctggaggacgcggcggggctgagggcgcggctgcggcggatgtggtgggacgccggcgtcgacggcgtcatggcggacgtgtggtggggcatcgtcgagggcaccgggccggcgcggtacgagtggcgcgcgtacagggagccatcccgctgccgcgctgagtccgcgacgtcggcgacgatgaccccgacgtgtgctacacgagccccggtggcgcgacgaaccaggagtacctcaccatcggcgttgacgaccggcttctgttccatggcagaactcccatccagattatgcgcagctatcaaggatgttgattctagttgctgtgaggcgaggaggtcaggaagaagcatttttaccagcataacatttgtagatagatag

SEQ ID NO: 82719 - DNA, 2664 bp, Oryza sativa
  Clone ID: PAT_MRT4530_82120C.1
atggctcaacacgccgggaatgttgttctcccgtcttcgcacatcacggaagagcgacacttgagcctcatccgcaagatcatgccggacggctccgtcgtgagggcaagggaaccgcagccgcggccgcggtacctggatcgggctgatcccacctttctcccgtttcttctacaaggtgttgatgtaaaaacacgaggcctgggagatctgcttaactccagtgtagcgaacccctcggcgcacaaggcgatctcaaagcgatttcctttccggtcaaatcttccgcccacagagatgtcgtactacgccagcccgtcagtcgcaccatcggctgaatacgcggagaaaaccgctcttgagaaaagtggggctgtgtggtataaacgtgtttcggctagcaagcatgttcattgggatgagctaggaatcagccaagcgcttgctcttactttggcaaatttggataatgacgaacccctgatggcatctgctgcctatttctggtccaatgcctttttgttcaatcaagggccgatgaccccaactctgcatgacatcaccatgattactggattagatgtaacttcatcagccaaccccatgagtttaaacaccaagaaccagtttgacttcaaaaccaagagcataggtggctggtctggttatgtagcagcatacatgggcaaaggacctgttacccctagggagcacacagcttttcttctgatgtggcttgagaaattcctcttctgcggatcaagttgtggccctaccaccaactggcagttcttagccgaagcccttgagacaaagaggcagttccttttggccaaaattcttctcggctatttgtaccaaatgttgaacaacgcatcggctaagattgctgttggctcagttgttagtgcaggcgggccatggtggttgctgcaaacttggataaactttgtagccatgaaagctgtcaatcggccagccgtaacagaagctgaatttccaagattagagccgattacagatggtgatggagaagagcgcacccaccgcaggtgtatgtcctatgaggaatatgcatccacaccagccgatgctggagcaaagttattggctgaattactcaacgattggttctgcagcttttacgaaggcttccagaaagatgctcgggtttggttcccatatgaagatttagtcaatttggatctcccagccgacttcagatttgaagatatcaactccgaaaaatttgacaaatccagagaagtcttctcagctgctattacccatgcatccttcctgtcggcattcatcaaggaagaaacatacagcattgataacatagagctggcaaagtttaggagcaaaaactttgacagatgctggggagaatggaagcaacacatattccatcaattggcctctatgtatatgacagacctatttcccgatgtagtccctcagacaacagaatcttctcctccacgcaagagcaacagtggcaaagacatagaatatgctccgggccttttgcgaaatggtggtggattaactcctcctgtcatcggctaccatgcccccaagacctcaagtttgcttcaagggcagatgagagaaccagccgatgttggcaggaagagaaagaccaaggcaccggcaatcgatccatcggctttggctcccatgaagaaggccaagaagcacaaacccaagctagccgatgacttgcccaccttagatccatccattcagcaagctctggatgaagaagaaattgaagaggacgttgatcaggcagcagccgaattgaccgattacttatcaatttcccatttgccgaaaaagaagatcgctgaaaagaagaaatcagcagcaacaacgcttaaaccggctccaccaatgtcaagtgactgtaccccatcgactacaggaagccaccatgttgaagaagaagaacaaccagccgctcctgccatcccggccttagccgatctattttcttttgacatcaaagattactttgatgaagaagcagaagatgaatccaccagcaaggctctagcccctctggatgaaactgtcaagaaaatacttgaagacatatcccttcggctagagtcatcattggataatctggtggcggactgtggttcatttcaggcacggtttgcagaaatccaagcccaaatcccagacgatctggcaaacaccattactccagctatatacctcgagcaacatcaattcaacctgaagaaggctaagcaacggatagccgatcggcgggaccggaaagatatcgaagacactatccaagccaatcggcaactcgtgcacgaagagaaagctaagttagatcagctctctgtcaggccgattcaatcgaacatagatcggcttgaagctcgcaagattgatcttatagctcaacttgaagaatgcaatgccgagttgtatcaagtagggcagaagctagccaatctcccaagtgctattgaagaacagaagtctagattgagatcggctatcaaaaatgtggctgacatgaccaagtccctcaaagtcatctctggaaccgatgccgaagacattcaagctatcaaagaagtagatcaaattagacaagggactgtgtcggctatccagtgttacttgtctggatga

SEQ ID NO: 82720 - DNA, 937 bp, Oryza sativa
  Clone ID: PAT_MRT4530_82121C.1
ctgagtatattctttttttgaacgaacatacggagtatattctataaagaaagggaaaggcctgggagcgaagcggcagagaatggcagggaaagccggcggcctcaagggcgtcgccctcatcggcggcgccggcggcaacagcgcggtcgccggcgccctccacttcttccaggacccctccaccgggtataccgaggtgagggggagggtcaccggcctcgctccgggcctccatggcttccacatccactcctttggcgacaccaccaacggctgcaactctaccgggccccattttaatcctcacaataagtcccatggggcaccatctgatgatgaaagacatgtgggcgacctgggaaacatagtagccaacaaagatggtgttgcagatatcttcataaaggacctacagatttcactaagcgggcctcattccatattgggaagggcagttgttgttcatgctgattctgatgacctaggaaggggtggtcatgaactcagtaaaacaacaggaaatgcaggagcaagaattggatgcggtatcattggacttcgatctgcagtttaacaatctatagtcatgaagcttgaggtggtggtggtatgctgttcagagatatggaaatcattggcgctcctcattccagactgtttcaagaatggcttttgacgtgttatcactgccttcagttatctatacgtactttgttacggagtatattctttttttgaacgaacatacggagtatattctataaataaaggaaaagtttcctcatacttatactgtaccttggactgaagctgtgcaaactcacaataatgtgttactatttctcaatattcaactaaaaagagtttttacttccatatatcccacactatatagtatgtggttaaaaaaaaaaggacggccggtacactatat

SEQ ID NO: 82721 - DNA, 582 bp, Oryza sativa
  Clone ID: PAT_MRT4530_82122C.1
atggcagggaaagccggcggcctcaagggcgtcgccctcatcggcggcgccggcggcaacagcgcggtcgccggcgccctccacttcttccaggacccctccaccgggtataccgaggtgagggggagggtcaccggcctcgctccgggcctccatggcttccacatccactcctttggcgacaccaccaacggctgcaactctaccgggccccattttaatcctcacaataagtcccatggggcaccatctgatgatgaaagacatgtgggcgacctgggaaacatagtagccaacaaagatggtgttgcagatatcttcataaaggacctacagatttcactaagcgggcctcattccatattgggaagggcagttgttgttcatgctgattctgatgacctaggaaggggtcaaaaatctaattgccagtctctgttcctctgctgcatttatgctaggtttgtggtggtcatgaactcagtaaaacaacaggaaatgcaggagcaagaattggatgcgcttacaagcgatgctgctttgaatttggccataagccaatgtcctttatggtactattaa

SEQ ID NO: 82722 - DNA, 423 bp, Oryza sativa
  Clone ID: PAT_MRT4530_82123C.1
atggcgtggtggcggaagaaggtcgtcttcccggcgcgccgcgcgtgggccgccgtctccacccgcgtccgcgcccgcaagccagcttccctgcaagtgttagcagtatcagtctccaataattcagaccttttgggattgaagagacttttcttggcaagaacagaggaagaaagcagtggaggcagcatactgaagcttcacgaggatgtgcaaacctgtggatacaaggacgtgcagttgtcaggcatcatcatccatccccctgcccgtctatccggcaaaagagcgaaaattttcggtagcatcagtgtgggcttaagtggattctggcaggtgcaacttgtagggttcctgtcatgccagaagtcgacatttagcagaactgagcaaccccaaagaagcaacccgttaatggtctaa

SEQ ID NO: 82723 - DNA, 168 bp, Oryza sativa
  Clone ID: PAT_MRT4530_82124C.1
tcgttcatgtgtacataaaaggaaccttctgaactgtgtgtcgcgataccattagaagaaaggcattttaagtccgaccaggagctgatagatctgcaccagcggagatatgagcgaccaccaagtacagagcgaaacaagactagaagcacagacgatttgaggcag

SEQ ID NO: 82724 - DNA, 525 bp, Oryza sativa
  Clone ID: PAT_MRT4530_82125C.1
atgcaagcttacctattggatgctgaagctatcactggaatacttaaggtggagcaactctgtttgcaagctctctgtatgaaggaatacctgggggcacccatcattgatgttcctgtcgacattaattttcccattaaagatctggaaattggtcgactgaacagaaagggacctagcacacctgtggcctccaaatcaatttcaggctctgacttgccagaatttgtaaaaattatttcatcatgcccttatgggataggcaaattggtggagtcattgcgtgtgcaatttccttgtgtccctaagttgcaactgaagaacaaaatttgggagatagctgactttaccaataaccgttggcaggttaagaaagatatcttggactggtgtggtctatctcttccaccagataaagatagaggtatccaacagatgcagcctgatgaatcgggagattcagttcaaccctctcctcagcctggcgctaaattggaaatacacaaacaccaaattgatgcctaa

SEQ ID NO: 82725 - DNA, 534 bp, Oryza sativa
  unsure (1)..(534): unsure at all n locations
  Clone ID: PAT_MRT4530_82126C.1
atggcggttgatcgaagagctgaacataacgcggctcaaaatggaagtagtaagcgcgtgccttctgtaggtgggggcaaagaacgtgaagtgttgaagatagattcggaaactaaatctaaccagccgccgaccaagaaagcttcgagtaaacctgctccgaagaagaacgataaagttcagggtggaggcaagggaaaaaagtaattaattaagagcttatacaagagagaaggtcncaaagccncaatgaagtagaatatcaggattgtctactgcatttacattaatttgtctgtaactggtgtatccatttcggagcatatagtatgtaatttactagtagtcaaggtcnccncagtattttatttttttatttttattgcattttggtctgtatataatacattggttaatatatgttcattccatatcagtccagttaatgggaaataatgtagagcacatattattgttgatatatattgaaccttcggagtgttggattcttattaaaaaaaaaaaaaaaaaaaa

SEQ ID NO: 82726 - DNA, 880 bp, Oryza sativa
  Clone ID: PAT_MRT4530_82127C.1
gcacgagggcttcccccggcaacccaaccgattcgcgctcacgccacctgcaatccgcgaccagacgcgcgggccgttgagatcaacaaacacatcgcacgcgacgccgcgtgagcccgtacgatcgccccctcccgcgccgcgcctcgcactctggttggttgcctcgccggcgatgtcgacgcagtccatctcgcccgccgcggcggccgcgtccgcgcagtactcgtacccggctgccgcggcggcggcggtcccgtcctacttccccgtcccgttccacctccagaacgtgcagcagcccgccacctggccagcggcgcccgcggcgtacaacgccgtctaccccatgccccaagtccagcaggttcagcaactgttccagaaagattcacagataatcactcctgaagctctagctactgtgaaagctgctattgcaaatagtgagaaagacaagaagattgaagcaaacaaaaaggcagtacctcgaaaggcagctgggcaatcttgggaggatccaactttggctgactggcccgaaaatgattttcggttgttttgtggcgatcttggaaacgaagtgaacgatgatgttcttacaaaggcattttcaaaatatccatccttcaacatggctagggttattagggacaaatggactggtaaaactaggggctatgcctttgttagttttgctaatgcgtcggatcttgctgcagcattgaaagagatgaatggtaaatatgttggaaacaggccaatcaaactacgcaagagcacatggaagaacagaatcgactacgaggcattacagaagccgaagactcaaccacagaagaagttcaaagcgcagaaaaaaagcattctacacaagtga

SEQ ID NO: 82727 - DNA, 1593 bp, Oryza sativa
  Clone ID: PAT_MRT4530_82128C.1
atggcggaagaaaaagaaagctttgaaagccaatgggcgtcgtccgacttgatggaggagaacttgaaggagatggtggcgcacggcgttctcccagcaaaggagatcatcggatggcggccagcatttggtgaagctttcctgacccccgatacacatgaggtcgtgtttttccgtgggatattgaacttctatggaatcaatttacatcatttgaatccaaactccatagtccatattgcaaatttcgtccatgtctgcgaagcttttttgggcattaggcctcattttgctctgttccgccgaatcttcttcctcaagccccaaccgaacaaaagcaaaccatgcgtagttggaggggctggatttcaactgagagggaccttgagccaaaagtatttttctatgcccttcaagacctcaaacaaaggatggcatgccaactggttttatgtccaaaatcccgagcccgctcttcccgagtactcctgtcttcccctagtataccaagataattggaactcactgcccatgggagatgaagctgcccaagccttagaactgatggagcgcatgctgaagctcaaggagcaaggcttgcagggagagcaaatcactcggcatttcattaagtgccgattagctccaatcaaagagagatcccgcacagctttcgagtttgatgtcgtgccatataatgcattcaacccatctccgctggaatttgctttgatgaagtctgaccccccaattgctcaacgccgatctcctcgtcatcagaccgttcaggggagtggaggaccaaaaatcaggtcagactcccaatccaaaactcccaatccgactgggcaatcagattctcgcaagagaaaacttgtgctaagcgacgacgaaggcgacgacaataataaatttggggataagggatcacccaaaaaactaccaaagcacactgctccgaagaagaaaaagttcagaaaatcctccaggaaaccgtctgacatagatccatccgggaaggactctgatccagctaacacagagacaggttcatccaaagaagctgggccgacttctgaggaccacccgactggcgttcagacttcaactgattatgtcaacccaagcgaccagcccccgactggaaaccagttggcagaagcggaaactgcaacaagccaagagcccccgactggcaatcaatcggaagtaggtccagatcaagaaattcctgaagttgaagttcaggctacaacttcccaaggactggacgctggtaacgacccaacgcctgggtccccagataaagggcaaggatcgcctcacgctcaaccggaaattgcttcaggaccactaggcggtgacggagaagaaatccctcgcataaaggcaactactgattctcgtccccccatcttaatcaaatggtgggacgacaacttgcaacctgcaggcattgtcataaatcgacagaaagaagacgaagaggtgcgccagctaaagaaagcactcggaagaagctacccgcattgtaaatgtaagtcttccaggtggctgcctttggcgaccttgtttccttctcagcaagactaa

SEQ ID NO: 82728 - DNA, 2502 bp, Oryza sativa
  Clone ID: PAT_MRT4530_82129C.1
atggcggaagaaaaagaaagctttgaaggccaatgggcgtcgtccgacgtgacggaggaaaacttgaaggagatggtggcgcacggcgttctcccagccaaggagatcatcggatggtggccagcatgtggtgaagctttcccaacccccgatacacatgaggtcgtgcttttttctcactttttctatggcggatttgctcttccaaccacaaagttcttccgtgggatattgaacttctatggaatcagtttacatcatttgaatccaaactccatagtccatattgcaaatttcgtccatgtctgcgaagcttttttgggcattaggcctcattttgctctgttccgccgaatcttcttccttaagccccaaccaaacaaaaacaaaccatgcgtagttggaggggctggatttcaactgagagggaccttgagccaaaagtatttttctatgcccttcaagacttcaaacaaaggatggcacgccaactggttttatgttcaaaatcccgagcctgctcttcccgagtactcctgtcttcccccagtataccaagatacctggaactctcttcccatgggagatgaagctgcccaagccttagaactgatggaacgcatgttgaagctcaaagagcaaggcttacagggagagcaaatcactcggcatttcattaagtgccgattagctccaatcaaagagagatctcgcacagcattcgagtttgacggcaagcatgatccaaaccgtgaacacccagattctctggattttaagatcatgaaggagaggatgtacaagatattctcaaacgccattgtcgtcagttattcgcatctgctgccagtcgtgccatacaatgcattcaatccacctccgctggaatttgctttggtaaagtctgaccccccaatcgctcaacgccgatctcctcgtcatcagaccgttcaggggagtggaggaccaaaaatcaggtcagactcccaatcccaaactcccaatctgactgggcagacaaattctcgcaagagaaagcttatgctgaacgacgacgaaggcgacgacaataataaatttggggataagggatcacccaaaaaattaccaaagcacactgctccgaagaagaaactgtctagccgccccatgccaaagtttacaaaatcctccaggtataaaccatccggtaccgtttcacttcgacatgcttctctcatgaagataatattgaaaactagaaggaaactttgcaggaaaccgtccgacatagatccatccgggaaggattctgatccggctaacacagagacaggttcatctaaagaagctgggccgactactgaggaccagccgactggcgcccagacttcagctgataaggtcaatccatgtgaccagcccccaactggaaaccagtcggcagaagcagaaaccgcaaaaaaccaagagcccccgactggcaatcagtcggaagtaggtccagatcaagaaattcctgaagttgaagttcaggctacaacttcccaaggaccggacgctggtaacgacccaacgcttgggtctccagataaagggcaaggatcacctcacgctcaaccggaaatcacctcaggaccactaggcggtgacggagaggaaatccctcgcataaaggcagctgctgactctcgtccccctatcttaatcaaatggtgggacgagaacttgcaacctgcaggcattgtcataaatcgacagaaagaagacgaggagagaatccatctccgttatgaggccaaaaccacaactttagaaaagctggttcctcatttagggacccttgaagcagttagggatcagctacacgaagccaaagagcttgccaaaaagacagagcatgatctaagagaccggattacccaactccaggattcgaactttgaactgagtggctcatcaaaagtgcaagctgccaagatagctcaactggagaaacgaattgaggccttagaaaataacaaggcagaattggctgcacaaagggactcggctttgaaggaggttgaagaccgcaagatcaagtcccaagcccagttcgacgtcctggttggcaagatcaaaagacttgaaggagccagggatgaggtcgccaatgccgctaccccgcttgtccaggcgatgttctataataacaatggcccgagtagatttcatgcttccgaagtgtttgacaagctgagaatcgctccggacacctatttcaagaacattagagaagccggaagcatgggagcaggtttagcgttagcaatgaccaaatccctgtaccctaagatcgatattgatactgttgatggttttgcggactggacaagcgaagaggctgcccttgatcttatcaacgacgctcaaaaagcagccgacaagattgctggtgacgtcgtagatcggtttcaggataccgaccttcggccgactggtaacaataactctgatgatgagaagactgatactgattaa

SEQ ID NO: 82729 - DNA, 598 bp, Oryza sativa
  unsure (1)..(598): unsure at all n locations
  Clone ID: PAT_MRT4530_8212C.1
agagaggttgccaaccaatttcattaagatntggaggaaatacagtaaaatgttacaatgacattacaataccgcggtagccagtgaaggaccccatccaaccaagaacgagaaaagaaagcagggctaaaccccgcagacagtcatggcaattactcgcgaaattgggagaaaatcccagccaccccccagacagcaatttcctctttaatatcctccgccggttgatccagcgtttgggacacgtgttggaaaatttttgcattacgctccttccaaatcaaccaacaaattagcatgaatgcactatcaaaatccgttctgtagcttgtccggaaacagcgtcttgttgccaaccaccagtcagccagtgtgttctcctcatctgccggagtttggaagctagcattgcaccatcttctttctgataattctccacaccgccgccgtgaagtcgcaaccaacaggtggtggcagtcctcgtcttgaagcttcaagctagacatgccatcgtacatgttatcaggtctatgccagaacggcatatccagcacaaaaccaagccaagcgaattaagggcagaaatgactatcttgac

SEQ ID NO: 82730 - DNA, 2481 bp, Oryza sativa
  Clone ID: PAT_MRT4530_82130C.1
atggcggaagaaaaagaaagctttgaaagccaatgggcgtcgtccgacgtgacggaggagaacttgaaggagatggtggcgcacggcgttctcccagcaaaggagatcatcggatggtggccagcatttggtgaagctttcccaacccccgatacacatgaggttgtggttttttctcacttcttctatggcggatttgcccttccaacctcgaagtttttccgtgggatattgaacttctatggtatcaatttacatcatttgaatccaaactccatagtccatattgcaaattccgtccatgtctgtgaagcttttttgggcattaggcctcattttgctctgttccgccgaatattcttcctcaagccccaaccgaacaaaagcaaaccatgcgtagttggaggggctggatttcaactgagagggaccttgagccaaaagtatttttctatgcccttcaagacctcaaacaaaggatggcatgccaactggttttatgtccaaaatcccgagcccgctcttcccgagtactcctgtcttcccctagtataccaagatacttggaactcacttcccatgggagatgaagctgcccaagccttagaactgatggagcgcatgttgaagctcaaggagcaaggcttacagggagagcaaatcactcggcatttcattaagtgccgattagctccaatcaaagaaagatcccgcacagctttcgagtttgatggtaaacatgatccaaaccgtgaagacccagattctctggactttaagatcatgaaggagaggatgtacaagatattctcaaacgccatcgttgtcagttattcgcatctgctgccagtcgtgccatataatgcattcaacccacctccgctggaatttgctttgatgaagtctgaccccccgattgctcaacgccgatctcctcgtcatcagaccattcaggggagtggaggaccaaaaatcaggtcagactcccaatccaaaactcccaatccgactgggcaatcagattctcgcaagagaaagcttgtgccgagcgacgacgaaggcgacgacaataataaatttggggataagggatcacccaaaaaattaccaaagcacactgctccgaagaagaaattgtctagccgccccatgccaaagttcagaaaatcctccaggaaaccgtctgacatagatccatccgggaaggactctgatccagctaagacagagacagaagcggaaattgcaacaagccaagagcccccgactggtaatcagtcggaagtatgtccagatcaagaaattcctgaagttgaagttcaggctacgacttcccaaggactggacgctggtaacgacccaacgcctgggtccccagataaagggcaaggatcacctcacgctcaaccggaaactgcttcaggaccactggccggtgacagagaagaaatctctcgcataaaggcaactgctgattctcgtccccccatcttaatcaattggtgggacgacaacttgcaacctgcaggcatcgtcataaatcgacagaaagaagacgaagaggtgcgccagctgaagaaagcactcggagaagctacccgcattgtaaatagaatccatctccgtaatgaggccaaaaccacaactttagaaaagctggttcctcatttagggacccttgaagcggttagggatcagctacacgaagccaaagagcttgctaaaaagacagagcatgatctaagggaccgtgacggagctggtggctcctcaccgggagaccgcgcaggcccccctttgccgcccacacctacctccactcccggcggagacaggcgcaacgcgggatcgtggttgtctgatgctgacgcgaccagtgtcagaccggtcacagatcggtcattcttgtcctctatgcgtcagttcagcgatctgcatgatcacccttctttttgtagcatcctgcctgtaatggttgggatgaagcctggtattcatctaaccagggctaacgtgccatctctaagagaccgcaagattaagtcccaagcccagttcgacgtcctggttggcaagatcaaaagacttgaaggagccagggatgaggttgccaatgccgctaccccgcttgtccaggcaatgttctataataacaatggtccgagtagattcgatgcttccgaagtgtttgacaagctgagaatcgctccggacacctatttcaagaacattaaagaagccggaagcatgggagtaggtttagcactagcaatgaccaaatccctgtacccgaagatcgatattgatgccgttgatggttttgcggacgggacaagcgaagaggctgcccttgatcttatcaacgacgctcaaaaagcagccgacaagattgcaggtgctgtcgtagatcggtttcaggataccgaccttcggccgactggtaacaataactctgatgatgagaagactgatactgattga

SEQ ID NO: 82731 - DNA, 536 bp, Oryza sativa
  Clone ID: PAT_MRT4530_82131C.1
atgccgcacgaatcgggaccaaagagctcgaggtccggaggaggaggaggaggtgaagtccctcgtcgacggtgttcgtccccacgtggttttctgcccgactactcctacagcaagcactgcatcctagacggcttgaagggggaagcggacggcatgagggtgaagacctcgagtttcccgacgtcttttgggcatccggcgggcggccctgggtgcagttgcttcccggccccagtaagctctacctcgggtccgcgccgcatggatctctgacgaagagggcaccgccgcaaggaattctgttgtttccaccccgctccccgcatgcaccggagtgctgccgtcaccgggttttgctgcagattgagcatcgtcttccatccgttcgcttcgcagcgtggcctgcgggtgtctggaccccacatgtcatcagaacatattgcaaaacccttctctgtcttccccaaatcccccatccccaccgccattctcgacggtttctcgagctccacctcctcgcgtgcccacgccat

SEQ ID NO: 82732 - DNA, 2861 bp, Oryza sativa
  Clone ID: PAT_MRT4530_82132C.1
ctagagaagggtgaagttgttcctaagacttgcatctggcatttgtaactcattgatcctacgtccgcttgaacgggtccatcctgtaacagcttccaaggttagggagttcccaagagtctcgggaacgttgctctgcttgttgatcttcgatggtggaggggcaactatcttgtcagctgtaacgggtaggatcttcttgcccgtggggttaccgagcggtgatttgtcgatgggcctccagattggagcaataccaggtgcattgctagaactgacaacagttgggcgacccggtgctgacaacacttgctgcgggtgctgacgaaggagcgtaccgcctctttgtagctgtagcgagctgttgttctcctggcattgcttaccctgctggcgttggtgttgtaggcttgaaacgattgccggtggaacaatgcgacctttgacggtgcccttgacgataatccgttggggcggaggttgcacattcaggtgtcgtttggtgtcgtgggcagtgctggtaacttgtgaatcacgacgaactgcctttgctgctcttggaagaggacaatcactgaaacgatgtcctggcttacgacagttgcgacataatcgacttgcttggtcttggggtgcaggcttctgattatgcactttggcagctgaaacgggaacaagcagaggcttatgaacatccttggtgacgttgcttcttccatggttggcttccactggagctggagttagagaaagagcagaaggattgtgaccgctgttgtcgattgtcattggttgacgaatgggttgcacggttgtcccttgttctttcttggtcttagctatgaccgcgttcaactgacagtccttaggcacatgatcacagcggcaggtggggaggcataaactagcagtgtgtccgactatcccacatctagcacatgctttgaacttcaactctctttccctgaaactgtcaagggtcgcatcatcattgtcatcattatcatcatcgttgtcgtcatcgtcgtcagcagaaaaccgttctcgcttgggtatccttgctgcatcttcaggagtaaattctgaactggtgatgatgatggtcctgccattatccatcttccatatcactgtcctattcgctccagagttgcgctgcaaagtaccatccttcttgtcggtagactgacttggagcttggttactccctgggcactgcttctcgtctttttcaggtgacctggcgaacaccttccatggacagttccttacataatgaccttgctcaccacagtcataacaggtagcacttactttcctttggtctgacgttgacttggctgtcgttatcttcggggatcttgaccgcattttgacaggggtcttcggtgccgatattgggaactcttgatcatcgcggaacgacgactttgaactgatcttctcgctccttgcacgaagcttgcatgcctgcaggtcgactctagaggatccccttagctccaatcaaagagagatctcgtacagcattcgagtttgacggcaaacatgatccaaaccgtgaagacccagattctctggactttaagatcatgaaggagaggatgtacaagatattctcaaatgccattgtcgtcagttattcgcatctgctgccagtcgtgccatataatgcattcaatcctcctccgctggtcaatccaagcgaccagcccccgactggaaaccagtcggcagaagcagaaaccgcaacaaaccaagagcccccgactggcaatcagtcggaagtaggtccagatcaagaaattcctgaagttgaagttcaggctacaacttcccagagaccggacgctggtaacgacccaacgcctgggtctccagataaagggcaaggatcacctcacgctcaaccggaaatcacctcaggaccactaggcggtgacagagatgaaatccctcgcataaaggcagctgctgactctcgtccccccatcttaatcaaatggtgggacgagaacttgcaacctgcaggcattgtcataaatcgacagaaagaagacgaagaggtgcgccagttgaagaaagcactcggagaagctacccgcattgtaaatagaatccatctccgtaatgaggccaaaaccacaactttagaaaagctggttcctcatttagggacccttgaagcggttagggatcagctacacgaagccaaagagcttgccaaaaagacagagcatgatctaagggaccggattacccaactccaggattcgaactttgaactaagtggctcatcaaaagtgcaagctgccaagatagctcaactggagaaacgaattcaagccttagaaaataacaaggcagaattggctgcacaaagggactcggctttgaaggaggttgaagaccgcaagatcaagtcccaagcccagttcgacgtcctggttggcaagatcaaaagacttgaaggagccagggatgaggtcgccaatgctgctaccccgcttgtccaggcaatgttctataataacaatggcccgagtagattcgatgcttccgaagtgtttgacaagctgagaatcgcttcggacacctatttcaagaacattagagaagccggaagcatgggagcaggtttagcgttagcaatgaccaaatccctgtaccctaagatcgatattgatactgttgatggttttgcggacgggacaagcgaagaggctgcccttgatcttatcaacgacgctcaaaaagcagccgacaagattgctggtgacgtcgtagatcggtttcaggataccgaccttaggccgactggtaacaataactctgatgatgagaagactgatactgattaa

SEQ ID NO: 82733 - DNA, 300 bp, Oryza sativa
  Clone ID: PAT_MRT4530_82133C.1
atggattctctgcgcaatgattcacggtttagtcttgctgagaaggaaacaaggtcgccaaaggcagccacctggaagacttacatttacaatgcgggtagcttctccgagtgctttcttcagctggcgcacctcttcgtcttctttctgtcgatttatgacgatgcctgcagattagcattacttgagaagataggttacctgaagcagtttccggttgagcgtgaggtgatccttgccctttatctggggacccaggcgttgggtcgttaccagcgtccagtccttgggaagtcgtag

SEQ ID NO: 82734 - DNA, 192 bp, Oryza sativa
  Clone ID: PAT_MRT4530_82134C.1
atgccgagaagaagacgagaggcggatgcagaggacgcctctccattgcatctcatccggatgcacagcacgttctatcttctcgtctccaagggcagggaccagccaccatccaggcagccgataggaagcgtcgacagcgataccgccttggcggcttggccgatgggcgacggcgatcaggcgctatag

SEQ ID NO: 82735 - DNA, 2469 bp, Oryza sativa
  Clone ID: PAT_MRT4530_82135C.1
atggcggaagaaaaagaaagctttgaaggccaatgggcgtcgtccgacgtgacagaggaaaacttgaaggagatggtggcgcacggcgttctcccagccaaggagatcatcggatggcggccagcatgtggtgaagctttcccaacccccgatacacatgaggtcgtggttttttctcactttttctatggcggatttgctcttccaacctcaaagttcttccgtgggatattgaacttctatggaatcagtttacatcatttgaatccaaactccatagtccatattgcaaatttcgtccatgtctgcgaagcttttttgggcattaggcctcattttgctctgttccgccgaatcttcttccttaagccccaaccgaacaaaaacaaaccatgcgtagttggaggggctggatttcaactgagagggaccttgagccaaaagtatttttctatgcccttcaagacttcaaacaaaggatggcacgccaactggttttatattcaaaatcccgagcccgctcttcccgagtactcctgtcttcccccagtataccaagatacctggaactctcttcccatgggagatgaagctgcccaagccttagaactgatggaacgcatgttgaagctcaaagagcaaggcttacagggagagcaaatcactcgacatttcattaagtgccgattagctccaatcaaagagagatctcgcacagcattcgagtttgacggcaagcatgatccaaaccgtgaagacccagattctctggactttaagatcatgaaggagaggatgtacaagatattctcaaacgccattgtcgtcagttattcgcatctgctgccagtcgtgccatacaatgcattcaatccacctccgctggaatttgctttgataaagtctgaccccccaatcgctcaacgccgatctcctcgtcatcagaccggtcaggggagtggaggaccaaaaatcaggtcagactcccaatcccaaactcccaatccgactgggcagacagattctcacaagagaaagcttatgctgaacgacgacgaaggcgacgacaataataaatttggggataagggatcacccaaaaaattaccaaagcacactgctccgaagaagaaactgtctagccgccccatgccaaagtttagaaaatcctccaggtataaaccatccggtaccgtttcacttcaacatgcttctctcatgaagataatattgaaaactggaaggaaactttgcaagaaaccgtccgacatagatccatccgggaaggattctgatccggctaacacagaaacaggttcatccaaagaagctgggccgactactgaggaccagccgactagcgcccagacttcagctgataacgtcaatccaagcgaccagcccccgactggaaaccagtcggcagaagcagaaaccgcaaaaaaccaagagcccccgactggcaatcagtcggaagtaggtccagatcaagaaattcctgaagttgaagttcaggctacaacttcccaaggaccggacgctggtaacgacccaacgcttgggtctccagataaagggcaaggatcacctcacgctcaaccggaaatcacctcaggaccactaggcggtgacggagaggaaatccctcgcataaaggcagctgctgactctcgtccccctatcttaatcaaatggtgggacgagaactcgcaacctgcaggcattgtcataaaccgacagaaagaagacgaggaggtgtgccagctgaagaaagcactcggagaagctacccgtattgtaaatagaatccatctccgtaatgaggccaaaaccacaactttagaaaagctggttcctcatttagggacccttgaagcagttagggatcagctacacgaagccaaagagcttgccaaaaagacagagcatgatctaagggaccggattacccaactccaggattcgaactttgaactgagtggctcatcaaaagtgcaagctgccaagatagctcaactggagaaacgaattgaggccttagaaaataacaaggcagaattggctgcacaaagggactcggctttgaaggaggttgaagaccgcaagatcaagtcccaagcccagttcgacgtcctggttggcaagatcaaaagacttgaaggagccagggacgaggtcgccaatgccgctaccccacttgtccaggcgatgttctataataacaatggcccgagtagacttgatgcttccgaagtgtttgacaagctgagaatcgctccggacacctatttcaagaacattagagaagccggaagcatgggagtaggcttagcattagcaatgaccaaatccctgtaccctaagatcgatattttgatggttttgcggacgggacaagcgaagaggctgcccttgatcttatcaacgacgctcaaaaagcagccgacaagattgctggtgacgtcgtag

SEQ ID NO: 82736 - DNA, 657 bp, Oryza sativa
  Clone ID: PAT_MRT4530_82136C.1
atggccattggaggggcggatctaacaccttcacacccggatccaaccctctcttggttggatctggctgttgcgcaaggcagtgggtgcccggcgcagggagtgttgccgggagaggatgtgtcggcggacaaccagcgtagcgtggaggcgggctggcggcgaggcggcatggccggcgtggcgcggactgccgagaagaccaacacggtgaggccacggcaacgtgaggcctgtgtgaggcagaagcagcaagtggcacagtggactggcgtggtcggaggcaccgcctgtgcggctggagcccacatcacggaggcgcaaaggtcgatagaggaggcgtcggcaacgcggggacaagtgcggtcagcgagggtggcacggaggctcgtggtcgtcaagcatggtgcgcagcctacagtggtgtggcagcgagcttggcatggtaggaggacggcaaggctagagtggcgtggcggcgaggccaccgtggtgggaggacggcaacttgaagaagggcatgcctcgttctccaccttggaaataaatcaactgagaaccgccaagcactcggtcagcaatcaagttgaccttttgctaggtcttgatgatgacaacatcatcgatatatggctccacattgcgctcgagctgtga

SEQ ID NO: 82737 - DNA, 369 bp, Oryza sativa
  Clone ID: PAT_MRT4530_82137C.1
atggacggagattggtatggttgccgtccgaatgacacttcgataggacagcccacacctacctccactcccggcggagacaggcgcaacgtgggatcgtggctgtctgttgctgacgcgaccagtgtcagaccggtcacagatcggtcattcttgtcctctatgcgtcagttcagcgatctgcatgatcacccttctttttgtagcatcttgcctgtaatggttgggatgaagcctggtattcatctaaccagggctaacgtgccatctctaagaggtaacacgctagctccggctggagacgtgtgcctagaggctctcgtcttgacgggacggggcgaggcgtgcgtcagaccaccagtcgccacc

SEQ ID NO: 82738 - DNA, 2115 bp, Oryza sativa
  Clone ID: PAT_MRT4530_82138C.1
atgacggaagaaaaggaaagctttgaaagccaatgggcgccgtccgacgtgacggaggagaacttgaaggagatggtggcgcacggcgttctcccggcaaaggagatcatcgggtggcggccagcatttggtgaagctttcccaacccccgatacacatgaggtcgtggttttttctcacttcttttatggcggatttgctcttccaacttcgatgtttttccgtgggatcttgaacttctatggaatcaatttgcatcatttgaatccaaactccatagtccacattgccaatttcgtccatgtctgtgaagctttcttgggcattaggcctcattttgctctgttccgccaaattttcttcctcaagccccaaccaaacaagagcaaaccatgcgtcgttggaggggctggatttcaactgagagggaccttgagccaaaaatatttttctatgcccttcaagacctcaaacaaaggatggcatgccaactggttctattactcctgccttcccccagtataccaagatacttggaactcactgcccatgggagatgaagccgcccaagctctagagctaatggaacgcatgctgaagctcaaggagcaagcttttgagttcgatggaaagcatgatccaaatcgcgaagatctagattccctggactttaagatcatgaaggagaggatgtacaagatcttctcaaacgctatcgtcgtcagctatttacatctgctgccagttgtgccatataatgcattcaacccccctccaccggaatttgctttaatgaagtctgaccccccaattgctcaacgccgatctccccgtcgtcagacaatccaagggagtgggggaccaaaaatcaggtcagactcccaatccaaagctcccaatccgactgggcaagcagattctcacaaaagaaagcttgtgctgagcgacgacgaaggcgatgacaacactaaacttggggatatgggatcacccaaaaaattgccgaagcacgctgctccgaagaagaaaacgtctagccgccccatgccaatgttcagaaaatcctccaggaaaccgtctgacatagatccatccgggaaggactccgatccagctaatacaaaagcaagttcctccaaagaagctgggccgactcctgaagaccacccgactggcgctcaagcatcaactgacaatgtaaacccaagcgaccaacccccgactggaaaccagttggcggaagtagaaaccgcagccagccaggagcccccgactggaaaccagtcggaagcggggctagaccaggaaatccctgaggttgaaactcaggctaatgtttcccaagaaccggacgctgataacgacccgacacctggatcatcagataaagggcaaggatcacctcgcgctcatccagaaacttcttcagggacccttgaagctgttagagatcagttacacgaaaccagagagctcgctaaaaagacagagcacgatctaagggaccggattgctcaactccaggattcaaactttgaactgagtggctcatcaaaagtgcaagccgccaagatagctcaactggagaagcaaatccagactttggaaagtgacaagacagaattggccgcacaaagggactcggctgtgaaggaggttgaagatcgcaagataaagtcgcaagcccagttcgatgtcctggtcggcaagattaaaagacttgaaggagccagggatgaggtcgcaaatgccgctactccgcttgtccaggcaatgttctataataacaatggtccgagtagattcgatgctttagaagtatttgacaagctaagagtcgctccggacacctatttcaagaacatcaaagaagccggaagcatgggagcaagtttggccctggcgatgaccaaatccttgtatactaaaatcgacattgacgccgtcgatggttttgcggacaggacaagcgaagaggttgcccttgatctcatcaacgacgcgcaaaaagcagccgacaaaattgcgggtgatgtagtagatcggtttcaggataccgaccttcggccgactggcagcggcaactctgatgatgataaaactgatactgattga

SEQ ID NO: 82739 - DNA, 725 bp, Oryza sativa
  Clone ID: PAT_MRT4530_82139C.1
ctttcatgtgcaatccattcttttgcaacctgtatctcagctgcataactatttaaggagtggcaactattgctttctctttactccctgttttccagaaccctgagtttcggaccatacgagcatgcctcttctttggcatgggtgcatccggcgtgatccctgtcattcacaaattgatcctcttttggcaccaaccagaggcattgcacactaccgcatatgaggttctgatgggccttttctatggcattggggcactggtgtatgcaactcgggtgcccgagcgctggatgcctggaaaatttgacattgctggtcatagccaccagctttttcatgtgttagttgttgctggagcatacacacactatcattctggactggtatacctcaagtggagagacgtgcaaggctgctagaaattatctgtgtgctcgtaggatgtggatagattgtaggtgccctgcttgtgtcccgaaaaagaggaccgctgattctctctcgtcttcagaaacaaaagatgactgttgttgttggccaaaagactagacctggtctgttgtaaaatgtaacggaggacttgctagtactgtgagatacaaattgataatgagtgatgatcggtacctgtaaactgtggtgtggtattggctgatttttcagggtgcaactcccttgataaatcaggccctattattcccagaaaataactattcagtgat

SEQ ID NO: 82740 - DNA, 1071 bp, Oryza sativa
  Clone ID: PAT_MRT4530_8213C.1
atggctcaaaatgggccttcgaagggtgttaaaatgcccatgggctctgctgattggaatgactacaacactagagttgtctatgagatttttgttgagcaagtagatgcgggtaatcgtccaaatacctatttatctaatcctaggtatgatgaagtcattgagaaatttgcagcaagaacaggatgggataacacaaaggaaactgttacagctactgtggaacgttggaagcaattgaaagcagatacaccaggatgcaccaagtttatgaagtccttcactaaaacaagagaggatcctccggattgttctataaaggatgttatggccttggtggaggaatgtggtgctgttgaacagataaatgagtatttcattgcaattgaaatatttatcaagaaggatcaaagggaaatgtttgttaattatttgcgcactcctacaggtcgctttggatggcttaagaagaagtatgaagtgaaatgtcaaagtgagagtaaaaatggttcatcagatgaagaatatgaatttgatttgcttgccataattgcagagaactattactctctctacttggataaggctgagcctaggacatcacgtctcagtggaatgggatgggtgcaagaaactttggccacaccaggtgaatgctacaagatgcttcgtatgaatgaccacacctttattgcattaaatgattttttggttagtaaatataagctggaacttactgtacacatgcatacattagaggcacttgcaatttttctctacatactaggtgatggttcatcaaaccaaagggcacaaaaccgtttcaagcattgcggtgagacaatttcaagaaaatttgaaatactctacgtcgtagtggatttgggacgtgatattgtacgtccaaataatccaaattttcctactgtccatgacagaattaggaaagatcgtcgcatgtggccacattttaacgattgcattggagcagttgatggtactcatatctttgcattagttccagatgatgagaagattagatatatcggtacatctaaatcaacaacttaa

SEQ ID NO: 82741 - DNA, 1307 bp, Oryza sativa
  Clone ID: PAT_MRT4530_82140C.1
ggttgtaataaatgttccgtttaagcaagcatgctctgctgtagctgacatgacgtcgaaatacaaatacgcacttgcatatacaagttaaaaaaaaacactttgctgcagcatcacttgcaaaaacacaattgtcattgcttacagtgcaatagcttgtgctggttagaacaaaaaataacgctcctcttatcttacatggctcatcctcatctccaggaccaaaatgggacatcgttccaactatctcgttaagtgaagtaacagcagcaaacttaaacctcactcgatttctgctcagaattttctgctgcctcctccgtggtcgtggggcctccctctgtaacaccgacttctgcagggcgcagaacacggtcatgtagcatgtagcccacctttacaacagaagctacagttcctgaaggtttcgaggggtcaggaatttgaaagattgcacaatgtctactaggatcaaatttctcattcaaaggatcaaacttttcaactccaaacttcttaaaaacctcaccaagttgtttatctgtcatgtccacaccctccaacagtgtttttagtagtggaacagctccagtagaatctttagatgtatctatttttgagaagctttccttaacaacagatgatgctctagtcaaattgtcagcgacatctaacaggctcttggagaaattctgcacagcatacttttttgagttctcagattcacgctttgtcctagctatgacattttccatttctgcataacttcgcaaaaccttgtccttcatatcattgatttcttcatcttttgacttcaacaatccatccttctcaagaactagctgcaccagatcctcctttgacaaatcaacgtcttcagtgccttcatttgacacatttgtggaattctcctggtccttgcgttggttttcctccttatcacttagttccggggaagtggatgaaaatccaaaacgttgaaaaatggtggttgagtatctcaagggctgattcaacatatatgggaccccgagccacggctccgcagccgccgccttcgccgcggtcaccacgggcagcgacagcgccgccgccgggcaccgccgccgcctcgcggccgacgccgccaccgcggcgacgcattgcctcgacgcccgcgcgaggaggcgcgacgccgccaccatctggtcggtccccctctacgtacgcccgcggccgagtcgagggggggaggatcggagcggctcggttggcggcggcggcggaagcttctggaagagaacggcacagctttagcttgcgagagg

SEQ ID NO: 82742 - DNA, 252 bp, Oryza sativa
  Clone ID: PAT_MRT4530_82141C.1
atggaccaagcacacgagcgcgctgagctgacgagccgcacagaagcaacgcagcagagcgaacgcaaacgccgatcgcccagcacggcagctaccgcaggccgtcaacaccgcacaagctcgatcgaacggacagcacagcaggcaaggagagatggccagccccagcgctcccagcgccggatgacgtgccgcgccccgacagcatccacgacagcccgaaaagcggagaagcgagcaatcgggggctag

SEQ ID NO: 82743 - DNA, 114 bp, Oryza sativa
  Clone ID: PAT_MRT4530_82142C.1
atggaagaagcaaatgcgatcttcatagaccccctggacaccatcgcggtggactccatgaacaaggagaaggccacatcttccgccagcgagcattatgtgggatctcttgat

SEQ ID NO: 82744 - DNA, 253 bp, Oryza sativa
  unsure (1)..(253): unsure at all n locations
  Clone ID: PAT_MRT4530_82143C.1
ctgtgtggggggatcgagaggntcgagaaggaagccgctgagatgaacaagaggnccttcaagtacgcgngggtgctcgacaagctcaaggccgagcgtgagagaggtatcaccattgatatcgccctgtggaagttcgagaccaccaagtactactgcacggtcatcgatgcccctgggcaccgagtctatatcattttttttttcacgggnaccncccaggctgactgtgccgggctcaggggtgactaca

SEQ ID NO: 82745 - DNA, 1772 bp, Oryza sativa
  unsure (1)..(1772): unsure at all n locations
  Clone ID: PAT_MRT4530_82144C.1
atggaagggaggagcgggtctctcaagaaggcaacttggattcatggcgagttggcgctgcgagtttaccggcgggcggagtggcgcgacggcggccggagcagcggcgcgctgaacggcggcaatccgccgggcctcacgggcgaaggatcgtggccaccaccaccgccacgggccccctccctccgcggcgttcaggtcgtcgtcgtggccgctccctcgcgccgcagccgcatggggacctcgtcccttccgccaccgcgccgcgtgccggaatcaaaccttgccgatgaggttgactggaggtcggacgaggagttcaagaggttcatggggaacccgtccatcgaggccgccatggctccatcgagctggagaagaagcgcgccgaccggaagctccgcgagctcgatcgcgagcccgacgccaacccgctcgccggcctcctccgcggcctcgccagggactagcttgccgagaacaccgcggtcagcctccctgccattcccacctcacgcttgctctcggatctgcgcgtgcgggggtgacgtcgtctggtgtgcggttgtgctcgtcggcggcagagttgcctccacctccacctccacccgccttagtcgcctcccgccgccgcgctttgcccaccgtcgcagtgaaggaaggagagccggccggaaatccctcaccgcggccacaatatcgcggccctctctcctgctcgtctcgtctcccttcctcctcgtcttcggcggcggcgcggcggagatgttgtccggcgacatacccccgaaccagacggtctacctcaggaacctcaacgagaaggtcaagaaagaagaattaaagagatcactctatgcgttgtgctcccaatatgggaggatactggatgtggtggccttaaaaacacctaaactgagggggcaggcatgggtggtcttcagcgaaattaccgccgccacaaatgctttccgtggactgcaggaattcgatttttatggcaaaagaatgcgagtacaatatgcgaaaacaagatctgactgtcttgcaaccgaagatggttctactgctccaaaagagaaaagaaagaagcaagaggagaaagcagcggagaaaaaacgacgagctgaagaggcgcaacaatctggtcctaatgctgctgcccaaagcaatgggactggttatcaagcctcacgcctgggcaagacttcgcaagagccacctgcacctccaaacaatatccttttcatccagaacttaccagctgagactacaagcatgatgctccagatcctgttccagcagtaccctggtttcagggaagtccggatgatcgaagccaagccaggcattgcttttgtggaatacgaggacgacagccagtctatggttgcaatgcaagctctgcagggtttcaagatcaccccatacaacccaatggctatatcctacgcaaagaagtgaatgatccatgggatcccacaatctggcaagaaaacctctgtacttgtaagactttccgcccttagctttcaaactgctgtatcagttttctaacactgtatttttggaaagcaattgcttagtttagaagtctttgttgcttaaaaaaaaaaaaaaaaacattctttttaataaccctgcttttgatgctggcatgtctggtattgtggcctttgtaggctacattatcttttctcctacactggtggtagaagttagaagatgtatcccttccttanagccaagagaaatcatgccctatattccct

SEQ ID NO: 82746 - DNA, 1628 bp, Oryza sativa
  Clone ID: PAT_MRT4530_82145C.1
gacgagggtcgtcttaaaccatccagctagaatacaacatcctcttaattccggccttaatggaggtagcactctgtgcatcctttgttgccattctgctaaccaccatgctcttcctaaaagccatctcgacgaggtgccgccgtcgaaagtataacctcccgccgggtcccaagccatggccgatcatcggcaacctaaacctcgtcggtgcgctcccacaccgttccatccacgagctctcaaggcgctacggcccactcgtatacctccggttcgggtccttccccgtcgtcgtcggctcgtccgtcgagatggccaggttcttcctcaagacgcgcgacgcggcgttcatcgaccgccccaggacggccgccggcaagcacaccgcctacaactaccgcgacatcacgtggtcaccctgcgacgcgtactggcgccaggcgcgcagggttgtcctcaccgagctcttcagcgccaggcggatcgagtcgtacgagcacatccgccgcgaggaggttcacgcgctgctccgtgatctgcactacgcgtcgtcgtctggcggccgacgagctatcgtgattaaggactacctgtccacggcgagcctgaacatgatcactcgcatggtgatgggcaagaggtacgtgcagggcgaggtggtccatgaggagccgggatcggcgcggacgacgctggcgcagttcaaggagttgctcgaagagctcttctttctcaacggcgtcttcaatgtcggcgaccagatcccgtggctcgagtggttggacctacagggctacgtcaagaggatgaagaaggtgagcaaggcgttagaccagcttctcgaacacgtcgtggacgagcacagtgagcggaggcaacgtgaggggaacgggtttgtggcaggagacatggtggacgtgctccttcgactcgccgatgattctagcctcgaggtcaaacttagtcgggacagcatcaaggcatttactcaggacctcattgctggcggcacggagagttcatcggagacaatcgagtgggccatctcggagctcctcaggaagcccgagatgtttgcaaaggccacagaggaattggatcgcattgtcggccatagacgttgggtcaacgagaaggacattcttgatctcccctatattgaggctattgtaaaagagaccatgcgccttcaccctatcggacctttgcttgcgccacgcctttcccgtgaggatacgtctgtgggtgggtatgacatacctacgggcacgcgtgtattcgttaatgtgtgggccattgcccgtgaccctacgctatgggacgcatcggaggagttcatgccagagagattcttgggtaagaaaattgatgtgaaagggcaagactttgagctattaccatttgggtctggtcgacggatgtgcccaggctacaaccttgggcttaaggtgatccaattgagcatagccaatctccttcatggcttcacgtggaggctcccgaaggacatggtaaaagaggatttgagcatggaggagatattcgggttatccatgccacgcaagttcccactagaggttgctgttgagcccaagctctctagtcacctctacaaaggtgattga

SEQ ID NO: 82747 - DNA, 278 bp, Oryza sativa
  Clone ID: PAT_MRT4530_82146C.1
tgttgcggataataaatcgggtacttatgtatcgcgtgccatgctcttgcatgattattatttcgcatcatgtgggtaaagtgtacaaactctgcagagttaaaactaattgataagccgtgcttgcggtcatgagcggcatgagcggcgtgtggatatgtattgagtatagacttgtgtttattcttctaaatgctgaaattcaccttcaaattgtgatgagatttgagaatgatcttcttactgccatggatggcaatggggtgaatatttttaca

SEQ ID NO: 82748 - DNA, 440 bp, Oryza sativa
  Clone ID: PAT_MRT4530_82147C.1
catgaataaccaacgatggagctcgtagtggttcctatccatcgtctaagaatgaaatcgtgttagaattagatgatttccttaattagacggtcaagatggtaatttttgtcaccatatccttccataaataagtgattttcatatttataaaatcgttaactcaccaagcaacccaccccaattactgtgaccacccttccatcactctctagtacctcatttagtaagagacatcatggtttttctatgtatacgtgcggtctttaaacttatggaggtgtgtcatccagacactgaaccctcatatatttttttccctaaacttattttgggtgtcatatagatccaacgaattccatctcattttatatgctaacatggcatgtcacggtgcacctatgtatcgatgggacctactacctccgtcccaaaaaaaa

SEQ ID NO: 82749 - DNA, 305 bp, Oryza sativa
  Clone ID: PAT_MRT4530_82148C.1
gacagtaaggacactttattgtttaattgaaatgagaagacaaattaaacgggataagggcgggaacaaaaaaaacaaagcctggggacacaaaacctgaacttatgagcttagggggaacagaacgaaaaaaattatggcccgggagaacgaaaaagccaaaagggagccccaaacccagacgggtacaaaaacggaaacccccaaggggcctaaaaccctaccaaacaccggggaaataaaacccggcataaaaatggggaaaaaaaaccccgggggggttaaaaaagaacaaaaactggggg

SEQ ID NO: 82750 - DNA, 899 bp, Oryza sativa
  Clone ID: PAT_MRT4530_82149C.1
ttcattccaagccactacactagcacacactacatacaatcttcttcttcttcttcttcttgagttcttggaggtcgaggggtgggtcatcaatggcggaggtggaggtgagggtgaggcaggagcaggtggcggagttcagggagacgttcgcgttcttcgacaaggacggggacgggtgcatcacgctggaggagctggacacggtggtgcggtcgctggggcagacgccgacgagggaggagctcgccgagatgatccgcgacgtcgacgtcgacggcaacggcaccatcgagttcgccgagttcctcgccctcatggcccgcaaggcctcgcgcggcggcgagaacggcggaggaggagacgactccggcgacgccgccgacgaggagctccgggaggcgttcaaggtgttcgacaaggaccaggacgggctcatctccgccgccgagctccgccacgtgatgatcagcctcggcgagaagctcaccgacgaggaggtggagcagatgatccgggaggccgacctcgacggcgacggccaggtcaacttcgacgagttcgtcaggatgatgatgctctccgaccaataattaatctcctctctactatatatccaaaatcaatatatctctctccatttcattttgttttttttcgatctcttctttctttctttcttcccaatttgattagttacctaactaattaaggtagctagctatagctactgtcatttaatttggccttggttaattagttccttgattaatgtatttgtttgtatgaccaaatcatacatacatgtatgtccattaatttttgcatgcaaatggaagtatatacatatatctccaaatatatgtcaataatttttttgttgcaaaaaaaaaaaaaaa

SEQ ID NO: 82751 - DNA, 1650 bp, Oryza sativa
  Clone ID: PAT_MRT4530_8214C.1
atggctcaaaatgtgccttcgaagggtgttaaaatgcccatggactctgctgattggaatgactacaacactagagttgtctgtgagatttttgttgagcaagtagctgcgggtaatcgtccaaatacccatttatctaatcctgggtataatgaagtcattgagaaatttgcagtaagaacaggtttaaggtacactagacttcaaattaagaataagtgggataagcatagggttgagtacaattgttggaaaaagttgacatctcaaacaggattaggatgggataacacaaaggaaactgttacagctactgtggaacattggaagcaactgaaaggagatataccaggatgcaccaagtttatgaaagctggcttgcaaaatgaagagctactgcagaaaatgtttgaagatattcgcaataccggtgccgaccattggtctttagggcaaagcaccataccaacacccaccaatgaggcaattcatattgctgatgataatgagattgatgaagagacggaggatgatgaaccaagtgcaaaacgaaagagaggtggtggctcaaaggtggataagtccaaaaagagcaagagtggatctcaaaagatgatgtcaagtgatagtgaagatggttcttcagatgaagaatatgaatttgatttgcttgccatggaattgtttgaaactgctgtaggcaatttttctacaactcgaagaattgcaaagaactattactctctctacttgaataaggctgagcctaggacatcacgcctcagcggaatgggatgggtgcaagaaactttggccacaccaggtgaatgctacaagatgcttcgtatgaatggccacacctttgttgcattacatgatcgtttggatccaaactttcctactgcccatgacagaattaggaaagatcgtcgcatgtggtcacattttaaagattgtattggagcggttgatgggactcatatccttgcagtagttccagatgatgagaagattagatatatcggtagatctaaatcaacaactcaaaatgtgatggctatttgtgatcatgatatgcgatttacctatgcatttattgggcaacctgggtcaatgcatgacataaccgtgttatttactgcacttcaaactgatttaactatctttcctcatcctccacaagggaaatattatcttgtcgatgctggctatccaaattgcccagggtacttagcgccatataagggacaaagataccatgtcccagaatttcgaagaggtacagcaccgagtggtgagaaagaaaaattcaacttcttacactcgagtctgcgcaccatcattgagagatgctttggtgtatggaagatgaagtggtggattctactcaaaatacctagctttccaatgtggaaacagaaaatggttgtggcggcaacaatggcattgcataatttcattcgtgatcatgatgcaccggataggcattttcataggtttgagaggaatccagattatgtgcctaccattccatctagatttaggagatatgtgctttctcaagatgcatcggatacatctactgagggtcaaagtgatgtatccatggatgtatttcgtgatgacctagccggttgtattgcaggatga

SEQ ID NO: 82752 - DNA, 650 bp, Oryza sativa
  Clone ID: PAT_MRT4530_82150C.1
gttgagtggattgaaatagtgttactatttcctggcctggaccatcggttgaacaagaaaaaaccaggatccttagcttaaaaaaccaggcaacaatatttcattcagccaatatgtgggcctaatgatgatccaaactttttgatggcccagaacatttgatggttaaatgtttgataaaatgtgacatagactgggatcgaaaccttggctgctagctagtgcatgctagctagagcaggaggtgatgttggctggaaagaacaggaaaacaataagaaaagtttataccaatatttgagaattgagatccaaaccttggttactgctttttctgtttttgacatggaattggagagaatataactgagtaaaggtggtgcagcgcctatttctctgatcggttctgtctcttcagggtttgaaataaatatttatgccatgctacggaatattttgtgtagcccccataaagccagtatgtttaaagctagtttgcagtttaggaaaaaaatctgcttatcttatgacaatgcaatacaccattacagtgcagaatagctaccaaccctctttgtcctgaactttttgtaatttagccctttctggtttcttgggaaaactaattgcaggaatgtcccctttgctcc

SEQ ID NO: 82753 - DNA, 1193 bp, Oryza sativa
  Clone ID: PAT_MRT4530_82151C.1
tttttttttttttttttttttttttttttggccgaagtaccagataggatatatgagagcatttgctggtcgtcagccaaccacctgaatctctcaggttttatggtcaaggactctggactttcaggcgcccaagagcttggcaagcgcattacaccacggttgcaactagcaacattaaaagctccaccaggaacaaattctggttacgggttcgggctactattgacgatggtgaaatcgcgcggtcagttatcaaactctacttgggtaagattgaggtcagcttcctgtgacgctgccagaaggcggcgtcgctcttctcctgagccagcagctcctcgaatgtcatctctgcggcctcggtggcaagggcatcctcacgttcggccttctccaccaacgcactaagctcaatcaacagtttgtatgactctgacatctgaagctgctcttgaatatagttgtagatatccgcatccttctttagccttttgtgctcggcttccaatttatgcacctgttcgcagaggcggtcataactgttagccctgcgactacaagggttggatagtaaggccttctttattctgcagcttctttgaaccatctccgacttgtgcagcagttcatttcttgcatctaccaaacagttaatgaactcgtgaaccttgccagtatcattccttttagcacgaacaatttggtacatctcatcatacacctctgtgatccgccgtctcgttgcacggcacaacagcaggagggggaaaggcgatgtttttgcctcctttttctcgtgaacagacaccacctcacccaagcccttctgcttccccctcctcccccgcctcctctttcctccactctcgctaccaagcggcgtcgaacattgggatgattcaggaggtgaggagtgctggtagggggaatggagaaacgtgttggcgaggatagtaaggaagaaacgaacaagggaagtactgcgcagcagggcgaggaagagcgccgcgagggctacgacgaggaggacgatgagtgctagttggtgcggcggtgagtccatcgccggcgagagctcgtcgtcatccccaggcgggagctgatatatctttttttttctttttccttttaaaattttattttctctcgctggagtgcggttgggaaatcgaagtggggtgccctcgtgc

SEQ ID NO: 82754 - DNA, 942 bp, Oryza sativa
  Clone ID: PAT_MRT4530_82152C.1
ccggccgggccctagttcgccggcggcgtcaaaccctagcgccgccgccgccgccatgaaccaccttcgaaaccagatccttcttctccgcgtccgctcctccagcacctcgctctctcccctctcccctctccaccgcctcttctcctcctccaccgccgccgcatccatcgccgcagaacccttcgccgtcgaggactacctggtcaccacctgcggcctcaccggggaccaagcgcggaaggcggccaagactctctcccgcctcaggtccccctccaagcccgacgccgccgtcgccttcctctccggcctcggcctctcgcgctccggcatcgccgccgccgtggccgccgacccgaggttgctgtgcgccgacgtggagaagaacctggccaagcgcgtcgccgagctcggtgagctgggcatctcgcgctcccagatcgcgcgcctcatcccgctcgcccgtcagtccttccgcagcagctcgctcgccacgaaccttggcttctggctcccggtcttgggctctttcgagaatgtgctcatggcgctcaaggcgaacggagcgattcttggctccgacgtcgagaaggtggtcaagcccaacctggccctcctccagcaatgtgggatacatgtctgcgatttcccccatacacgcctgcccactgtgctctgcaggccacccaaccatgttcaagaagctgtggcacgcatcggtgagtttggcgtgccacagtactcaccggtgttccgcaatgcgcttgtgccatttgcttaccaaaacaaggagaagctcgctgccaaaattggagtccttgaaatgtttgggtggtcagaggacgatctctcgatgactatgaggaagggtcctgtcgtcatgaacatgtctgtggaaaggctgaggaaaaatgtggagttcttgacaagggatgttaa

SEQ ID NO: 82755 - DNA, 185 bp, Oryza sativa
  Clone ID: PAT_MRT4530_82153C.1
ggaaatggacatttatgatcaagggaagacccagtgatttgttcaatcatggattcgattacttagaaagtaatgcggtacgaccattacaagttttgcgacgtaggtggcaggcatcgacacaaaccggcggttgatcagatacccgaggtatcgaatacaagacgctgaaatggtggttggga

SEQ ID NO: 82756 - DNA, 2835 bp, Oryza sativa
  Clone ID: PAT_MRT4530_82154C.1
atggcacgcctcgtcctccctctgctgatcatcctcgtggcggcggctgctgccatccctgcgctggccaatgcggcgacgccgacggaagcggaggcgctgctggcgtggaaggccagcctgcaggacgacgcggccgcgctgtccgggtggagccgcgccgcgccggtgtgcgcgtggcgcggcgtggcctgcgacgcctccgccgccgccggcgcccgcgtcgcgaagctgcggctccaggggctggggctcggcggcggcctcgacgagctcgacttcgcggcgctcccggcgctggccgagctcgacctcaacgggaacaacttcaccggcgccatccccgcgagcatcacgcggctgcgctcgctgacctcgctcgacctcggcaataatggcttcagcgactccatcccgccgcagttcggcgacctctccggcctcgtcgacctccgcctctacaacaacaacctcgtcggcgccatcccgcaccagctaagccgtctccccaatattatccattttgacctgggagcaaactacctgaccgaccaggacttcggcaagttctcgccgatgcccaccgtcacgttcatgtcgctctacctcaactccttcaatggcagcttcccggagttcgtcctcaggagcggcaacatcacctacctcgacctgtcgcagaatactctgttcgggaagataccggacacgctgccggagaagctcccgaatctgatgtacctcaacttgtccatcaatgaattctccggctcgattccggcgtcgctcaggaggttgatgaagctccaggacctgcggatggccggcaacaatctcaccggcggcgtcccagagttccttgggtcgatgtcacagttgaggattctcgaacttggtgacaaccagctcggcggggcgatcccgccggttcttggccagctccagatgctgcagcggctcaagataaagaacgctgggcttgtttcaactctgccgccggagctgggaaatcttaagaatctcacttttctagagatatccgtgaaccacctctccggtggcttgcccccggcattcgccgggatgtgcgcaatgcgggagttcggacttgaaatgaacgggctcaccggtgagatcccgccggtgttgttcacgagctggcccgagctcatagcgttccaagtgcagaacaactcgttgaccggcaaaattccatcggagctcagcaaggcaaggaaactggaattcctttacctattcagcaacaaccttagcggttccatcccggtagagctcggcgagctggagaacctggtagagctagatttgtcggagaactcgctcaccggaccgatccccagctcgctcggcaagctcaagcaactcactaagttggcgttgttcttcaacaacctcaccggtacgatcccacctgagattggcaacatgacagcgttgcaaagcttcgacgtgaacaccaaccgtctgcaaggtgagctccctgccaccatctcgtccctcaggaaccttcagtacctctccgtgttcaacaactacatgagcggcaccattccgccggacctcggcaagggcatagccttgcagcacgtgagcttcaccaacaacagcttctccggcgagctgccgcgccacatctgcgacggcttcgcgctggaccaactcacggcgaactacaacaacttcaccggcacgctgccgttgtgcctgaagaattgcacggcgctataccgggtccggctggaagagaaccacttcaccggcgacatctcggaggccttcggcgtccaccgcatcctgcaatatttggacgtctccgggaacaagcttaccggtgagctgtcctctgactggggacagtgcaccaacctcacctatctgtctatcaatggtaacagcatatccggcaaccttgattcgaccttttgtaaattgtcatctcttcagtttttggatctatcgaataaccgattcaatggtgagctcccaagttgttggtgggagttgcaagctttactgtttatggacatctccggcaacgacttttatggtgaattgccagcaacagaaagccttgaacttcctctacaatcgatgcatctcgctaacaatagtttctctggagttttcccaaatattgttcgcaaatgtggagcgcttgttaccctagatatggggaacaacaagttctttggccatattccctcttggattggaattagtcttcctctcctaagaattcttatccttcgatcaaataatttcagtggagagattcctacagaattatcccaactttctgagcttcaacttcttgacttggccagcaacgtgttaactggattcatcccaacaagttttggcaacttatcatccatgacacaagcaaaaaccttgccagcgacagaatattttaacgcggaaagcagtccttttcagccagaagtaccccaggttcccaagcctcaccgcagaagagaacccaaaaatcagtcccctcttgatcagtctagagacagagttagcatacaatggaagggacatgaagaaacttttcaaagaacagctatgttaatgacaggcattgatttatcaggcaattcactttacggtgaaatcccaaaagagctaacataccttcggggcctccggtttttgaacttgtcatggaacgatctatcaggcagtattccagaaagaattggcaatttgaatatcttggagtcccttgacttgtcatggaatgagctttcagggatagaagcaagtagcaacgaggaatacaaagttgatgaaggacagaacttttgtgattga

SEQ ID NO: 82757 - DNA, 2141 bp, Oryza sativa
  Clone ID: PAT_MRT4530_82155C.1
ctccctcctcctcagcctcaggtggtcgagaggactccacctctccgctgccgctatccccgcctcgcgccgcgccaccatgccgctcctcgccgccgccgcggcggtggcgccgccgttgtcttccttccactcgctctccctctcctcacgcggactccgggtcccctccccctgcgaggcccgcccgcgcgcgccgctccggcgcggggacctcgccatccgcatgggcggcggcccgcgcacgttccccggcggcgtctccaagtggcagtggaagcggatgcaggcgaggaaggccaagcagctgctcaaggcgcgcctcgcccgggagcgccagctctacgagatgcgcaagcgcgccgagctccgcgacgccgccgcgcacctcgagcgcccctgggaccccgacgcctccgactccgccgccgccgcggcggcggcgcccaacctgctctccgtcgcggcggacgaccagatgaaggcgctcgccgaccgcttccaccgccccggcggcgtcgacctctggaacgaccgcgacgggccgcgggtcttcgcggccccggacaccggcagggcctccgcgcgcttcttccccaagggatccgtccatagcgttcagccctacggtcttgtcaatggtggccttgagagcacactggctgctcgcggtaacccttccgatgcgacggaccggagtcaccgccaccgcctgcaaggtgttcgtgagaatgcggccaagaaggaaatgcgtggtgttggtggtgatcgtgagcctgcggttgagtacatcgaaaggggtggagtgtgggagccagtgagtaacttggatggtggcgacgacgacgattctagcgacggtggatggaacgatgacattgttacctcggacttggaggacatgggggatgtcgatttgcgacccgagcaaagagcaatggttgggagagatagaaggaaagataatgtggcaaggtgggaagctacaacatctgtagccatcggtagcgatggtgttagggatcagcgtggcaatggcttctctttggaaccagaaggcacaagtgaatatcatcttggtcaaagctggcaagagagaaatagtgggagtagagggaaacgtcccgcagggagaaggaaggccttgaacaccgatggcggtagcgccattgggaaggatcgagtggtgggtggcagttcattctccgactctgaggtaacacgcaatggttttgaaccaaaatggagatccacgactagagggcgcacaacgaatgatgttaggaggtggaatccccccaacgaaggcggtaggaatgttcctagaaagggttggacggatgatgagtttggttcaaattcagacagtggaatggatcacaagttgatgccaaaatggaaaactcagaacaggttgaaccgaagcgaaaatggcagagatagaccggagctgaaatatatggctaataccaacaatggggagaggactaggaggtacatgaggggcagcgatggtgagggaagaagagatcggtttgttaatcgcttcgcctcagatttggaggagccagaatggaagccaagaagaaagagtggagcaggcaacgatggtgatggaagaagagatcggtttgttaatcgcttcgcctcagacttggaggagccaaaatggaagccaggaagaaagagtggagctaggatgaacattggcaacagagagtacatcgatgacatgaatgggagattcaggaggggtagcgatggagatggcatgaatgggagattcaggaggggtagcaatggagccgcgagattgttggatgctatggacagcaacagagaaatcggcagtgaggatgatagctacaggatgagcagaaatggaggacagcgcaggggagacgggtactcgctacgcccaacgtcagaattgcacaactctcggaggctgagggaatcaaatgaaatgtagttctttttttcttcttctgatagaaagatgaaatgtagtactagtattttacaatgatgataaacaaataacacacgccctgtgcagactaaaaaaaaacaacaaaaaaaaaaaaaaaaaaaaaaaaaaaaaaaaaaaaaactcagactagttcttctctccctcgtgc

SEQ ID NO: 82758 - DNA, 426 bp, Oryza sativa
  Clone ID: PAT_MRT4530_82156C.1
gtcggggaggcgcagcggcgcggcgtggtcgacgtcggacgacgacggcggcggcagcgcctggacgccgcggaggaagtcgtgcagcgcggcggcggcgtcccgcagcgaggcggcgtaggcgcggtgggcgtcggcgagcgcgtagcggtggcggatggcgtcggccagcagcgcggcgcggtcccggcacagcgccacagccgcgccgcccccgcccccgcccccgtcagtcttggactggccgcaccccatggtcggcgcgcggcgggcgcagcagcagcgtggcgatgggcgatgggcgatggcgacgcgagaatcttcgcgcttttcggcttcgtcctcgagtcgagcgggccggcgcacgtcaagattacattcgtcattgaattgatggagctaccaactttctcgccgtttcactag

SEQ ID NO: 82759 - DNA, 1084 bp, Oryza sativa
  Clone ID: PAT_MRT4530_82157C.1
cggacgcgtgggtagagccagagctagagcatcacagagaaagaagaacttgctcccaataaactatccatgcttcttgcagagatgatgaacagctcagtgctgttcttgccaagctcatccctgttcctcacaaagcagctggtacctgcaaccaagggcagagcatcagcagcagctgctgttaggtgcagcagtgggcccaatctgtcagaagcacatgaggaggaggatggtgtagcctccttgatggggaggaggcatgcaatggcttctgctgctgctgcctgtggagtttcagtgtttggttttgcaggtgagagcatggcagtgaagcagggccttctggctgggcggatccctgggctctctgaccctgatgaaaaaggttggagaacataccgtaggccagacgacaagtccggtggacatggagttggatggagcccaatcattccctacagcttcaaagttcgtgatggctgggaagaggtcccggtgtcgattgctgatcttggtggcaccgagatcgacctgcggtttgcgaattccaagcagggacgtttgttcgtcgttgtagcaccggttcgcaggtttgcagaactcgacgatgcgacaattgaaaagatcggtacaccggagaaggtgatcgacgccttcggaccagaggtgatcggtgaaaatgttgaagggaaggttttgtccatggcaacagcagagtattcaggaagaacttactaccagtttgagctggaaccacctcatatcttcatcactgcaactgccgctggaaacaggctctacctgttcaatgtaactgcaaatggtaaaactactgttcctatctcaaaactgtatgacattttctttagaactccgaatgctgaataaggtttaaataaattgctcacgatgtatctgtttatgtgcataccattagagaaaatgaggtgctattaaacagactgcagaagggcaatgagtaaaaaaaccatacttttgaatatgagttgttaaagctgaagcttttgaacatcgtacgcacacttccctttttgaggcctaaatgcctaatactagatac

SEQ ID NO: 82760 - DNA, 1161 bp, Oryza sativa
  Clone ID: PAT_MRT4530_82158C.1
atgccagccatcaagcttccaaaaggaacgattgaagacttagattggatgagaagagcatttctctggacaggggaggatagctgcattggagccagatgcttagtggcctaggattcaatctgcattccaaagcaatttggaggccttggtatcaaggatgttggccgacagaacaatgctctgctcgttaaaaggctgcaccatcttcactcttcagacttgccttggtctaaatggatatgggcggaacatgcaagtccgaatctcaacgaacagaaacagctagatcctcactgggaatcaacgaagcttcttctcccagtcttgcaggatctcacctcaattcagattggcgatggccgacacacctccttttggcatgattgctggtgtggagaagacgttctggcatataagttaaatcctctctatacccactccccgaataaacatgcatcggtgttccaggttcttgctgaagatttgcggaatcacttcgtcccgtgcctctcgtctgtggcagaggatcagttcctccagctttgcactctcctccaaggacacatcagctcactagatcaagatgttaggagtaagcgaggtgggggtggcatcctgaagtcgaaacaaatctatcttgctgcatgtaatgatattgagccttgtgcaaattggaagtttatttggaataacaaagcgcctctgaaagtgcaattcttcacttggctgttagctctagaaaggctacataccaagagcaacttacataagaagaaaattgtgcagtccccttcgtgtgatctgtgcaattcagcaactgaaactgcttcgcatctgtgcttacatttccccttcactgctgaattatgggagctcctcaacattcaaatttctatctcgacgaccaagcagctagctgccctactccctcctgcgcaaatcccagcaagacactacaaggtcttctacctcctttgcttttggaatctgtggaatcatcgtcatggagtagtgttccgaaatgaaactgtatccttgtatcgattgctagtgaaatgtattgaggatgcaacactctgggcagacaggcttaaggtagatgatcgatttgtggtctctgcttggaaggacctcttttcttcctccctatgatctctg

SEQ ID NO: 82761 - DNA, 267 bp, Oryza sativa
  Clone ID: PAT_MRT4530_82159C.1
atggcgactgcgcagaggctcacaacgacggcggaggctcgcggcgacgacgacgacctcagcaatggggaggggatgtttgctgctttctgggagagctgggaagtgggccatgtttgtcagcttatgagaattgagaatagagtgaagaagaactgttcaagatccactatcacaccacctcagtttttaagcatgcgtcagattgagtcgaggtgtttggtttggggttacgtgagatggttaacaaggagaatatttctctaa

SEQ ID NO: 82762 - DNA, 620 bp, Oryza sativa
  Clone ID: PAT_MRT4530_8215C.1
gattaggatgggataacacaaaggaaactgttacagctactgtggaacattggaagcaactgaaaggagatataccaggatgcaccaagtttatgaaagctggcttgcaaaatgaagagctactgcagaaaatgtttgaagatattcgcaataccggtgccgaccattggtctttagggcaaagcaccataccaacacccaccaatgaggcaattcatattgctgatgataatgagattgatgaagagacggaggatgatgaaccaagtgcaaaacgaaagagaggtggtggctcaaaggtggataagtccaaaaagagcaagagtggatctcaaaagatggtagaggagatgtccaagagtaatgaactctctgcacagactttgtcatccattcagtccttcactaaaacaagagaggatcctccgggttgttctataaaggatgttatggccttggtggaggaatgttgtgctgttgaagggacaaatgaacatttcattgcaactgaaatatttatcaagaaggatcaaagggaaatgtttgttaattctttgtgcactcctgcaggttgctttgcatggcttaagaagaagtatgaagtgaagtacggaaattag

SEQ ID NO: 82763 - DNA, 465 bp, Oryza sativa
  Clone ID: PAT_MRT4530_82160C.1
aacaccatctatgacctctcacgcacccttccctcagacttaactctttacctctacaccccctttttttttttttttctataatgaaatacctaatatcatcggtgtttatacaacatgtacttcattcacttttcaataatccccccaccacttctttcatcttcttttccaactatttacatataccccaacctcttcattaactaattcctcatcccaaaaaaattcttcttcatttaaaaattcctaaaacacagtccctcaattcattttttattcacgcactttttgtcttacgcctatttctttttcctcacactttcataaacaaatttttttataactcactctatatttctctttatcccccccccctattccctttatacaaaattaaaccttttaatatttcctacaccactttcctaatatacctctctattctacccaattctctctttt

SEQ ID NO: 82764 - DNA, 329 bp, Oryza sativa
  Clone ID: PAT_MRT4530_82161C.1
ctttgaccgggcctcgatccgtgccttcgcccggaagctaagcagcaaccagtccttgagtgggacccagcgccgccccccccccccccccccgcctgacacgggggacagccctgtcattccctctacctccacttcaccggatacagaggcgacgtgggggcacggccgcccgttcaatcggacgtgaccggcaacaggccggtcacagactggtcacaccgcacgtctgcccttaccgcattaaatgcagtgagggacagttggggcgccgcgtatttatggctgtctagcttgggtccccttctcgctctctccccacgccacgt

SEQ ID NO: 82765 - DNA, 698 bp, Oryza sativa
  Clone ID: PAT_MRT4530_82162C.1
tctatacactaaaataatatggtgttctaccctgcagaaatgaaatatttgcctgcaacatatgaagtattggagaccaaggaacaattcagttttagtttacataggcagagctttcaatcacaacatacagtgcaaaatagagtaaatatgagataataataaggattcaaacagtaacaggagtgcacctcgaccatgcatttcatcaaacagttggtgagatgcccatgggcacaccaaggaaccaccgatatagctaatatggcagaccccctcactgtaatggaagggtaccatctgcagcacgcagtagctggagccgctgaaggcctaggtgcagacattgtggcttgcttgcgaggcatcactgatggcggcatggaattctacacatctatcaaacccaacttttaaaaaaatctatgcatttgtgtaatcacttgaacatcatgtggatcagtttaatgataataaaatgaaacacaatatataatcttatgattatacctaactgttaagtttgtattcttcttggtccctgaaagagaaattttcagctcctacacttgcatcttgcatcatttacataggtaaaacaaattgcatttaggatttttcatgtaaatttagggtgaaagtgaaacaatacctcagaggtactgtcatcatgtgcaaggatcaaaaacaaaaatgac

SEQ ID NO: 82766 - DNA, 369 bp, Oryza sativa
  Clone ID: PAT_MRT4530_82163C.1
atggagcaaccggagctcaatgttgatgggccaaccaccccccgcctccccgagctcatgacaacaagatttagccacctccgaagcacgtggatgtcggatctgattgcccctgagccagccgcctgcatggaattatgtttgtcccattttagtttttttttttttgctgaggtcgagtacatggagatatggagcgaccttgctcaacaagaagcggcgcggctaagggatggatgggtgtggaggggaggcggcaatttggggagggggaggtggggatggggaagagctgacaccaacaccctcgtcactgatgcgctcgctaacggtgtgcaactacgtgttgctacaggcggtggtggttga

SEQ ID NO: 82767 - DNA, 609 bp, Oryza sativa
  Clone ID: PAT_MRT4530_82164C.1
atgacgatcgagaggccgagacggtggcacgagatgcagcgagcacaggcggagggcatagattggagcgtgaggttttcgtggttgccagaatggcgtcgaggtggagccggattgtggtaccccttgattgtccgtcttgtagagccggtcgcatacacgctcagaacacaattacataggttgcgattggaaatagaaatactgtgtggtaccttggagtatttgagggcaacgccgacgaggcgaccagagccctgccgaccgcaaacttcctgcagtccctcagcccatggagctgtacaggatcagaaaaatcgcatgttcagaggggtggccggacgggcaggtgaaggaccgggagacggcttgggagggaaggaggaggcaaactgtgggccatctgtagacgggattggaggcgatgggatttgggcgtcgccgtcaagaggagctgttgcctgttgcgtcattgaggagaggagcgggcggcttggagcgacgggggaagggtcggcgttgagggaggccatcaattccatggcttggacggggccgcagcggcttggagtgacgggggacagcagcggatgggcggtgtggcgttga

SEQ ID NO: 82768 - DNA, 273 bp, Oryza sativa
  Clone ID: PAT_MRT4530_82165C.1
atgggcaggtcgagcgtctgtcaatgccgtgcttatgcagatgatctgccgcctagcaacgctagggacgtggtgactgatatgtgggcccaaccgctcgcgagcccacctgtcagtgaccacgtcaagggagatttcacgtcagaggatcttcttctgtggccgaccgggcggagcttgttcttggtccttgctgtgccaggtctggccatgcacgacatggccaaatgggacgtgtggaagaaatatatctatagagatactagtgcatag

SEQ ID NO: 82769 - DNA, 316 bp, Oryza sativa
  Clone ID: PAT_MRT4530_82166C.1
cacacgcgtacggacgaaaccctacatccaccctggccttgttcgtgtcaccgaacaatggacaggtgccaggcgccgtctttaagccgggcacttatggcggacgtggtcgccatatgaagaactcaagtaagcggaatcagaaatgagagatgagaacacatgcagtgctcgttcgacaggggcacgatagacaagtttatgtgtgccgtgccctactacacccagatctcaccctccgtgctatgctacaggctaaggatcaacgggcgggtccgttgacactgcatatacgatgttgacacaagatgcacca

SEQ ID NO: 82770 - DNA, 570 bp, Oryza sativa
  Clone ID: PAT_MRT4530_82167C.1
aaaaaaaccaaacttggggctgggcaatcgaaaaaacaaaggtcacaggtcacaggccaaagggccggggccccaaatcgggcaagggcccaattccctcgctttcggccaaaacaggggcccgaaaagcccccccccccaaaaaaacgaccgccccggggaaaggaaaccggggcaagggaatctaccccgaaacacgaagctttagcagggggccggggctacaaccccaacggggggggggcccccccaagaacgggggggggggctcaaacaagaaccgccggggaagccccccccccccctttgggaacccccccttaaaaaccttaagccgggggggggggcccccgacggaagccaaggggggaacaaaaccctcccgggggttttggggggggaattggtccgccgccgggggctcccttgcccgggcctaaatctaagttttgggagggggcggcttttccgccaccggcgccattgggcgggcgggggaaaacaccgggaccgggccagttccagccccggccccgcggaagccctgaatttttgggggggggggggggg

SEQ ID NO: 82771 - DNA, 1147 bp, Oryza sativa
  Clone ID: PAT_MRT4530_82168C.1
aacaaaaaaaaaaaatctgccttactttgtttcttgtacagcttgatctggtttgatagaagaaaaatacaaaatgtaaaaagcaatggattttgtgagaaactgaacatcatttgattacatcgaatatttgaccatcaccaatattcaggattcataatcctgcggatccatccttccacagctcgcaccctgcagctcacagcaccagcccactcgagcaaactgtgtggctcgccgtgcagctcgcaccacgcatagaccttgccgcctgttccttgtgagcttgttgcacctagcagtggaccgcctcatgcgccgctggccctcccttagccagttgttgataacttaagccacagtccgcttggctgctccttgatcaatactgtgactatggcttaagaagtgccaaaggcatgtagtgccctaaatccatctaacgctcagctgctcggtctctcaactgatttgcctagctttccctgcacttctaccggtccatagtgtgcacacactcatcaaactcgaacagtgaaggacaggcacctttctgtggctcccttggagatggagattgggggagattggccgagaggaagccagacctgtgttgtcagcgagcaggaagacttaatccacatcttcagtccatgggaaccgtaagtgctgctagcagcagggacggccgatggcgtggccatgtcgggcagcagaacacgcgctaggctgagtgggacgacagccaagtcaccgccgccaacggcatgggcgcaaggggcagcgcgagttcgtaaccaacgagatggaagccggcgtcaggtggaggaagaggcggcgctgctggcggggaggagggaagaaggaagcatcgccgtcacgccgatgtagaattcaggagaaggggaaaggcgtcgccgtggcccccgcgccgagaccgggatgggaggagagggtgccgccatcgcgtgcgacggtgcgagtacgcgaattggggatcgaagcctcgacggcgccggtggggaagggcggtggagcggcgccgttcgagaagaagccgagcctcgccgcctctgcggtcgatgggagcgcgagaggaaggggcgccgcgccgccgccgggagaggaaggggcgccgcctcgcctc

SEQ ID NO: 82772 - DNA, 1223 bp, Oryza sativa
  Clone ID: PAT_MRT4530_82169C.1
ttttttttttgattggcaaatgggattttgctaattaggccacccccaattactctcttattattgctccgaataaatagttttttttcctgtacaaatctgaagcagaaaataaggattaatctaggctccccaatgcccccatctgatctcactcactaatcttgtttactatagcaccagctgcgccgccttctgctgcttctgatgttgctgctgctgcggctgctgcgatgactgaagcctccccttcagaaaacccctgcacaccttcttccacagatccttgtctggttgccgcaagtcgaagctcgccttcgccttatccacctggtgatccaggatgagatcgttccggaggagacggtcggcgatgctcatgaggatgtccttgctgtactccgggtggccctggacgcccatggcgcggtcgccgagacggaacatctcgacgccggtcatgtccgaccgcgccagcacctcggcctgaggaggcagctcccacacctcatcttggtggaactcgatgatgggcatgtggacggggagcttgatcggcgaaaagagcctcgccatggccgcggtggggtggatgcagttcacgccgatgtcccagcccttcttcgatcggcccgtcttgccgcccagcgctcggcacaggacgtgaaccgccttggcgcactgtgccaggctgtcatcaaccgtgtccggaattagatttagcgaaagctggtggccgaagcagacgccgaggatgcgcttgccggcggcgttctggcggcggatgaggtcgacgagggcgacgatccacgggtcgtcggcgtgggcgtcgctgcagctcccggagatgacgaacccgtcgatccccgcggcctcctcctccccggggagctccccgcgcacggcgcggtacacccgccaccgctcgccgtcctccgccagcagcgccctgaacacctcgaagtagcccccgtacgccttcctcacgtactccgagtcctccccgcactgcagcaccgcgtacgaaccccccacgcccacgccgccgaccgcggccttcgccgccacggcctccgccgccgcgtccaccacggcgttctctagtggccccatccccatggctgctgcaacaccggcggcggcgggatccgggaatggaatgggagctcgcggaggcggaggcggagccaggagacgagctgattcgtttttggtgtgaacga

SEQ ID NO: 82773 - DNA, 2195 bp, Oryza sativa
  Clone ID: PAT_MRT4530_8216C.1
atgtcagactcgtcggatttggtggctgcggtcgccgctcccttccagttccacctccctccaccaggtgctaagcttgctaccatcgccggatttacatcgccgccgcgtgcctcctctgcctcgctcgccgaagttgggcgcggggaccagcgttggtgtgggcaggaggagaagcccacgagttgccgcccctgtacctcaagcccacaagctgccatcgacaagaccgcccacgagccaccatcgacaagccccctccacaccgctgtccatgagcccgagaaccgccggagatttgtcgcttactactctatgatgagctcttcttcgtcctggtctaccccaagctttgggttagccagggaatcctcttcattgttgtttacacctggccttgtgcaacacatgggtcctaatccatcgtcatcttggtccacccctgctcatccagtctctgatagtcccacgttttctttccccacgccatttttctgtgagcctgcgaaaggcagcagggtctatgcttataccaagactgctgatgatcttcctcataagcatacactatcaatttctgcaatgccagcatacataagcaaatcccatgaggagcttcgacatgaagattatcagagaggagacaaaggcggtgatggcctgcagaaaattatggttaattcagctcctgtacctcccatgcccatgttatcatctgttggagctccagttaatatgatcaattcaagtcaacctgctttcagtttgaagtccaaaacaaatttcagtactccattttcaccagcagcaactgctgatcaacaatctgcacagctacagttctcaacacaaaatcactattatacttccaacccattttggcctgccccaataggattggagccaaccacatcatcccttggtccaacctcatgccctgctactcgacatggagatgcaccttctactggatttgcatgtcaggaaaatgtattcagcaactcagcggcatatacatctactataaatgcggatgttcccacgaataccatagatttgctacttccaaataacatccggctggtaaggcttagattttcttcaacaaatgatggtaatggaagtgttgcttcagaggttcattgtcatcatgatgctaaaacttcagaaacacccatttctttgtgcatatatcctggagagaaccaagagctgattatcaaatcaatggtgcagcctgctaagagtcacactgggaaacaatctagtccaactggtggtcatccagatgatcaaagtggtcgcagcaaagtatgcaacagtgctgctggtctgccatcgtcaggacctggtgagaatcagaaggggaatagcagtgctggtcacaagacaccaaagtctccactggctgctcctcgttgcgaagcgatagcggagtctgtactgcctcgcctgtacagcgccgattactacaccgtgccatctattgtggagctcgccgtgggagagagggacgagccaggctattgctcacatgtgaagggcttcacggtcggcaggcatggctatggcagcgtaaagtttgatggagaaactgattggagaaggcttgatattggatccatcgtggagttcaatgagcgtgagattattgtgtacagagatgtgagcaatacgccgcctgttgggcaggaactcaacaagcctgctgaagtcactcttctgaatgtcaagtgcgtcgaacagaagaatgggttgcagttcacagaggggccggcagttgataggtacaaggagattttggtgcagtggacaaaggaccatggcgcagaatttgtgtcatttgacgcggccaagggagaatggaagttcagggttaagaatttcaatatgtagagtcctctgagaatctataattctcctatcagtaggctcctgtgtctggtagaagtaacaacatagtaatcctgtaaaaaatgtgttctttttgtagttcggtcacttggtacggatagctggaaacttctggacgaaataactttagctataaaaactgcctttgttgcgtccatgttcatcaacaggactgcaatcttccacgccaggtctaaactgtaccggcatcacatcatttccattcctgcccacaaagcaaccgtctgtgggaaccccatcattaactttattttctacca

SEQ ID NO: 82774 - DNA, 586 bp, Oryza sativa
  Clone ID: PAT_MRT4530_82170C.1
gtataatgcctcctccatcttcgaaaaccagatcaaatcaaagtccctcggctgtttggatagcttagctgagcgtgctctgctctgtcgatcggctgccacgagggaaactgtgaggagagctctcctctcctacaggcgtcatcaacgacggcgacacgtgggagcagaggatctggtgctgcgggcgttaactcgctgcagcttttctgaatttgcgactgagaaatatataagaacagacgcggccgcgcttctcgccatgaacctcaacgagcgcgccatgatcggtttgcaacgtgattatctaacgatgccaacaccgtacgtcggcggaaagcaacaagcgccgtcgccaacgtggaggaacagaccggctggctacatatcgatcgatgcggcggcggcggcgagacagaacgggaggagtcaccggccgcagggcgcacagggaggagctctccggccgctaccgccgcttggcgagagaatggggaagagagatgaggacaaaaccgtgattaaaacagacgagggacttgatttgctccggtttttgaagatgaagatgttatacctggtatag

SEQ ID NO: 82775 - DNA, 171 bp, Oryza sativa
  Clone ID: PAT_MRT4530_82171C.1
atggaggaggtcgtcgggaagccgctctgccagagcgcgccgaggatcgccggagctgtcgccgactgccaagacttctatccgttcccatgccggagtacagaggaaggacggcgggaggacggcaagccagtgctgttggatggcaacaagctggctaatgcatgttga

SEQ ID NO: 82776 - DNA, 395 bp, Oryza sativa
  Clone ID: PAT_MRT4530_82172C.1
gatcagaatcacaaatcattgatctcattttctgaggataatgaccgaacattagtcatataattttcaaaacacacaaaaacacacatgctttcacttcaaaggaagaacactagctctcactaagtgaaaattaaaatgtcatggtgcttcagtctcatcgtctattcaaacatttgatggacaagttaaataaaaagagacaaaagtcatgaaccaaaccaagacaaaaggagtccgtctaatggttgaaattcagaggctgtgccgacattcctcagaaaagacttcggaccccacagcactgccttctttaaacaagatagtcctctgctcccataagagaattttagatttacacaaagcaagagaagactgaatgggctagaagaaaa

SEQ ID NO: 82777 - DNA, 325 bp, Oryza sativa
  Clone ID: PAT_MRT4530_82173C.1
atgcagctcaacctaaaagtaagaactcgtcgaaacaaaacgaaaataaaagggtggcgatgcgccgagattgtattgaacgtgactctatccatgcgtggaaatcatcatgaagcacgtcaacctaaaccgacaacatatgctgtgtcatattgtcggattcggctcaatcggctaaccccgtccgactcgaactctgccgatcttagtcgtagccgattcggacttcagccgatcttcactctgtttccgggacaatctctatctcgattcctccttcacatccgatcctccttcacttttggatatcactaaattacttctt

SEQ ID NO: 82778 - DNA, 1848 bp, Oryza sativa
  Clone ID: PAT_MRT4530_82174C.1
atggcggcctcctcctcctccacgtcgttctcttcgtcttcgtcccacgaaggagacgcgggctcgtcgtacatagagtgcttcaagtactcgaggcgcgccacgctccgctccgtcgttggccgccccgacggcggcgccgggctggtcggggagcgcgcggtggtcggcggatgggtgaggtcgtccgccgtcgtcagggcgaggcgcgctgctgctggccccgcgtcgccgtcgaggaagcccgaggtggaggccaccgggctgacgtgcacggaggtgctcatgtccagggtgccactcatccgctgcatcgccaggctcatggccggtgggatcaccgccgccgcctcggcgggcggatccgctcgccggccggccgtcggcacggcgctggtgcgcatcaacgacggctcctgcgtggctgatctccagatagttgtggactctgcactgttgcctcttgatcaaatcaccgctactggagcttgtgttcttgtggaaggcaagatagagcaggtggaagggacattgccgcagtatgttgtgcagatgaaggtggagaagattctgcacattggtcctgtggattcagagaagtaccctaggtcgaatgctcattcatctccggatcttgtcaggggctacccgcatctcgctgctcgtacagcgacggttgcatcaactgctcgtgtacggagtgaattggtccatgctgtccacgcatttttccaatccaacggattcttccatgtgaatacacccacgataacaacaacaacagcaaccagtgcaggaaaccgcggcaaaatgttacgattaacccgccttttcagcaaatcagacaatggcaataggatcacacctgaagctgtcagggctgccatcaaggagaagacgaaacaagttgaagcactaaagagaagcgaaagcaacaaagaagccctcgaagctgcagagcaggatcttcagagggcaaatgctctttcaaggcagctcgagcaaggagcaagtgcagagtcctcccaagatgagttctttcaccgcccagcctacctgacaccttgccatacacttcatctcgagacatacgcctgtgcactcagcagcgtctacacattcagcccggtgttccaggctgagagtgagagcttggattcagacaggtctctggctgagaggtggacagtcgatgtcgagctcgctttcgccgagcttgaggatgcaatctcctgcgccgaggattgtgtgaagtcactctgcagcacggtgtcgaaagattgttcagatgagctgaagtttctgtcgtccaatcaggcaggtgatgccactagtagcgttattgaagctgcagtgtcaagcccctggcaaaagattaagtacactgaagctgtcaatactcttcttcaggtcacggataaaacttttgaatcgaaacttgagttgggcatgccactgtctcgtgtgcatctgagttatctggctgatgatttatacaagaagccagtaatcatatatgattacccgaaacagctaaagccattttatgcacgcctgaaggaagacctgaagacagtctctgcctttgacttagttgtgccaaaggttggcatcgtagcatgtggagctcagaaggaggaaaggatggataatttaacctcaaggattgaggagtcagggctgcaggttgagcagctggaatggtatttggacacacgcagacatggcactgtaaagcactctggtttcagcatagacttggagagcctcatcttatttgtcaccggcctcaaggatgtccgagacgccatccccttccatcgaaccaaaggtcatgcaaaatgttag

SEQ ID NO: 82779 - DNA, 591 bp, Oryza sativa
  unsure (1)..(591): unsure at all n locations
  Clone ID: PAT_MRT4530_82175C.1
cccgaggcatcacgagccaccagtcacccgcccacacagtcttacgaggatcgacgcctcaccangatccactcaacttctangcacacagagacgnatgtntcgtcgcactcccaaagctaggtgtnagccctttaggtcctaccaaatgatggtgatgcatcgagtctgttgccctatatgtttactgacantaaacaactgtgcaaatcacactcgaccccaggctgcaggacgttcctattcagctggtcccaaccatagggttcaacgagtatatggccgcctccattgagcccactctagccaatacatattctacggatccggtactgagctactacgtgaggcttctaggcatcacatcagtagccgctaagaggcctgcagagccctnatgatcagagaaggaacgttcgtacatgtgaatggccttcattgtagcccgacctttgccccctcactgaacagccagctccattccagagttctttatgaacacccagtctttcccgatgaacgatggagagacttctgcccatagccgattattggtctatcgtgctgatatccaccccgtgctggaaggat

SEQ ID NO: 82780 - DNA, 387 bp, Oryza sativa
  Clone ID: PAT_MRT4530_82176C.1
atgtcgccgccgttgccaccgccgcagtggcgtgctgcagcttcgccacgccgctgttggtttgacgcgagtttgttggattggctcggctacaactgcgagagaggtggcactggcaacgatgccgcctcgagcgcctcgcggtgggagaacaatggagaggtagaggttgagggagctgttgcgctcgaagacgaagaggatgaagtcggaggtaggaccgaagtttccgttgtagttgaggaagacaccattggtgaggcggagctcagaagcggggttatgagacggtgcgaggggagggagcagataaaggtggcgtgccgcgacgaggtgacggttgaggacggtgacaaggtgtctacggctgaggacggtggccactag

SEQ ID NO: 82781 - DNA, 1195 bp, Oryza sativa
  unsure (1)..(1195): unsure at all n locations
  Clone ID: PAT_MRT4530_82177C.1
cccacgcgtcccagcagacaaggtagtagtacaggcttttgtacgtacgtagcagagggagttcccaagatggctggggcctctgccaaggtcgtcgcgatgctgctctccgtgctcgccacgtacggcttcgccgccggcgtcgtctacaccaacgactggctcccggccaaggccacctggtacggccagcccaacggcgccggacccgacgacaacggcggtgcgtgcgggttcaagaacaccaaccagtacccgttcatgtccatgacctcctgcggcaacgagcctctgttccaggacggcaagggctgtggcgcctgctaccagatacggtgcaccaacaacccgtcgtgctccgggcagcccaggacggtgatcatcacggacatgaactactaccccgtggccaggtaccacttcgacctgagcggcacggcgttcggcgccatggcgaggccggggctgaacgaccagctccgccacgccggcatcatcgacatccagttcaggcgcgtcccgtgctaccaccgcggcctctacgtgaacttccacgtcgaggccgggtccaacccggtgtacctcgccgtgctggtggagttcgccaacaaggacggcacggtggtgcagctcgacgtcatggagtcgctccccagcggcaagccgacgcgggtctggacgcccatgcgccgctcctggggatccatctggcgcctcgacgccaaccaccgcctccagggccccttctccctccgcatggtcagcgagtccggccagaccgtcatcgcccaccaggtcatcccggccaactggagggccaacaccaactacggctccaaagtccagttccgttgatccatcgatcgatctacctatgtgcatgcaatgccttcgtcgtcttgtgtcgccggtcaagaacgaattttgattctaccgatcggcagttcggcactagtactgtactacgattctgtgtgtgtgtgtgtgtgtgtgtgattgcaatgcaaattgcgaacggatcaattaagagcgtttttttctctctctctttttaatttgtagttgtgtgtgtcagcgagatgtgtgnggaaatggaacaggggcagggcacgcagtatccatgtgcttgctctgaaccgcccacattacaaatacccaatccaatatgccataatatataccggatggcagactt

SEQ ID NO: 82782 - DNA, 147 bp, Oryza sativa
  Clone ID: PAT_MRT4530_82178C.1
ccaccgtccggttgcttacacaattgacaacaacagcacaagtttatgctaagacgaggacagccaatatttgtcatggctgtttgacggcaagaactgctggttggtgactgatggcgaaccatcgctgaagactggtaaccttgg

SEQ ID NO: 82783 - DNA, 657 bp, Oryza sativa
  Clone ID: PAT_MRT4530_82179C.1
atggcaatcttcaagaagaacaccactgccctgttcttggcggctctcgtgatcctggcttctcttctctcctcatgtgatgcggaccaagttagagtaaattctgctcgtggtataaattggcaggtgcatggttactcttggtcattcgcccccatcgtcgccgcatccactgttgctgagagtaccttgagcgtggagggagctgctgtcattgagagcatgcacctggaggctagatctaggaagggaggggagtgtagggtcaccgccaccactccctctgcggatgcggcggcggtggcggcggcctcctccctctgtcgccaatccctctgctgtgtgccaccgccaccggcctcctcccatcccaccaccaggtctgggagagggaaggaaggggagggtagggtcaccgccaccacttcctctgctgcgccacagccactaatctccttccatcccaccaacagatcagggagagggaagggtcgccgtcgctgctgccgccactccctctgctgctctaccgccaccgatctcctcccatcccaccaccggattcgcctcccattgccgtcacacctcaaggctagagaggtatggggagaggagggagaagaggctcgggagaagccgaggaggagagatgagtga

SEQ ID NO: 82784 - DNA, 201 bp, Oryza sativa
  Clone ID: PAT_MRT4530_8217C.1
atggctcgtcttctagttcgcttgtgtgctgcgcgccatcgtcaacgcccgcaaccgccagtaattcctgctgagcagccaatcttctggtaccctcggatatcagccagcctcctccaactgttagaaaaaatggccaaccaatcgtttatgctgcagcaaagctacctacaggggatgcaatggccccatcagtcatag

SEQ ID NO: 82785 - DNA, 156 bp, Oryza sativa
  Clone ID: PAT_MRT4530_82180C.1
atgaaggtgcaggcccaccgattccggcgatttgacttccggcggtcggcggcggcgccgccgtgccggtcattcgattccacgccctccatggtttcagcaattcagagaatcagagatcctggaaaaatggctggaaaaggatgcaggggataa

SEQ ID NO: 82786 - DNA, 180 bp, Oryza sativa
  Clone ID: PAT_MRT4530_82181C.1
atggccaaggcggccatagcggtgacggctccgcagcagctagacggccaaggcgcgcgggcggcgacgacgctggtgggcgatggatccgtgttgggaggcgcgtgggtgacggcgaggctagggggcgccgatccggctgctaagttcaagcttctagtggccgacttccgagcataa

SEQ ID NO: 82787 - DNA, 578 bp, Oryza sativa
  unsure (1)..(578): unsure at all n locations
  Clone ID: PAT_MRT4530_82182C.1
aatactcctacttcaaagcattcattgaataatcgcagacccttgatcagtaagcaaccgatttatggcttgtggttnctccttaatctcctcacctctcttgcaggggtaagaaaaagcaatgtacgaagcaccataaaaggtaaggatgtgctccatgtaaggactttggagttgctggcatagcagagaattgaatgactgcttttctaagtgcaagcaattgtgttctttgggttttatactaattctcaaacttgatgatattgggctggtcgcctctatattagctaactcaatagagcccttttccgttatagcatctttactttccaaattttttaatttgtaatttctttttatatgagcaattggtactatgaatgtacgagacatatggtcctacatcctgtatgtctggggaacgggaattggttgggaaaaaaggttaccatgtggacttatttttgttaggcccatgttgttcaactagccctgatagtttcctaaaactttgtttaatttaagaagctatgtaatgattctatttttggggtacaagatattggcattatggt

SEQ ID NO: 82788 - DNA, 954 bp, Oryza sativa
  Clone ID: PAT_MRT4530_82183C.1
atggcctccggtccgtcggtggaggctgcagacgagatgacggcgcttggatctacgggactacggctgcaggtcttcatcgtcggctgtcgagctccagccaggcctcttcctatcagtgctgcctggatgctctgtgtggtgggggccggcgtcctcctctgccgccacatcaaaagcaggaagggtgcccaccggcggggagaaggggcgccgtgcgtgccgacccgggcatgcgtgccgcggcgggatccggcggggacgagggggacgacgacgccgacgaggaggagaggaggaggtcagcgtcgcgacggcggcacgccaagggagggtcggcgcctccggtgtcatcgccgccgcaccgaagaagagggtgaagagggggggttggatttggagcatgatcgatgctcatccatcgatccgacgtgctcggattcccacttcgatccccccttcaccttcgtcttcctctcctctccgctctcctgcttgcttcttctccgctgtctctccgatgggctcagcttcagggagcacctcctggtcgtggacggcgtcggggaagaagggacgccggtggtggcggcggggggggcgggaggggcgaagagacgggtgctggggctgacgcggcggtcggaggcgagcggcgaggagatcctgcagagcgtcgacctggacgtgccgcgaggggtggtcgtcggtgtcatcgggcccagcggcagcggcaagtccacgctgctccgcgcgctcaaccgcctctgggagcctgcgccgggtgctgtgctcctcgacggcgtcgacatctgcggtatcgacgtcctcgcgctccgccgcaaggtcgcgccgccgccctcctctctcccgcctcgcctgccggcctctgcagtctgcacccgccgctttgcctcgcccagaaagagagaagaggagaaagaggaagggtga

SEQ ID NO: 82789 - DNA, 2021 bp, Oryza sativa
  unsure (1)..(2021): unsure at all n locations
  Clone ID: PAT_MRT4530_82184C.1
atggccgcttcctcaccaccgccatcactgtggaagatgacgacgggagggacagcagcaacaagaggaggcggtggcactgccgacacaagcaagtacaagatgatggcgcttggatctacagctacggctgcaggtcttcatcgtcggctgtcgagctccagccaggcctcttcctgtcagtgctgcctggacgctctgtgtggtgggggtttttctccgaggcgtcgatgcctcgttcatcttcaccggcggaaggagcagaaaggaggacgacgatttgaacagtcgacgcccgctatttccgttttttctatcttcgtcttcctctcctctccgctctcctgcttgcttcttctccgctgtctctccgatgggctcagcttcaggtgagcgagtacacctcgtctcttctgcgtcagctttgtgttccagtgtacgtgctgctgacatgtgcgatcaacgattgaattgaagagcatgatgtcagggagcacctcctggtcgtggacggcgtcggggaagaagggacgccggtggtggcggcggggggggcgggtgttgacngtccttaaatcataatatctgaccgtcaatacctggacgtgccgcgaggggtggtcgtcggtgtcatcgggcccagcggcagcggcaagtccacgctgctccgcgcgctcaaccgcctctgggagcctgcgccgggtgctgtgctcctcgacggcgtcgacatctgcggtatcgacgtcctcgcgctccgccgcaaggtcgcgccgccgccctcctctctcccgcctcgcctgccggcctctgcagtctgcacccgccgctttgccacatcgggcatttgaattttgccatggctgaatcctaatgtctaccttgttaattttgcctccctcattttccggagagaaaattgccttctccaactgagaagcaacaatgttagaaattatatcctccaaaatattaggatggctttgggttaaatactgaaattcatctgtttctatgatcttagccagtgctgttggggagctaaagaactcgatgcacgccttgttcagaccacgacaattgtgcttgtcggttagcaccaagagggttgctacagagtcagcatcgatgtggttactcaacctttcttcgcatttaacctttagcctttctaggccatatttgtccgcagcaacaagtagatgctgagccattgtcgcatcttcttcttgatccatctctagcaacgtatccgtgtagatgaagttaagtagagctttgaacacttgtgcatccatgtcatttatctctatcacgtcgtttacgtttacaccctccttcattggcccaaagtgctccgccacaaagacaggcgagcgcaccgcgagcaccaatctgtgcgcggcgaaggtctcgccgccaactaggaactctacatcggcgcaccgtttacttgagagaagatcgccgtaatgcaggtgcatgtccgacgacggtggcaccgcgatgatgggtggcggcgtttccttggtgattaccacatggaccccgatagcgaagcaatcgtcttggacatgtcccgatttttccaagtcgccctttgcaatgaaggtttcaaaccctaggttgttagccatgtcgtcttggttcgaagtgctcaacagtcgggtggcgtgggtgtgagacggcactggtttcccgtgctggtcgagcaggctgaaggtagcctgcaccatgacagcctcggcgatggcgtcatagagaacgaggtagatagagatgaagtccttgctaatgtcgttctttccgtgtgggtagtagcagatgtaccaagtgcggtctcccgcgttgaacgggaaggaactgagagatctgtaacagtggacttgtaaggtgcgggagtagccatcgatcttgagcacgtgataggcttgcgttgtgacgacggtggaggcggcggctgaccgagacggggtgggacagccgccgccggcgacattggacgcgatgctcgccgtcgccat

SEQ ID NO: 82790 - DNA, 672 bp, Oryza sativa
  unsure (1)..(672): unsure at all n locations
  Clone ID: PAT_MRT4530_82185C.1
cggcacgaggctttctttctcaaagctttaaagcgctctcccccgcacgctacggacacgacaacgggagccgaaaaccgcagggggttcacgggccgccgcccccactgcaccctctcccacccccatcacggcgcctcctcgccctcgcgccgcccgccgtgtgccatggcggaagtagcggcgacgcagcacggccacgccgtcgccgcgcgcgcaatgccgggccgcggcgaggtggacacgtcgtccccgttcgagtccgtgcgccaggccgtcgacctgttcggcggcggcgccctctccccctggcgccaccaccacccgcctccgcctccgccgcccccacccctgcaactccgcccggaggaggtagaacttatgaaagttgaggaacaaactgtgaagttagagatggagctttttgtcaaggaaaaagaaacgtttaaggttttgaaagaattacaggcaacaaagcaggttgctgacaacttgaagttacagttagagaaggcggcatctgagagtgcagcttctgcaagaggtcacagtgatgcagggaaggtgtatccactccctgacaccgaacggaaatgcagttaccatactgggcagccngtcgagagcgcaaaaggaatcagtccgcgctaaccacangatcaagctgatcag

SEQ ID NO: 82791 - DNA, 1449 bp, Oryza sativa
  Clone ID: PAT_MRT4530_82186C.1
atggccggagctggagaatacggcggcggcggcggcggcggcggcggcttcggcggcgacttcatggtgctgcggccggacaagggcggcatcggcgacctgttccacctgctgtggtcgtgcaaggtggcggagaacgccgccgtggactgccccatcggcacggagatcgccgagcgtcggcggcggtgggcgctgttcgtgtcgctggtggcgcagatgctgctgctgtggacgaagaagccgatggcgctgctcggcggcgggacggagtactggatgaacctcctcaacgagaatggcggcagcgtcttcatgctcatcaccaacgctctgcaaggaaaggtgaaaatgccagacaaatcatccatcaattaccgatcatgcattggattgcttgacacaagaatcgatcttgacgagaagatcaaaccagaggatagaaactaccacgctgccctgtcgatcatggctgcaaaactagcctacgagaacgaactcgtcgtcagaactgttgttcagaaccactggcagatgaatttcgtgggcttctacaactgctggaatgaattccaggaggactacacgacccaggcgttcatggtgtcggacaaggcggaggacgcgagcctcgccgtggtggcgttctgcggcacgaagccgttcgacacggagcagtggtgcgccgacgtggacttctcgtggtacgagatccccggcgtcggcaaggtccacggcggcttcatgaaggcgctgggcctgcagaggaacggcggctggccggagcaacccaccggcgccggagacgacggcggcagcgacaagaagccgttcgcctactacgtcatccgcgagcggctcagggcgttcctggcggagaacccgcgcgcccggttcgtggtcgccgggcacagcctcggcggcgcgctcgccatcctcttcccgaccgtgctggcgctgcacggcgaggaggacatgctggcgaggctccacggcgtgtacacgttcgggcagccgcgcgtcggcgacgaggggctctgccggttcatggacgggcacctggcgacgccggtgagccggtacttcaggttcgtgtactgcaacgacatcgtgcccagggtgccctacgacgacacggcccttctgttcaagcactttgggacgtgcctctacttcgacagcttctacaaaggccatgtgacggaggaggagccgaacaagaactacttctcgctgctgacggtggtgcccaagtacgcgaacgcggcgtgggagctcgcccggagcttcgtcatcggctatgtcgacgggccggagtacggtgagggttggctgatgaggatcgccagggccgccgggctgctgctgccgggcctgccgccgcacgcgccgcaggactacgtgaacgccaccaggctcggcgccgcctcgctcgagccgctccgatag

SEQ ID NO: 82792 - DNA, 952 bp, Oryza sativa
  Clone ID: PAT_MRT4530_82187C.1
tggtggtggcgaggaggcagaaggagaggcggccaccgaagcgcctggcggcagcgatgccgaaggacgacgggctgttgccgagggagaggatgccgtcgtggctgttgacggctccgccgtgctcgaaggtggagcagccgatgacgaggccaggtagcttcttcatggtgccgtcggagacggcgacggtggccttctcctggccgtagatgccgctggtgatggtcgagtccttcatcacctggtagtaggtgcaggaggtgttctggtcggggctctcgcaggtgttgtaggggaggtccatgcaggcgcgctgggagcagcggaagcggcgccacgaggaggacttggcagggcggtaccagttcatgatcaccttggtcaccttggacttgccgccggaccctcctccgcctccgtcgtcgtcgacttggatggacatggtggtggcggcggggggcacgtggggccgcccagggtgcttgcccttgcgccggcgcaggcttaagttgatcaacatgactacgttggccgtctcgagggcgaggctgtaggggagcgccggggtgccgatgcggacaaccaccacgtacatgcccacctgcgcgatgttgagcgcgcttcgcatcggcagctcgaacatgtccgtcttggacatgagctccggcacctgccgcatcatccgcctcatgtccttggccatcaacgcccggaagtgctcgcgccgctcctcccccgactccggaacgtggggcgcccacaccggaagggtgaagctgctgctgcctccctcctggtcctggacctcctcctcttcctcctcctcctcgtgctggaggcgcccatggatccctgccaccaacagcagcaggcttaggaggaggaccaccaccaagggaccgggaccggccggcatcatcgcggacgcggggtcgacccgggaattccg

SEQ ID NO: 82793 - DNA, 867 bp, Oryza sativa
  Clone ID: PAT_MRT4530_82188C.1
atggaaaaagacccaactgaagtaattcgcaaagctgtcatgcgcatgcttcctcgcaatagattgcgtgatgtaagtgaaacatcatttctctttgtttctgattggagacttgatgctagatttatttggtgctatctatacactcatgaggacatcccagctacacttgatgtaaaccaagttaatggattatgtctcagcatgaacgatcaaacatatcttggtctaattacgtgcaaccgtgctaggaaaatacatcaagaggtgaactcactatttactcatcttaacccaaattttagtgagaattttatactacctaaatgctttatccttgtattgctaaggtttacacctgaggatatcatcactacgtcaagaaggatgagttacgttgaggacgacaagggttatgccgaggaggaatcaacccatgcccaaccagcagctgtctatgctaacaagaagatggtttacgttgtaaagactcaacttccaaggcttgtgcgacctagccaatcaagtcggagtacaggaggcctcggatcgttctcaccctcaccacttggtcgcattcaaccttggcaggtatcaagcagttattccggaagtggtcgcaagctagttattccggaagtggtcgcatccaaccttggctggtataaagctagttattccggaagtggtatccaatcttggcagcttgttatcctcttgagtacggtttgcgctggtgctcttttgcttcaaacctactgccgtgaagattgggccacccctcgcgagtatgttcgcatcatatggtatcagagcttcgttgacacatccagaaaaatccctacaaaaataccaagcctttggtag

SEQ ID NO: 82794 - DNA, 330 bp, Oryza sativa
  Clone ID: PAT_MRT4530_82189C.1
atggtgcttgcgcgtggagtcagaggccgtcgtcggatccggctacccccgacctcagggaggtcggatctggcggcggcggtggcaacggcggcggcagcggtcggtgctcgcgtgtggagtcggaggctgccgctggatccggtgcttgctcgtggaagtcagaggccgcctcctgatcaggcttcccccgacctcagggaggtcggatctggtggcgacggtggcggcggcggtcggtatctagtcacttgtgacgggccagaagtggaagccgacaaaggtgtttctctgacggattccattctagacccgtcacaggtgtcttga

SEQ ID NO: 82795 - DNA, 565 bp, Oryza sativa
  Clone ID: PAT_MRT4530_8218C.1
atgtctagattcattaacatctatattaatatgggtaatgctataacgttttacattgtgaaacgaaggaagtaactattaaaaccgatagtaatatatttacagacacctctcaaaagaatcatatattgtactagaagaaaccaatagcttaagtaaggtataacatggattaaggcggtggttaacaattaataagtcgagtaagtaattaatccttaaccacgtacggctcgggcgattaagcggctgagccaaagtcgccggccgcggcggcgcgcacgatcgtcaaagcagacggacacagtactacggcaggtagatcgtgccgtcgtggtcagtccagctcgccgcgttccagtacgacgtgtcgccgccgatggcgccggcgaggtcgaacatcccggcgtcgagcaccgccgtcggaggcgcccagtcggcggcggcggcggcggcagccgcggacggcccagaagtgctgcatgttgctcgaccggagattgattccagaagcttctggaaggacctcagcccggggatccactagtttagacgccccaccgcg

SEQ ID NO: 82796 - DNA, 123 bp, Oryza sativa
  Clone ID: PAT_MRT4530_82190C.1
actccactccagactcaactcatggagctaaattcaggagttgaagctgtaccaaacagggccagcatgggagctcttgtgaccggcgaacagcagtcaagacatgcaagaggggggaagtga

SEQ ID NO: 82797 - DNA, 2268 bp, Oryza sativa
  Clone ID: PAT_MRT4530_82191C.1
atggggaggggtacatccaagccaccaattatcgggcgtgacgaccagcagcaggaactagaggcaatgcttctcagctccgcaggatgcctcgccgtaatatatgtcgtcggcgatagtggtgttggtaagacgatccttgtaaacagtgtctgttcaaaaccatctgtcagagaacacttcaaagagcgaattggagtgaaggtcggaaaagatgctggtatatccaacatcctgagtttgataagcaaagaactgaagaaagaaaataacgaaagtgacaatgagaatcctagaagcaagatacaaagacgtcttggtgaagagtgctacttgatcatcatcgatggcaggcagatgtccatcgctgactggaatgctgtgatccatgctcttccgaagaacgaaagaggtagtcgggtagtgctcatcacgaaaataaaaccacagtttctagaccacccaatgaatgatgtccatgagataaagctgacatgcctcaatcaaacggactgcaggaagctgttccacatgaggctccatggcaaagaggaggatgaacaaaaccaaacctacctgccaatatactaccagcgtgtgtatgacattaccgggggctcgccattggcagttatcctgcttgctggactcatgcacaacaaggagtatccacatgaatgggatagggtgttaaaatacctcgagtcagccaaagagaagcggctcaacaggatactgtccctgagcttcgatgacctgcaccatgagctcaagctctgcttcctctacttcacagcattcccggtcagctacaaggtgtaccagaacgtgcttgtcaacttgtgggtatcagagggctttgtggtgccgcggcacgggaagacggtacagcaactgggacagctatacctgaggcagcttaccactaggggactagttactgaagcatcagctgatggtgactacgacatccgccactttttcctccatgacagtgtctacttgtttgcacggtcagaggcacatgaggcaaacttcatggagctgcatgatggtgactacttcccatcgccggacagggctcgacgcctcacactacataacagtatggacagatacgcggcactagataacaagatgcccaagctacggtccatctttgcaatcttcgaagagataccagccagcacagcagaagaaagtgtatcatctcctagctgcttccccacctgctgttcatgcgagcagcacagatcaccgaaaatttcaagatttgacctcaccaagctgctgaaaagatccaagttcctacgagtaatcatgatcgaaggcctgaatatcggcaccgagttgcctgaggcaatcggaggcatggtgcatctccgttaccttagcacgcgttgccgatctctgaggaggatccacccgtcgattgggaatctcaaaaatcttcaaacaattgatgtcagacaaagcttagtgcatgaactgccgtgttccttttggaagatcacatcgctaaggcatgtgtttggctctgagctgatcgtgccaagatggactcgtgaactgaaacagctaaatacactcaagtcggtgagagcattgcaggattgggatggctctatgttgagaagaatggttaacctcaagttactggatgtgactatccaagagaagctcaaagaggagaaggcgcgcaagttatcagacaaccttaacaatctcaacaaccttactacactgatcttgaaaggagttgacctcccaatctctagcatttttacggcaccttccctgcaattcctcaagactatagaactaaccggaaccatcctgctcacaactccatcaccagaaatagacaagatgaccacttcaccttctgatttccagctgccgaacttgagcaaattgtcattgtcaaagacgtgtctgcaacaagggttcattggaaagctaggcaagctgccccttctttccaatctcacactcaaggatgtttcttgtgacggagaagagcttgttttcaggcctgatgggtttcattgcttgaaaaaattggaagtaaacgacacgtccaaacgtgttgtgatagaggagcatgctttgcctgtattggtctctttgcatatcattgggaacagtagaaattaccaacactcgatccatcctactcacaagattatcaacaagattagacatgaggacataaatctttttcagcgtatctgcacttgtcatcagaaagagataaccaaaggctaa

SEQ ID NO: 82798 - DNA, 126 bp, Oryza sativa
  Clone ID: PAT_MRT4530_82192C.1
atggggcgccgtagagtggtcgtggacgcacgggtgcgcgaggacacgctgaagacgaagacggtgacgcgatcgcagcagtcgttgaggagcagcacgcagttgccggagaagagcgaagtgtag

SEQ ID NO: 82799 - DNA, 462 bp, Oryza sativa
  Clone ID: PAT_MRT4530_82193C.1
tttcagaatctaattctctattttgctagtgtcgaccaccaccaccgtagcaatggccgcctacggctcgatcaacaaggaggacccggtcaactggggcgtggtggtggtcgagatggccggcaggcacatccacgaggtgaagctcatggtggaacaactccgcaagccggtgatcaagatccagggcgccaccctccgagtggggcaggtgggcgccgtcatccaggccaaggacgccgtcggcgtagtggccgagctcgaccaggaggtccgcccccgggtgaaggtcagcagcgagtggatcctcaactgcatcatccacggcggggacatgtacggcgtcaccaccggcttgggcgggacctcataccggcgcaccaaggacggccccgccctgcaagtggagctcctcaggcatgtcaacgccggaatcttcggcactggatgcgatggacacac

SEQ ID NO: 82800 - DNA, 565 bp, Oryza sativa
  unsure (1)..(565): unsure at all n locations
  Clone ID: PAT_MRT4530_82194C.1
aatngtaatacgactcactatanggcgaattgggtaccnggccccccctcgagttntttttttttttttttggaanantctggcntaccatttgcctctaaatttaancnacaggatcatnatcccatgnagggtgtttgccanggaatcntacgtacnggacatgcatattactaatgataaaacaatnggggttcccacttctgaaaaacaacgatagcggtaggacttccttcttcntccggtgctacagtgcacgangatcactcctccaccttnccaccacangangtntnccagngtaacatccaccacnnggggcaccntngacctaggtcgaagggcgatccgtaanaaagtttccantgttcnggccatccgtctctatagtantgtgttatngctccggctgcnctgaaacccanctggaactgcntggtngctcnccccnttgaaagtgatggttctcacangancncccacctccncgctagtgatgntnctngcacctgttcncgtncnccgcaagtnctggttagnnngatcccnantcctgcanccngnt

SEQ ID NO: 82801 - DNA, 154 bp, Oryza sativa
  Clone ID: PAT_MRT4530_82195C.1
cttgaagaattgaatcctataataactatgctggggtatttataaaaacggggtttagaacacataattactcaaatagaatactatgcacagctgtcaccgaatagacatagaagatgatttgcacatttttttttttcaaatttctacacag

SEQ ID NO: 82802 - DNA, 147 bp, Oryza sativa
  Clone ID: PAT_MRT4530_82196C.1
atggacggtctgaccggccactacactgcgagcacagagttggggatttcgactccaatggctagttttggtggttgggggtatatatatccactccccagcagcaaggctagtgtggcacttgatcatcctcggcaagcatcctag

SEQ ID NO: 82803 - DNA, 476 bp, Oryza sativa
  Clone ID: PAT_MRT4530_82197C.1
gtccgtttcggtttcggtctgggattttgaaacggggaggcggaatgctcgaccgatccctcaggccgccgccgccgcagcaggcggcggcgcaggcggaggcgggccccggcggtggcgagggaggggggaacgtggatcgggtgctgttcaagaacctcgtcgagatggtgccgctcgtggagtcgctcatgggttctgatttgaagagtgtgaagtcgccgcaaagtgtgtcggtgaaaaaacggagggatcctggagagacgggcaagaagagcaccgccgactccaatggtgagaatggcgcggttgcgccagtcggtctgttggggggagaaaataaacccaaggataaggatgagatcgttttgctgcgtgagcagatcgaagagttgcaaaagacgctgcttgagaaagaggaagcactgaaatccgcggagagtttggtgggggagatgaatacattatattcgaca

SEQ ID NO: 82804 - DNA, 1296 bp, Oryza sativa
  unsure (1)..(1296): unsure at all n locations
  Clone ID: PAT_MRT4530_82198C.1
antttcccaaaccaaatcccattccattccccgtccgtttcggtttcggtctgggattttgaaacggggaggcggaatgctcgaccgatccctcaggccgccgcagccgcagcaggcggcggcggaggcggaggcgggccccggcggtggcgagggaggggggaacgtggatcgggtgctgttcaagaacctcgtcgagatggtgccgctcgtggagtcgctcatggaccggaggtcgaacccgtcctactcgaggcgcgcgtcgatggtgtacacgccggcgccggcgaagaaggggttctgatttgaagagtgtgaagtcgccgcaaagtgtgtcggtgaaaaaacggagggatcctggagagacgggcaagaagagcaccgccgactccaatggtgagaatggcgcggttgcgccagtcggtctgttggggggagaaaataaacccaaggataaggatgagatcgttttgctgcgtgagcagatcgaagagttgcaaaagacgctgcttgagaaagaggaagcactgaaatccgcggagagtttggtgggtgagatgaatacattatattcgacagtagatgagctgagacgccaggttgctgacaaggaaggtttgatcaaatctatcaattctcagctgcacaatgcgaagattatgcttgcagacaagcaagcatcattagagaaattagaatgggaggtgaagacgtcaaataagaaagtagaagatcttcaaggggatgtctccaatatggagtttgagataggttcgttgatggcattattcgaaaaaatttcggagaatgtttcaggtgaactccaagatggtagcttgccatcatcttttgaattggaagcacttcaatcaactagcgaaatcgacaagattgaggttgagaagatagagcaagaagcggttacatatgccgaagctcttgctgcagcaagagagaacccaaacgaggagcagctgaatatagctgcggaagcacggttaaggctgcaggtccttgtgctatgatgcgccaagtgcatattgtagtgtatgtgtatgataatgtcgaatcgctgatgtaattatgtgtgcgtgcttgatcgagtttatttcatgtgagaccgtactgacggtaatcgatcaagcaccagatactggacacttatttaattggagatgatgtttattcaaaaaaaaaaaaaaaaaaaacacaaaacaaaatctctctctaactctctccaaaagccgattcctgcagccaaaaaaaggagggcgggcggtcttaaggatccaaggt

SEQ ID NO: 82805 - DNA, 1456 bp, Oryza sativa
  Clone ID: PAT_MRT4530_82199C.1
gagaactaaaccagcccaaaccgatccattgatgttgatggaaacaaagcaaaattcacaacacgaaaacaaccacattgtgccgaccatggcagtttgcagtgcagatacatacttttcttgtctttacgacaaaaaaaaaaaaaagttgtctagcttaggatgtcgtggagctcccggtcctcgccgatggcggcctccctgacgacgcggagcacgtcggtcagcgacaccaccccggcgagcaacccctcctcgtcgaccacccacagccggtgcacgtggtgcgccaccgccttctcgatcgcctcccccagcgtgctctccggcgagcacgtcaccatctcccgccgccgctcttcgtcctcgtcggcgtcggcggcgagaacgccggcgcggtacatggccaccttcttcttgaactccgccacggcgacgcccagccacgcctggagctccgccacggggcagtcgcggaggtccgtcgccgagaacgtttcgaagacgcgcttccccctcccgtcctggagctggaggaggatccgccgcgcgtcggcgtcgtcggcgggggcggcgtccacgacggggacggcggcgagcgacgcggcgcgcatcgcccggacggcctcgatcaccttggtgccgctcgccacggcgagcacggcgccgccgacgccgacgccgcgcacggagcgcgacaggatggcgtcccccagctcggcggcgcgcgcgcgcaggaagcgcgccacgtccatctgcgtcaccatcctgtaccccggcgccgcctcgacgagctccgccgccaccacattctccgccgcgctctccagcggcaccagcgcgcggtgcacccccttgctgaacgtctccatgcaatccagcacactggtgtttggatggagagtccacagggtgaggccttcgagggagtggccgatgacggaggagaccggcacggccatgcggcggtcgaggtcgacggcctcgctgggagcagcatcggcggcggcgtcgttgtcatcgccggcctcggcgatgtgggcgaggatgtcgagcatgttgaccatgccgatgtagtgcttgcggacggcgccggtggccgggtcggactcgaggatcatggacccgccggcgccgatccagtgccccggcggcgcggcgactgcgacagcggagacgcgggcggcgaggagcgcgttcgccgtgtgcgcgagcgtcgccgtgtaggggacctccaccagccgccgcttggcgcgcgccagctccaccaccttccgctcccggagcacgccgcagagccccgcccgcgcgcgcttcgcgtccttgctctcgccggcgacggcgtcgtccttgtcaccggcggcgtggccgcgcagcagcgcctcctccgccgccggtgtcctcagctgctgcgccattgccgatcttgtactgagttttgtgtggaagattctag

SEQ ID NO: 82806 - DNA, 1268 bp, Oryza sativa
  Clone ID: PAT_MRT4530_8219C.1
tcccccatatttcccccttgattcgtgaccccaatcgtcgggaacgcccgcgccaaccccggccacattccacggccgccggccacgaatttcgccaccgttccccgcctctcccttggccagctccctctcctcccctataaaatggaaccccctcgatccgttctccagttttagccccctcccgcgttcgatcccgtggcctcaccacctctccccgccgtcctcctctttctcccgtgccgccggtcgcctccagccgcctctccctcctcgccggagtgccgtccggtcgtgccgtcacccccagcggcctcgtagccgcctcctcttccccggcgtcgcctccgtttcgcggggaaattatcggagccaccgactgtcgtcgtcgccatcctccctcgacatcgccgcgtcgccctccaccccggcctaccctcggtttcgccggaacgccgtcgcccgctccggtctcgccctccgcctcgccggagttctttcggcaaccccttccaccgttcccgtgcgccggccgacgtcgccgtctcctccggcatcgcagcggcgagccggcgacgacgtcctcggcatcgccttccctccatccgaacccctccgctgtccgtcgtcgtcgtcaccgttcgtcctcgacgtcgacgtcctgtcggtcgcccggcacatcgtctcgctgcgccaccaccatcgtcatcatcacagcggcatgttccacgccgtcctcgcatctgtgcagctgctgccggctgccatcgccgtctcctcgccggccctggtcatcgtcgttgtcgtcctctcgtcgttcccggtcgtcgtggcgttcgtccctccgtcaagccgttctcgtttgtcgtcctcgctccgtcaagtgccgcagccccgtcgtcgtcttcgtcctcgcctccgcgtcgtcaagcgttgcgccggccacgtctcgccttcgtgcaaggatcaccgccgaagtcattccctcgccgtttgcctccgtcgtccccgagccgtctccgccgcgctcgttcgtcgttgtcgttcccacgcctcgtcgcgtggtggtaaggatctctcctctcgctgctcccgtcctcgtcctttcggtgttgccccgtacccgtcgtgtggttgtcgaccccgcccgcgtggtgtctagtggagtctgcttgtcggccactcgcctcggttggcacacggggtccgcttccgtcgacccgtggaccgtctctgtgtactcggtctaccgtggtcctttaggttga

SEQ ID NO: 82807 - DNA, 1473 bp, Oryza sativa
  Clone ID: PAT_MRT4530_821C.1
atgggccatgagggttaccgcgcctcacacgcatgtggaggtttagacaaggagtatgcattataccttgacaccattgtcggaggatcattcctgcataaaactccttcggaaggacaaataattctagatcgaattatggaaaatacttccttcatagagcaatataatgaatccctccctaaggcatcgatgcgtaaaattaaggaaccttcgatagctgaatctgagactgaaccgcctacatcaatagattcggctaaggagtcctcctccaaaccatcaccagcaaagagcaaagaaattcaaactctggaatgtgctataatgttcaggaatgatcttgatgaagattttggaaacacccagaattatttcagtaaaaagaaacctcctatggccttgccacctcctgatctaatcgaagatgaatatcttaaagaaatagtctgggagctgaccacagtcatgagcaacgaatggttaaaagaggcagagctttcttccgaagtaattcggaataattccactcctcgaaccatcccttgcaacttagaagggaatactgttggtattctatatagtccaacagtcggagtcaaccttgtctcagaatcattcacatttgcttatttgagtgacaaggccattactccgatgaacaaattcttcaaacacccgaataggaagttaattgaaggatttgggattgttcaagatgtatctgtccaatacaacgataaagaggccatcttggattttcatgtctttgaaatccaagactttgacgtcctaattgggcatctgatcaagaaacttctcatcaactgccctcgattaggtagcctaaaattctctttagtagggaacaaattctctatttcattttcacaatcaagatttgccttgactgattccctgcctgaagacgaatatgcaaaggaagtaacaactattattccttttgagtctcccgaatcacttcttgaaaataatgtctcagatttcattgaggaagaagaagattccgagattgtccttagacatcgtgtgcctgagagaggtatagaggtggatcaagctaagatagaggtgatagatcaacttccacctccggtgagtatcaagggaatccgtagcttcctcggtcatgctggtttctatagaaggttcattaaggacttttctacaattggcagacctctgaccaacctgttagttaaggatgtgccctttgagtttaacgacgagtgccttaattcctttgaaatcctcaaaaaggcacccgtttctgccccaatcatccaacctcctgatgggacactcccattcgagattatgtgtgatgcccgtgattttcctgttggtgcggttttaggccaaaccaaagagaagaaacataatgcaatctgttatgctaacaaaatcttgacaggagcttatggctgttatttttgctatagatatgtttag

SEQ ID NO: 82808 - DNA, 4029 bp, Oryza sativa
  Clone ID: PAT_MRT4530_82200C.1
atggccgactacctcggcgagctcgcgctggcgaacgacgacaaggccacggttgccgaagccacccgtggccgtggagaggagggggataaggatgtgaacggagacggcgtgagagatgagatgaaaaaagtgactggagtagcatggttcttttcttctcgtgccactgcactgcacctaaggaggagagagctgaagttgcttccattcccatcttttccctgcagctctagttcagctcctaacacttgttcacagcaaagtcatctcctgttagtttcatctgcaggacctagagaacaaacattacttccggctgattcccgttcttctctccctcatggcatcactgataacggtacaagaaaggaaggaaggaggaggaggagggggagaaagaggaaggagacagcaaaagatgaaggggagtgtgttccatctgcggaggaagtgtccattagggtaaatactctttatgagagtggcgaccccattgggaagaaggagttgggccggtgcgtggtacaatggctaaagcagggtatgcactcaatggctataaaatatgcttccacagaaatgcagaacgatggagcaacattcttactggatggtggatcatctgaagacaacctcggatttgtgatgcttgcacagccttatctatcagcaattcccatgcccaagggacaggaggcgctctgcctcaaggcctctactcactatcctaccctctttgaccactttcaaagggaactccgtgatgttctgttgaaacaacagaaccagggtcttatttctgattggcgcaccactcaatcttggatgcttctgaaagaattggctaactcagctcagcatcgagcagctgcccgcaaacctaaagctcctactacgcacagtactcttggcataagtcttgataagacaaggttgatgcagaccaaaattgaagactttgtcaagaaaatgtcagaccttctacatatagaacgagatgcggagctggagtttacacaagaagaactgaatgccacccctgtgatggatgggaactcaaagaagccactcaaaccagtagagtacttagtcactcatgggcagtcacagcaagagcagtgcgataccatttgcaatttgaatgttatcagcagttcaactgggttggatggccagcatctggtcctatttagagtgaaagataaccatagattgcctccaaccacactctctcctggggatatggtttgtatcaggacatgtgataaccggggggaaattaccacatcttgcatgcaaggctttatatataatcttggtgaggatggttgcagcattaccgtgacactgaaatcccgccgtggtgatcctacgttctccaagctttttgggaaaaatgtgcggattgacaggattcaggcattggctgacgcacttacatatgagcgaaattgtgaagcactgatgcttcttcaaaggaaaggtttacagaaaaagaattcttccattggagtagtagccactctgtttggggacaaggaagacatgatgatgatggagcagaataatctggctgattggggagaatcaacaatacatgatgatgagctattgaaaaagaacaaatatgactttgatgcctcccagttaaaagctatcacactaggcttgaacaacaaaaggcctgtcctaataatccaaggacctcctggcacgggcaagactggtttgcttagttatctcattgcatgtgctgtccgaaagggtgaacgcgttctcgtaactgctccaagcaatgcagcagttgataacatggtggagaagttgtcagatactggactggacacagtacgagttggaaatcctgctaggatatctccatctgttgcttcaaggtccttgggagagcttgtgaacagaagacttcagaagttcacagaagagttcgagaggaaaaaatccgacttgagaaaggacttgaagcattgcatacaggatgatacattagccgcaggtatacgtcaactgttgaagcagcttgggaagaactttaaaaagaaggaaaaggaaataatcagagaggtcctttcaaatgctgatgttgtcctatcaactaatattggggcagctgacccacttgtgaggaggattggttgctttgacttagtaattattgatgaagcaggacaagcaatcgaaccctcatgctggatccctatcttacaaggaaaaagatgcattcttgctggtgatcaacggcagcttgcacctgttgttttatcaagagaggctatgcaaggtggactagcaatgtctttactcgaaagagcttcatcgttgcataatgaactactgacaacgaaattaacaacacaatacagaatgcatgattcaattgccagttgggcatctaacgagatgtatgatggttttctcaaatcctccccatccgttgcttctcatcttcttgctgattacccatttatcaaggaaacttggataactcggtgtgcctttcttttacttgacactcgtatgccgtacggaagtttgaatattgactgtgaggagcatttagaccctgctggtacaggatctttttataacaatggcgaggcagatgtagtttcacagcatgttttgaaccttgtacaatgtggtgtctctccaaccgcgattgccgtccagtcaccttacattgcgcaagtacaactattaagagacaggctagaagattatccagaggcttctggtgttgaggtttcaactatagatagcttccaagggagggaggcagatgccgtggtcatatcaatggttcgttcaaacactttgggagctgtaggattccttggcgacaacaggcgcatgaatgtggccatcacaagggcacgccgtcatgtcgcacttgtctgtgatagttctacaatctgcaacaatgcttttctggctaggctccttcgccatatccgtcagcacggccaggttagacatgttgaacctggttcctttggcggggattctggtcttggctacactccacctggtcgcatcgttgtcgcctccgtccttccaccgtgagagtctcttcgccgcaccacccaccttgtcgtgctctaacacagcagggtcaccgccacaccgctcgaggctctgatctactacatccctgtcatcaactgacacgtcacatacatgagcgaccacttgggcttccacgcagtggtagtagaacaccgtggctgccgtcgtggagagcagcgggcaaatggcggcaggaacgaggcatgcgatgagtgtcagaacaccggcttccttcctcctcgctttcatgagccgccacgccaaccagagtgccggcgctgcccagcgtccttccgccgatgacacggcgatgctcaccgggatgacggcgccgaggtggatgtagaggacgagagcggcgaggaacagtagggagcctaagatggacgccatgcttgagccgcccacgaaggctgtcatgtgtgccgctaggacgaggagagtcgcggtcgagaggtcgacgacgcccatgaacatggcggtgatgagtggtcctctgattttctccgtggttgccacctcccagccgagcagctcggtgaaggagagccgcttgccggagtaggtcgtgcagccggcgacaaccgcaacgacctgcacggtgagcctgctcacgaggtacgcaaggtagacgatggcgtgacctcgaataagggagtcggtcgctgtggcttggccttggccatcatcggtggtgttctttggcgcgtagacatggacaaggacgccggtcgcgagggagtggatgctgtccaaggagggcgcgagagggttgacgtggatggcggtgatgccgaggaagatgaaggtgtggcagaagattagaaggaagatgggtgcaaagagcctgatgtttcgggtggggaggatcatcgattccgctatgaaggtgatgcaaggggacgaagacgaggaggagctcattgctgctgtgccggccat

SEQ ID NO: 82809 - DNA, 589 bp, Oryza sativa
  Clone ID: PAT_MRT4530_82201C.1
gcacgagggtttagttgatggaaatagtgttgtgaagagtaatgaccttgagccttatgtgctcaagaatagtgcatatgcacatgtgtgcttcaatatcttccataaacgggcacaataaattctaggactgtcttgggacatgagataatgtgcaagcgtgctatttcttctttggaataagtaaatattcagcagattaaaaaaaaactcccgaaagttttttgcaatctcatatttgtatttgtctagaaaggtggaaggtagtattctaatgggttaacgttggtgaacatggaggatgacagcccaattgtttagattaaaaaaaagggtcattacttcttacctttcacctttaggtcacttttctactgtaggacaataggtgtgtagtctctaggcaaaaggggtggttcaggactagaagtgaatgcgcctgcattccttttgtgatttcctttttcctttgttggcactcaaggataagttgagatcaaaacttgctggctaaaacatcgttcctggtaccagtacaggatattagaatttgactagcagtgttgctggcaaaatgcctggtcgaata

SEQ ID NO: 82810 - DNA, 408 bp, Oryza sativa
  Clone ID: PAT_MRT4530_82202C.1
ttttttgtttttttttttttttttgttttttttttttttttttttttttttttttttttttttttaaaatttaatttccaaaagtgaatggtttgtttatttttcctcgtcgagaaaaagagcaaatggccccaggtacacagaagaagggacaagggctcccaaacaaaggcataagccagggggcccaaagacgggagggactcacaatcccggaggggcccccaccccaaactacaaacgagggggcccatttggcccccgccaaccaaaaaggaggcaggaccatccatggggggggcggggaaaccatttggccgaaaacaagaaaacaaaggccaaccataaaacgaatttccaaccggaaagttaaaaaaaaacaaatccaaccccccggggtggggtggg

SEQ ID NO: 82811 - DNA, 381 bp, Oryza sativa
  Clone ID: PAT_MRT4530_82203C.1
aaaaaaaagggggccttttatttcctaaaaaaagggaaatacccaaagccatgcccaatctgggccaaattttcaaatttgggcccccggggcccatgggcccaaatgggccaaaaaatgcccccccccccaggttttccctatcaaacccccggctcccaaaaaaaaagttccccccccctttgaagagcccggggccaaaaaacattctttttaaccaacaaggcccggctccaatttaaaacagttttgcatttttaaacaatcggccaggggggcccccatttatgtatccggggcccccaaaaccctgttttgcctgaagggccacccggggtgccctttcccccccaaagagaatcccccccgcccatttcttgg

SEQ ID NO: 82812 - DNA, 277 bp, Oryza sativa
  Clone ID: PAT_MRT4530_82204C.1
cccacgcgtccttccacgcgtccggaaaacaattcataagttgtagagtataaatcgttgggcaacgtccttagaaaataaagaattgttgctttaaccttttcacggaaataatccagaaagaaatacatgttcttatgcaggttttatgaggtgaaaaaaaaaaaaaaaaaaaaaaaaaaaaaaaaaaaaaaaaaaagaataaacaaataaaaaagggaagtaaagatgaaaaaaagaaagaatagtgataggaagtgtaaaaaattgggggctg

SEQ ID NO: 82813 - DNA, 728 bp, Oryza sativa
  unsure (1)..(728): unsure at all n locations
  Clone ID: PAT_MRT4530_82205C.1
tgatgttagagcgagctatttttggactatgattggtgaaaacaaagacagaagtagaaaacctacatatgtatgttaaagataaaattttgtcttagatgtatttttctatgatctaggtcatatatagatagttaagatcaatctaaatcccctcgattttcctagacctgtgctcaaaaagtatgccaagcatctataagttgtcatgatctgaagaaaacttatgttgattttaatctcaagaattagatgatagtgagcagcaatatatatactgctccatagaaatggttgggtggccacggattgtggattcgtgagtaagataaactaccctggtgcctgtgaaccttgatcacttggtgatattccttttgttgattagttcatttaggtgtgcaacgtggtgtgatgctgattatagaactatatggcagtatatttcttgggtattcatgacctaaattttcagttgtcttgtgatttcgacattagatattgctattgcctggtctagattatttgagcttattgcttactacttgtatcctttgagtccaagctacatgaagccattgccacatcttgagaacaacaaaaatgccaaaaattttataggcacccaatgttgaattgacagggtatctaatgatacataatctaacattaatcgtctgactccccagcctcatattcttctagctntttttcccttcagtataaca

SEQ ID NO: 82814 - DNA, 258 bp, Oryza sativa
  Clone ID: PAT_MRT4530_82206C.1
atccttatagaggcatggtattaaaatatgaaagacaactttttttctatttatatcacccaaagttacacatgtcacataagacgatataagagcttaatattaactaccgaaccaatatactgataaaaccaaatacaagaaaccggcaaaggtggaaaaggtactgggtgcaccattatacctaaggtagataccatatctagatgggacgttaaaagccaacagagcttgggcttgagccagatacccatcaaa

SEQ ID NO: 82815 - DNA, 441 bp, Oryza sativa
  Clone ID: PAT_MRT4530_82207C.1
catatatagtactcattcaccagctgtggtgttttcaaaacatttcattattcatataattcgacttgatcactgtctccctttatgcaactacatcatcggtgtgatcctactagctacgaggcatgccagctaaacctaatactgtcctgcatttaagatgctgcactgttggggctgaaccccacacatcaacgggagctgccccacttactgtctcgccctggtcatactcactcgggtcatccccggctgatgctgctgctcgccgtagtagccctcctccaactacccctcgccgtagtacccctgttcctacgactacccctcttcaccgtagtactcccacgacgacgacgaccagccttgctccaggggcatcggcatgctctcctcgtagatcctcaccatccggcggatggcccctcagcggcacttgct

SEQ ID NO: 82816 - DNA, 522 bp, Oryza sativa
  Clone ID: PAT_MRT4530_82208C.1
ttttctatcaaggggagtccagcaactcccaaaacaagaaaaagaaacccaacactccttccactcaggcttctaatggtgcccataagggcaaagctcaggttccagcaggacaaaattctgctggtaagttcctttgcaagttttgcaaggcagaaggtcatgcacagagggactgtgaaggctttcgggcttggcttgctaagaaagggattcctttccatgaggacgctaagaaagggggagcggatcctaagagtggctgatggagctgaaattaaagtgatggccgttggggagcttcatcttcgacttccaagcggcaataatcttttacttcatgatgttctttatgctccctctgttaagaggaaccttatttctgtaatggttttaacgaacagtggttatgtgtcacaccctgattttcgtgttaggatttataaattatttaataaattattaatagaatttatatgaaatgttcattaatttacaagtgaagttaaaaaaaaaaaaaaa

SEQ ID NO: 82817 - DNA, 1898 bp, Oryza sativa
  Clone ID: PAT_MRT4530_82209C.1
atatatgtacttatgaatattttttcttcatgatttttcagcttttggtcagatctgactcattgagcctcttaatgggctaagtggaaggctgacgtgttactcaacttaggcatactcgattatgattatgccattagagaggaccgtcctgaggaaccttttagtgttgagcacgattatgaggagaaactgaagttatatcgtgagaaaactattgaatgggagaagtccaataggatttctctcatgtacatcaagagtgccatatcaaatgtcattattggtggtattgaggactctgatgatgttaagacatacttagaaaacattgataggaacttcaggagttcttctaagtcttatgctagctctataattaagcgcctaacgtccatgcgctataattataaagatggtgtgagaaagcacattatgcagatgggtgctatgaatggagagcttaagagtatggacatgggaattaatgatgatcttctagtccactttatcttgagttcacttccttctgattttgagtctttcattattaactataataatcagagggataagtggtccattgaagaactcatttctcattctgttgaggaggaggatcgtcagaaggctgacaaatagaagcataaggatcagctgaacctccttcatggtgctaagggcagtaagaaaaagttctatcaaggggagtccagcaactcccaaaacaagaagaagaagcccaacactccttccactcaggcttctaatggtgctcataagggcaaatctcaggttccagcaggtcagaactctgctggtaagttcctttgcaagttttgcgaggcagaaggtcatgcacagagggactgtgaaggcttttgggcttggcttgctaagaaaggtactaatgttgatattgtctctaatgttgatgaattactttacgttgaattttctcataaatcatggtggattgagtcaggtgccactgtgcacgttgctaactcattacagggattccgttccgtaaggacgctaagaaagggggagcggatcctaagagtggctgatggagctgaaattaaagtgatggccgttggggagcttcatcttcgacttccaagcggcaataatcttttacttcatgatgttctttatgctccctctgttaagaggaaccttatttctgtaatggttttaacgaacagtggttatgattgtaatttttctaaggacaaatgctttattaagtataataatattgatattggtcttgctagtgtgcaagacaagctctgtttgctctctttggataatcatattatgaatatattgaatgcatgtaatgataatgagacgtcttcaaaattgtggcactgtcgtttaggccacatttctaaggggagaatggagcgtctcattaaggaagagatacttcaacccttagatttttcaaatgcggatcattgcttagattgtattaagggaaaattcactaaaaaaaaataagaaaggagctactaggagcagtgtccattagagataatccacacggatatatgtggaccgttcccagtaacatctgttgatggatatgactcgttcattaccttcacagatgatttcttcccgtatgggatatgttttccccattatagatagatctgaatcactcgataagtttaaatattcaaagctgaggtygaaaatcagcataatgcaaaaattaaggtatttacaacatatatagatttgtcttatgggtaaatgttatataaaaatatagtcaaagcctgcactactcggagaacgtgcagtcgggcaacttcgccttcacggcgtccgaggccggggactacctcgcctgcttctgggcgcccgaccaccgccccacc

SEQ ID NO: 82818 - DNA, 500 bp, Oryza sativa
  Clone ID: PAT_MRT4530_8220C.1
ctatgtgccatggccaacactagctgtagcattggagaggagatgcagccacgacggtaaaccacgatggtcagcagccaattcattgaggacaagcagagccaattcgtccttctcaaccagcaagcaaacaagcagaacaagcagcctcaaacagccacaggtcaaccacgacgccatcgacggctccgccgcctcgtcgtccatcacggcaatttttcgctgtcttccacagtggctccaagtctgggtccccgcatcaccagccgccagcaccagatctggtagcatgcctcgacggtgatggcagcggtggtcgttgtcatcgcgcccgcggctggcgagagcacgtggtgggcgtgcatgcacaacgcgactgctgctgcaataggcgggtgccatggccgccggtgagctacaggaagatggaagaggtgccgaagggtggaagaagatgcccaagggcaaattagtccagtagggcattcgggcgaagccat

SEQ ID NO: 82819 - DNA, 453 bp, Oryza sativa
  unsure (1)..(453): unsure at all n locations
  Clone ID: PAT_MRT4530_82210C.1
gcttgattatgattatgccattagagaggaccatcctgaggagccttttagtgttgagcacgattatgaggagaaactgaagttatatcgtgagaaaactaatgaatgggagaagtccaataggatttctctcatgtacatcaagagtgtcatatcaactgtcattattagtggtattgaggattctgatgatgttaagacatacttagaaaatattaataggaacttcaggagttcttctaagtcttacgctagctctataattaagcgcctaacgtccatgcgctataattataaagatggtgtgagaaagcacattatacagtggggtgctatgaatggagaccttaagagtatgggcatggggattaatgatganctcctagcccatttatcctgggtcncttcctcccgatttgagccttccaccatacnatataaccgggggtaggg

SEQ ID NO: 82820 - DNA, 410 bp, Oryza sativa
  Clone ID: PAT_MRT4530_82211C.1
atgtaagtcgtatggggtttaagtcttctttttaggattaaggaagtaggccacttggggcaaacaaggagaaagctaatccaagtgcccattgctagaagtgcccatccaagtgcaaaagttgagcaggatcaggcagtggtgtcatcctgtggaattgttatcatatgtaatgggtcagctgctgagctccaggtgtgcacagcattggtccacagtcagtgttattgtccatgcagtgttgtggcccgccaccattgttcagtttaggtttttgtcatgtcgctccgtgggacgacggtctgccgttttcgtcatgattggcccctccttgctgcctgtggtaaaacgctgtgtgttcatgccggaatactaccgcgaagggaaggacaactgttttccaaaaaaaa

SEQ ID NO: 82821 - DNA, 590 bp, Oryza sativa
  Clone ID: PAT_MRT4530_82212C.1
atgggaagatcaccttgctgcgatgagagtggcctcaagaaggggccatggacaccggaggaggatgagaagctgctccactacatccagaagaatggccatggcagctggaggacactgcccaggcttgcaggtttgaacaggtgtggcaagagctgcaggctgcggtggacgaactacctgaggccggacatcaagaggggcaagttctcccaggaggaggagcagaccatcctccacctccactccatcctcggcaacaagtggtcggcgatcgcgacgcacctgccggggaggacggacaacgagatcaagaacttctggaacacgcacctcaagaagcgtctcatacagatggggttcgaccccatgacgcaccggccgcgcaccgacttcttcgccgcgctgccgcagctcatcgcgctcgccaccctccgtgaccagctcgccgcgacggcgtgcggcggcggcggcggtggcgacacggcggcggcggcggcggcgcagatcatgcagggcgccggtggtggtggtggcgccgacgttgccatccaggccgccaagatgcagtacctgcagtgcctcctgca

SEQ ID NO: 82822 - DNA, 240 bp, Oryza sativa
  Clone ID: PAT_MRT4530_82213C.1
ctcgtagaaagccagacacctcataaccaacagcccatttaagcaaacagaaaaaaaaaaaagaagctaattcttagttcttaccatgggaggtttaaacggatagtcaattgggaatacaatatcgaggaaaaatatccctccttcatacggagatcctacaagatgagcactgcattagatcagcaaagtgaaggtggtcataagactagttcactctacactccacaccctaattcc

SEQ ID NO: 82823 - DNA, 1704 bp, Oryza sativa
  Clone ID: PAT_MRT4530_82214C.1
atggtcaggtggtccccgtcgcgcagcgccgcggcgagcccggcgtccacctccctccacgcggcggccaggacgcggccgcggtgcgggtcgcgggccgtccggtcgccgccgaggccgagcgcggcggcgaccacctgctcgtcgaggagagcctgcagctgcaggccaccgccacgtcccgccgtcgcgccgcggccgcggtcgcagtgcctctcctcgccgcgcagccacgcgtcccgctcctccgcggcgtggccggcgatggagcagagcgcggcggcgagctcgtacgcccggcggtccgacgggtctctcgccacggccgccctgtaccgctgcatggcctcgtcgaagcgcccgtctcggatcgcgaggaacgccaggaggaggttgacgtcgaccaccgccgcggaggcgtcggcctccgcctcggcgtccgcgacggcgcgcacctcgcggaggcgctcgccgcagagtggccgcgctccgagcaccggcgctagcatcgcctgggagcacagcacgagcgccttgttcagctgggactcggtggcgttgatggggggaggcggtggccgtgtccacgtccaggatttgaactccggcttcatggagagcgtgtcctcggcgatcgcggccgcgacgtccacgaccatcccgtcgacgccctcttcgacgcgctgcggcgaggatccgggcatggcgtacacgacgatggtcacgaaccgatcactggttttgaagcggcgggcgctctccgggacgctcttgagccactcgaacgcggtcccggaccggccgtggaggcagcacagcgcggcggcggcgagccgcgggcggatgtcgccgggattgtccctggccagctggacggcggccgcgagcgcctcgtcgagacggccttcccgagcgtgcagggtggccagctcgagcctgagatggacggcggctttcgagtcgcccttggactccgcggccgcgagcttcttggggatcctgtcggagaccatcaagcggatcgccccgccggtgatggtcggcacgcggagcgcgctggcggcgagcgcgtgcgccgcgtcgaggaagaaggaggcgtccgcgctgccgccgctggtggtggtggtggtgagggccgcgttgagatcccgcagtccggggtgcgcgcggactaaccccaggtggccgcagcgggtggcgtcgtcggcgccgcggtggggcgacggacgggagaggcggacggaaaccccgcactgctccgccttggagagagccaaggtcgcggcggccccagccatggcggtgaagccacaggaggagtcggagcgcccggccgagggctccgatgacgaggaagacgactctggcgccatcgccaccgtgctcgagacggagatggagttcgacggaggagaggcggcggcggtggcctcggcccacggcggtgtcgagccatgcgcgtcactcgttctccttggggtcgcggactccgccgcccacctcccccacggccgttgccgcacaccggtgaaccgcctcgccacctcttggaaccgtagttgcgtccgcttcaccaacacccgcctcgccgccgccacctcccccttcctcctcattgatagccacaccaccgccatgcgcaccatccgcctcgccgtccatccgagcaatccaacctcggagttccgaataaagaaggacaaa

SEQ ID NO: 82824 - DNA, 1566 bp, Oryza sativa
  Clone ID: PAT_MRT4530_82215C.1
atgtccgtctccagattcctccgccgcgccgcgctgaccaccgccatggctggggccgccgcgaccttggctctctccaaggcggagcagtgcggggtttccgtccgcctctcccgtccgtcgccccaccgcggcgccgacgacgccacccgctgcggccacctggggttagtccgcgcgcaccccggactgcgggatctcaacgcggccctcaccaccaccaccaccagcggcggcagcgcggacgcctccttcttcctcgacgcggcgcacgcgctcgccgccagcgcgctccgcgtgccgaccatcaccggcggggcgatccgcttgatggtctccgacaggatccccaagaagctcgcggccgcggagtccaagggcgactcgaaagccgccgtccatctcaggctcgagctggccaccctgcacgctcgggaaggccgtctcgacgaggcgctcgcggccgccgtccagctggccagggacaatcccggcgacatccgcccgcggctcgccgccgccgcgctgtgctgcctccacggccggtccgggaccgcgttcgagtggctcaagagcgtcccggagagcgcccgccgcttcaaaaccagtgatcggttcgtgaccatcgtcgtgtacgccatgcccggatcctcgccgcagcgcgtcgaagagggcgtcgacgggatggtcgtggacgtcgcggccgcgatcgccgaggacacgctctccatgaagctggaggaaggcgagtggtccacgctggagaggctcgagctcgcggtgctcggaagattgctccgccgcttcgtgtccaagcgcttcgccgccgccgcctacccggagttcaaatcctggacgtggacacggccaccgcctccccccatcaacgccaccgagtcccagctgaacaaggcgctcgtgctgtgctcccaggcgatgctagcgccggtgctcggagcgcggccactctgcggcgagcgcctccgcgaggtgcgcgccgtcgcggacgccgaggcggaggccgacgcctccgcggcggtggtcgacgtcaacctcctcctggcgttcctcgcgatccgagacgggcgcttcgacgaggccatgcagcggtacagggcggccgtggcgagagacccgtcggaccgccgggcgtacgagctcgccgccgcgctctgctccatcgccggccacgccgcggaggagcgggacgcgtggctgcgcggcgaggagaggcactgcgaccgcggccgcggcgcgacggcgggacgtggcggtggcctgcagctgcaggctctcctcgacgagcaggtggtcgccgccgcgctcggcctcggcggcgaccggacggcccgcgacccgcaccgcggccgcgtcctggccgccgcgtggagggaggtggacgccgggctcgccgcggcgctgcgcgacggggaccacctgaccatggcggagcgcgcgcagctgcgtggcctccgctgcgtcctgcgcgccaagatgcagccattgctggacaccgccgccaacagtactggaccggacaactctcctcaacaacgatctcattag

SEQ ID NO: 82825 - DNA, 587 bp, Oryza sativa
  Clone ID: PAT_MRT4530_82216C.1
tcctcctcatcctccccaaccactgcatccgggtcggcgtcctcctcctcctcctccccccccgcgccgcgaatgcggcacccgggcatcctttccaatccatgctcagagttggaagtacagctgctgctgatgatggtgtgtggatcggtgctggttggtttctcgttcttgcttgagtgtgagatgtgatgttgatgtgcgtgtgtgtggagtctggactggaaggtttcttgagttcagagtgcagatcagagaatcgtacttttgctttttgcagtgtgttcttggtttgcccacacgatctgttcatcttttgtttcttttgttttgcctttcatgaacaaacgaccacagctctgcttgcctgctaccgtccttctcagtttggcaaatgaaaggatattttttttagggaaagaaagcgaaaattactagtgctagaaagcagtggcaagtgagaataacacttctgcttgattgattaggttaggagtttatagatagttcttccctcttggtactgtcagtctgtcactggtgtgtaagtagagtgacagtgttgatgttcttccttgagataaacg

SEQ ID NO: 82826 - DNA, 184 bp, Oryza sativa
  unsure (1)..(184): unsure at all n locations
  Clone ID: PAT_MRT4530_82217C.1
gattcggcacgagcggcacgagcgggcaggaagctacggctacggatccggatcccaaganctgtacccncccaagcctgccgggggcgggtggtcngatnacggggtgtncgcgtacancggcggcggcggcgacacnccgganccgtacggcgcgaggggcaccgcgcccangtccaattcc

SEQ ID NO: 82827 - DNA, 1271 bp, Oryza sativa
  Clone ID: PAT_MRT4530_82218C.1
gttaacttaaaaggcacctgaacatgatatactccaacatgctccagattacatgtgtaaatggtgaacctgacaaacatcttctaagaaaactgatttctgctctgtgtgactgctctgttgctcaagctccttagcagtcttgattctgaatgtgggtaccgacaataaatggtacaatgccatataatttacagaggctcagcagtatccctaagctgtacaggctacaaacacgctgtattaatttttccaagcagagatcaaatctttcactacatgctcatgtgagttacaggagcttctacatccagtgcgattcaagaatctgcatgccttcttatcgctttcttaagagctagaacccattaatccaaaacagcagctcggggagaagatcgctcgccgaacgacatagaagcgagagatgatgcccacaccctgctgttcatagctccacccatgagcctgcatttgctccagatcttcctcaggtctacagcatgcggcacgcattcgagcagctgggtcagtttggcaaggatgccaaggttggcatgccggaagtattggacccagattcctttgatgcaggagaagaactttgggaagaaggctaccagtatcttcaggcaaataaataggatgctgaatgctaggtagggctcactcttcaaagcttcaataattgagcttttccaaagcttcacatgctgtgtgcttccagttcgagctgcgctccatttccttggaccaagatatgcaattggttcttgaccagttacagcagtgtaaacattaactagcgagtcaagctccttagaaccaacaggccagtacgcatatggtccacaagctatgagtatagaaggaaagctacggacaccatatcttgataaaacagctggcatggcattggtttgttccacagccaagtgcttaatccgtggaaacattgagctaagatcatcgaagactggcctcattctttgtgagaaggggcaccacgatgcatagaagagcacggcagtgcattcttccttgccactcaactccttgacaagttcctccccattaatctcctcggcggggcaccgctccgccgacgcgcggcaggacggccggagcgcggcggcggcggcggctgcgacgaacggcggcagccgctccctcgggcaccgcgcctcctccggctccgccgccgccgcgggaggcggcaaaggagcgaggaggaggaggaggaggagaggggcgaggaggcgggcggccat

SEQ ID NO: 82828 - DNA, 291 bp, Oryza sativa
  Clone ID: PAT_MRT4530_82219C.1
atggagaaaggggccattgagacgccgccaccgcaactaaagccaagagaggaggtcaacaagggcggggtagtccagtgggctttctcaacatcaaaggtgacaccagcgaggcagatggatatatataacgtgttaggaagggaaatgggaggcaacgagcggcacagcttcgcgttcctctgccaagcgaagcgcgcgtgcgcgcgcgcggagtgcatcacccatcacccgacatggcatcgctgcgacgcgctgcacagtgtcgcggcgccggggcgtgagccgtga

SEQ ID NO: 82829 - DNA, 547 bp, Oryza sativa
  unsure (1)..(547): unsure at all n locations
  Clone ID: PAT_MRT4530_8221C.1
gattcggcacgagacnngccaagtatccgaagtctgtntttaccccctctgttagngttacaacntcatttgtggctgaagaagacgccnncatcngtaaatgtntagaacaaaacngnagccaagatctgganaaagcttctcctgtggattcagaaacaacaatctgcctgtntctggtcctgancaggtngaatgtgtcaattcatgttttcccaccgagtgtncaaatccctccgatctagggtgccaganaaactacataccttctgtgacatcacaataatagttggctcatatcttgggctacttcaggctgtcttcccggtcttttcagcacaatttgtatggaatatcatgggtgtctngaatgattccccantgctaagggctgcanttcgctcctancaatcaaatcacttggtgctcccggcgtattactgtctctgggcatgcaaggtgttttccgtggtttccaanacaccaanacccattgtntgccnctgtggttggagatgcacaaacatcatactacacccatttgatg

SEQ ID NO: 82830 - DNA, 437 bp, Oryza sativa
  Clone ID: PAT_MRT4530_82220C.1
gctgcctttggttttttcccggggtgacaaagggccaaaatggagcacaacaggaccttaaatggcttaagtgggaaagattgttcccgtgccaaacctgtttaaaaaaagccgacaaaccaaagtttaattgcaaccttcggaggaacttatgctttacccaccggaactaaactctttcggtccccccaaaattaatgcttgccagccccaagggcacccaagcctccctcgcatatccccaaaactttaccaaagctctttggggggggaaaacccaactccccaatgcgagagggaaaataaaacccgggaaacggaccgttggccccaatgtaatccgaactgggaaggggaaacgccatgtgggtttgtggaaagttccaacttggaacaaccttcagctttaggaatgaaattctccgaaaacccccacc

SEQ ID NO: 82831 - DNA, 225 bp, Oryza sativa
  Clone ID: PAT_MRT4530_82221C.1
ctacttattccttttctgaactaacccaaagatcaggtctgatgcggaggcaaacacgagaagaagatgccgcgtcggcctatcggcggcggtgtttccttttctctccttctactcctttttcttcttattgtctctcttctttatctctttagttccgtcttcatttcagtcattttatttgtatcttttctgactgctttcaattatgattttcatcttctt

SEQ ID NO: 82832 - DNA, 736 bp, Oryza sativa
  Clone ID: PAT_MRT4530_82222C.1
atttttgtttatgttctgcactctgctcaaaagaacctatttctttcggtttttgattctcaaccttgagctatcggttatcttatttatgtgagaagctgccgtttggatattgatataattgtgttctgcctgcctctacaaaaaaaaaaaaaaaaaaggggcggccgcccctttttttttttttttttgcataggcaatatagttttatgaaccgtatttggtaataaaatgtataacggaaaggcataccacagaacaagcaaaatgctcgagttggtaaatataacagtaaacatgccaaatccagcagataccacttcctatctgaaagtactgaatacaagaccacaagttctagttcttcgatgggatgctctccagctctttcctgagctgcagagagaagtcgtcattgacatcatcgtcatcccagtcatcctcccattgctgaactgcctcgttgccttcttccttgtcatcccattcttggtcgatctcaaacccagaactaaatgaagcgtaatcggacggcccaaaaagagtcacttgtatgtcaagaactcggggcttggcgctggagctcgcgcgaccgccgataggagtcgatgtgctttgcttggggtcggggaaaggagaaatacggtagtagacgggagacgccagccacggcacgagcacgatggcaaatgggccgtcgtagcaccacctaggcattatgggccggtaaggcat

SEQ ID NO: 82833 - DNA, 727 bp, Oryza sativa
  Clone ID: PAT_MRT4530_82223C.1
acccggggatcattgataaagcttgctccttctcctgttcagaagccgccagatagtgggacaacacattcaaattcttgtgaccactaattttttgaataacccggagattcattcccttccgacacattatggttaacgtagtccggcgaaaagaatgggttgatgccccccaacaccaatcctgtcagtggtggccttcaaaattttgtgggccatggaagaatacagatgaaagcccactcgtttgcccagaaatgtataggacaatggaaacctatcggattgttgagcttaccggtaatcatcaaataaaacttgcaacatcggggggcggaggttgtggccatcgagattgaacataaattcctggttaaagatgaccgctggcggagtttagtccagggttatttgtaccgtcaaggttacattgccaccccagatttaactacgctgcgagtccgtaccattggcgatcgggcctatctcaccattaagggtaaaaatgccagcattgcccgcttggatttgagtatgaaattcttgcagtggaagccaattaaattttgacagaactctgttcaccgcccctgattgaaaatatcgttattgcctcgattaccatggtaaaacctgagaagtagacgagtttttgggggataaccagggtctaattttaacggaagtggaattaacctacactggtgaaaaaataagtctacttccc

SEQ ID NO: 82834 - DNA, 331 bp, Oryza sativa
  unsure (1)..(331): unsure at all n locations
  Clone ID: PAT_MRT4530_82224C.1
ggtcancaaccgtggaaagatcnctntatacaatttnnncgantnaaagctcaanaatttgacacctatcntactncccaccctccacgtcgaaaactcttaaancaaatcaattcctgctcccgtcngaatnggtnccttgnctcgaattttatggagtcagnttcntctancggaaaaacacangtctccttgaatgaatcanaangggtgaagggaacaaatttnaacttccnnnnattcagatcananggttcccncnanttancaaagaaaccnaggaagcccgcgnaggcgtntcnagatntgttttttccccgtcnncgggctt

SEQ ID NO: 82835 - DNA, 963 bp, Oryza sativa
  Clone ID: PAT_MRT4530_82225C.1
atgccgatgcccggagacgtgtacccggcgctcggcatcgtgaagcgcgagggcgggggcggaggtcaggacgccgccgccgggaggatcgggctcaacctcggccgccggacctacttctcccccggcgacatgctcgccgtcgaccgcctcctcatgcgctcccgcctcggcggcgtgttcggcctcggcttcggcggcgcccaccaccagccacctcgctgccaggccgagggctgcaaggccgacctctccggcgccaagcactaccaccgccgccacaaggtctgcgagtaccacgccaaggcctccgtcgtcgccgcctccggcaagcagcagcgcttctgccagcaatgcagcaggtttcacgtgctcacggagtttgatgaggccaagaggagctgccggaagcggctggcggagcacaaccgtcgccggcggaagccggcggcggcggcgacgaccgccgtggcggcggccaaggacgcggcggcggcgccggtagccgccgggaagaagcctagcggcggcgccgccacgtcttacaccggtgacaacaagaacgtggtgtccatgagcgcggccaagtcgcccatctcgtcgaacaccagcgtgatcagctgcctgcccgagcagggcaagcatgcggcggcggcggcgaggccgacggcgctcacgctcggcggcgcgccgccgcacgagagctccgcgccgcagatcggcgccatgctccatcaccaccaccatcaccagcaagaccacatgcaggtgagctccctggtccacatcaatggcggcggcggcggcggtagcaacaacatcttgtcgtgctcgtcggtgtgctccagcgcgctgccgtcgacggcgaccaacggcgaggtatcagaccagaacaacgacaacagccacaacaatggcggcaacaacaacaacatgcatctgttcgaggtcgacttcatgtag

SEQ ID NO: 82836 - DNA, 1711 bp, Oryza sativa
  Clone ID: PAT_MRT4530_82226C.1
atggacgccgccgtcgtcgccatcgccggcgacggggacgccgacgccggccaccgccgtcctctcctcgcctccgccgacgacgacgacgagatccgcccctaccccgcatcatccccttcgccgcagcacccggcgggggctgagcggaagccgcggcgggtcgcctcgctcgacgtgttccgcggcctcaccgtcgccatgatgatactggtggacgacgccggcggggcgtggccggggatgaaccactcgccgtggctcggggtgacggtggccgacttcgtcatgcccgccttcctcttcatcatcggcgtctccgccgccctcgtcttcaagaaaacaccaaacaaaacagtggcaactaagaaggctgcaatcagggccatcaaacttttcatcttgggtgtaattttgcaaggaggatatattcatggcagacacaatttaacttatggcattgatttggatcatattcgatggctaggtgtgctgcagaggatagctattggatactttctagcggcaatttcagagatttggcttgtcaacaatatttcagtggattcagctatatcatttgtgaagaaatacttcatggagtggatcgtggccgtaatgatttcagcactttatgttggcttgctactcggcctttatgtttcaaattgggaatttaaagttcaaactagcaattcaatccttacaattccaactccgggcaacgaaattggaatgaaaatgatccagtgtggagttagaggtagtcttgggccaccttgcaatgcagttggatttgtagatcgagttttacttggtgaaaatcacctgtacaagaacccagtctataaaaggactaaggaatgcagtgttaactctcctgattatggaccacttcctccaaatgcaccagactggtgcctggctccatttgatcccgagggtttgctaagtacattgatggctgcagtgacttgctttgttggattgcattttggacatgttttggttcattgcaagacttctctaacctttgcttctaccacaggatcattcacctcgaatgctattatggctactagcttccactgtgttaacagtctcaggatttctacttcagttattagcaagcctttgtacacggtgagctacatgctactaaccggtggggtatctggattcctgctgttgttgctatactacattgttgatgtcatcaatatcaagaagccgttcatcctattccagtggatgggcatgaacgcgcttatagtgtatgttcttgctgcttgtgagatcttccctacacttgtgcaagggttctattggagatcacctgaaaacaacctggtggatttgactgaatctctgcttcagacaatcttccactccaaacgctggggaaccttggcgttcgtcgtcttggagatcatcttctggtgcctggctgcttgtttcctccacatgaaaggcatatacttgaaactgtagctgtagagccattcatttccctgcaaaaacacattttctgcagaaaatgttcttttttggcccaagcaagggccttccttgtaaatcttctgaaacaattctctgtaaatgcacttcctccatttgtacactgcaactgaattgatcgcccctgatgtatcattttgtaaattcaatgcgtggatttaattgtaaattaaaaaaaaaaaaaaaaaaaaaa

SEQ ID NO: 82837 - DNA, 349 bp, Oryza sativa
  Clone ID: PAT_MRT4530_82227C.1
gccacgcgcgcggaggatagtcacactggagcgtgcgtcagccatgtcacgcttgatggacaaggcggaaaggggcgtggcggataatatcgaccacatcccatagccctaggcgttgttagacagctggccgtgctaggggatgagccgtgagtgcgtgaccgcgcacagaaacgtcgacgtctcctaccactacgaccaccgcctcacgatatgacagctaacgtacaccctctagtgcgccagccacgttgctgcgtgcggcacgatgccctgtccggtgcggatcgctgaatgcgacaccacaaaactggagataccggaccataccccctacgacttactcatg

SEQ ID NO: 82838 - DNA, 394 bp, Oryza sativa
  Clone ID: PAT_MRT4530_82228C.1
ccccggaacccttgaaaaatttttttgggggggcaaaaaatagccccaggcaaaaatccctgttcaaaaaaacatgggcctttcaagccccccttttgttttttaggactttttccccctttttccctgggggggtttcctttggccggaaaaaaatttgaaacggggaatcttgggacccttttcaatttccctaaagggggcaaatttgtctgaaattgcttaagggcaaatcccctaaatgctaattggcccgatctgggcaaaatttaaaataaaaaatcccagggggaggacccttgcttcctgaaactttaacatttcccacaccccccccctccttgttttttccctgggaaaagaaccccggaaaaagggcccccatttttggttt

SEQ ID NO: 82839 - DNA, 1004 bp, Oryza sativa
  Clone ID: PAT_MRT4530_82229C.1
atccaacgtccgcctaaagaaaaacacgcacacacttcttctgcttccctccccttgtttccgctccacttcccttccaagcaagaaaaccgaggcttcagcttagctaggaccgaccgatccgatgtgcggcggtgcaatcatctacgactacatcccggcgcgccgccggttgtgcgcctccgacttctggcccgacgccgacgactccgacccccacacccccgctcccgagaaaccgccgcgcgcgaagagggagcggaagaaccagtaccgcgggatcaggcagcggccgtgggggaagtgggcggcggagatccgcgacccggtgaagggggtgcgcgtctggctcggcacctacccgaccgccgaggccgccgcgcgggcctacgaccgcgccgcgcgccgcatcaggggcgccaaggcgaaggtcaacttccccaacgacttcggcgccgcccccgcgccggccgcggcggcggcgaaggccgtccctcgcgtcgcgcccacgccggccgtgctcccgccgcccaagatggaggcggtgtccgagggcgccggcgcctgctcctccgacgaggtcaaggagctgtccgaggagctgctcgcgtacgagaactacatgagcttcctcggcatcccctacatggagggcggcgccgcctccgccgccggcgccgaggaagccgcggcgcccgccgggctctggaccttcgaagactacgagctgccgtcgctagcgctctagtaaaaatgtcacaataaaaatgacatgtatgtgaaaaaatttttccctacccgtagtaagtaaccagtgtctttttttaccgtactctatgcgttatttttgttgaaattaatccattgttgaagttgtaactgtgcatggtcggcgccagtctcagtgaagcttttgctgaatccaagtttttctctaatgtaaatatgaaatttccagttaactcagcttgaaattctaaaaaaaagtgctaaaagcactatgg

SEQ ID NO: 82840 - DNA, 230 bp, Oryza sativa
  unsure (1)..(230): unsure at all n locations
  Clone ID: PAT_MRT4530_8222C.1
gctaagctnagcgcgnagacatngacgtggccatnggntnnccgtccncttcttctgcctnctcctcctntcntncggcgccatcacnttcctcctcctccgtcactgcctntncgggctacggcgncntcaacgtgntgnngncggcnccgacgtngacgccgaggccgcagaangcgatngaggnagangacaantanatgtcgccgtnttctnctcatacttagcaa

SEQ ID NO: 82841 - DNA, 616 bp, Oryza sativa
  Clone ID: PAT_MRT4530_82230C.1
actttggagcatcaacactgaaatccatggatagaaatgattttatcatgttcatccaaggaactcttgggtaccttgaccctgagacttttgtcagtcaccatcttactgacaaaagcgatacctacagtttcggagttgttcttttagagatcatgaccagaaagaaggctctgtacaatgatactttgaatggaaatgaggcgttatctcatattttccccttgatgttccaccagaaaaggcactgtgatatgttggattttgacatgatagacgagaaagttatggtagtactgcagaaactagctgaactcgccatgcattgcctgaacccaagaggagatgatagaccaacgatgaaagaagttgcagagcgcctacaaatgttgaggagactccacatgcagcttgtctcaaaatcgagtcctaccagagtttcttgctcgtatgaaggatcatcaatgcgtattccatcagacccgatgaaataccagagcatggagacagccaagctggtactgcgggcgccgcttgccccatggaagccggcaatcctcgccgccgtcgccgcccccgtcgacggcgatagcctcgccgccgccgccgcccccat

SEQ ID NO: 82842 - DNA, 489 bp, Oryza sativa
  Clone ID: PAT_MRT4530_82231C.1
atgagcgccggccaccccctccccccatcttcctccaacgcctcgccgccgcctgagcggccgccggcaaagccacgcggttgcaaggacggcggcggcggggctcctcgtttctcgccgtcagaccttgcccgggtggcctggggaaccactctgggtggtggcggcggtgaccgccagatccgcgtcgctccggccggatctggcggctgggatggcgacggcgacggtaggggcgagctgtgccgggcggctggatcgaaggcagcggggatggcgacggcggcggggaaggcagtggtgcgtcagaggcggatctggctaggcggggcgagctggcggcggtggtggcggtggagctcgcagcgacgagtcagcggcagcggggcgagcgacgacgacgcgaggcttgcggagacaacggtggccggccgttggtacgagcggctggaggcgcggctggtgatggacgacggcggcagcggctga

SEQ ID NO: 82843 - DNA, 440 bp, Oryza sativa
  unsure (1)..(440): unsure at all n locations
  Clone ID: PAT_MRT4530_82232C.1
agncggtccgaggcggcgatggaggtgcgccatgacgccgccggcgccaaggcgtgggtgacggaggccagggcggacggcgagacgtgcatggacgagtgccggatgacggagggcggcgccgccccggagatcgccgacaggatcgacgagctcgccaagctctgctccatcgccctcgccctcaccaatgcgtccatgagcaaacatccgtagcaaatcatcgtgtataacaaaaacgagatttggagggggagacctctatccaaacatttattaaaaagaaattatgagcgtgttaaagattgaacacgagatctcggaatcgggattgaaacctatataccctttaccactgtactatcatgtgcatttctatgtatcctcgtgtatatatacgaccaccaaattctctcttgttaaaaaaaaaaaaaaaaaaa

SEQ ID NO: 82844 - DNA, 399 bp, Oryza sativa
  Clone ID: PAT_MRT4530_82233C.1
gagaaaaagggggacgggggacccacgttggaaaaaattcaagcccttgatcaaaaaaatttcccctgaacccgaaacaaggcccacaaaactaacagagcatttctcgaggctgaaagcctaacaaagaattacattttcggggggagggggttcaatttgagggtttgacaaatttacaaatgcccaaagctgggaacggggtatgaccaaaagaaactgattgctaggggaaggaataaccaatggggcggagctcccggaaaatgggaccttgctctttaatcttggctaggttggccccgaggagcttatccaatatgggcggctcgaaagggattgggacaaaacatctctcgggagcagcattggtcacctctttaagaaaaaagctaaaag

SEQ ID NO: 82845 - DNA, 220 bp, Oryza sativa
  Clone ID: PAT_MRT4530_82234C.1
gtcagaacaccacagcagtccaggcaaagaaaccccccacaaaagtggctctttgtcacacttgtcggtgccacagccagatatctgaaggaagagtgacactggaatggaagcagttcccaagttgctggtttgcctataaccagtgtgtatagtgcataacctgggacttgcacatcggtaacactccccaagtccacaagtaccagctttttctgca

SEQ ID NO: 82846 - DNA, 1296 bp, Oryza sativa
  Clone ID: PAT_MRT4530_82235C.1
tcactccctcgcgctcgcgctgcctcgcaggtccgccgccgcgccgctgccgacctgcggaggcgggtcgccgacacccagcacctccgtcgacgcgacgctgcggcctgtctgcgactcctcctccttttggcccagccggttccaccactgaaccagagcatgcacttccttcttcagctcatcttcttcctctttctcagtgcacttctcaaacttccatgcacacaccatcaccaacacaacgacgaagactgtggttgcactggagtaggaggtgtatcctccagcgaggtgatgatcgccatacatgccccttgggtagccttctctcttcgatgatggcatcgcatggtggagctctccaccgtcttcgccgccgccgctgccatggccgtcgccgtctaggcctagctggaacatccccggcattgccattgccggcggtggcgccgccatcgccgcctggtgatccatggcgtggaagaacgggaagctctgcatctgctgtagtctccattgctcgaggccggtggcggcgccgacggagtagcagccggccgcgtcgacgggcggtggcttgccggcggccgccgccatgccagagaaggtggagccgaggctcatggcgtcgaagtcggcgaggcggagcagcggcggcaggatggagaggttgccgcccagcatcgccgggagggcgggcgcgttgggcgtggcgcaggtggaggacgtcgtcgtcgtcgtcgtcgaccccgctggcgtcgagccggcggtggtggtggcggctgaggcggagcccgccgcggacgccggcttgggcttggcgcgcttggcgtggcggcggtagccgccgccgacggggacgttgcggagcgcgccgccgcgggtccagtagcggcggcaggcgcggcagaagtggcggggctgggagagggagtagttgttgaagtagcagaacttggtgttggtggagtcgcagcgcgggcacttgagccccggctccggcagcgggatcctcgccagccgcgccctctccgacatcgacatcggcttcgccggccccaccgcgccgcctccgccgccgccatcggcaagcgtgcccggaatcattgactgctgctgcagaagctcatggctattgccgtcgccgccgccgccgccgcctccacaaccggcggcgacctgatgatgctggtggtggccgtgagcatgttgctgctgctgctgctggttgtggttgttgttgttgttatcattccagctcgaggaatccaggaaggcaggggggaagatcat

SEQ ID NO: 82847 - DNA, 2875 bp, Oryza sativa
  unsure (1)..(2875): unsure at all n locations
  Clone ID: PAT_MRT4530_82236C.1
ccgcgctgcaggaagtcgccgccaggcgcttccgccgccgcacggccgctccccccccgccgccgccgcctccgcagccgcggccctcggacccctccaccccccccctcgactcctgccaggtccgctggggcacgttcggtcctggcccgtaggaaccctggcgcgccgccgctgccgccgccgccgcctcctccccggccggcgcgatggtcgaggaccccttcctcgtactcgccggaggcaaggaaggagggttcctggagcttgaggagatcgacgaggcggacttcggaatctttggcggtgccgtggaggatctaggagaaattgacaggaaggcaggaaaggatcagaagaagaagaagaggaagaagcggaagcgaggtgacgatgactatgctttacctggtgatggtgatttggtagttgaatgtgaggaggagggagagaagggtgagaagagggtgaaaaagaagaggaggagcaggaagaagagaaaggtgaaggaaatggaggaaaaaatggagagcaaggaagatgtctccgatgacaatgtggaagatatgcaagatggcaatgacatggaacaagataacaatgatgggctgattttgggagaggatgaagtctatgcatggcgagagcttagactgcaccctcttcttattacagcggtgcgcaggcttggattcaaagaaccaacaccaatacaaaaggcttgctttcctgcagcggctcatcaaggcaaggatgttattggtgcagcagagacaggttctggtaaaacacttgcttttggcctccctatcttgcagcgccttcttgaagaacaagagaaggccatgagattgtctcgggaggatgagagtacacaagatgaaaattctagagaaagtccacttcgtgctcttattttaacacccaccagggagcttgccaagcaggtctgcgatcatctaaaagaagcagccaagttcttaagaatccaagttgttcccattgttggtggtctatccatggaaaagcaagaacggcttctgaaaaggaaacctgagattgttgttggaaccccaggaagattgtgggagcttatgtcaacaggcaaccaacacctaattaagttacattcattatcattcttcgtgttggacgaggctgatagaatgatagagcgaggccatttccatgaactgcaatctatcattgagatgttaccagtgactaacggttctgatgaacaaactgttgggaccacgccaagttgcgaaactgtgcctatattgcaaataaagaagagacagacatttgtattctcagcaacacttgctctctcagctaattttcggaaaaagttgaagcgaggcctagttactgcaaaagcgtctgcatctactgatttgagttctattgaagcactttcgaagcaggcccgtatgaaacctaacgcagaaatagttgatctgacgaaggcttctatcttacctgagaaacttgaagagtcttttattgagtgtagtgatgatgataaggatgcctacctgtattatatattgagtgtccatggacaaggccgcacaataatattttgtacatcaatagctgcattacgtcacctttcatctatattacgagttcttggaattaatgtcctgacaaatcatgctcaaatgcaacaaagggctcgcatgaaggctgtggatcgtttccgtgaaagtgaaaattcaattttggttgcaactgatggttttgcaaggggcatggattttgatgatgtccgaactgtgattcattatcaattgccacactcaactgatgtaggtttacatccacagaagtggaaggacagcgcggaaatcaatggcaggttgcagcattgcattaatctctcctgcagacaaggccaagttttactcactttgcaagtcactgtcaaagatccttttatttttctcctagttgccactagtgcacttttaaccctcactgagcttggttctttctcaacttatgtcaatgagaacctccagcagtttcctgttgaccatgcttacatgcctgcagtaatgaataggctcacccttgctcggcagattgacaagattacacgctataacttgcatctgcatgcttttcaggaaaatgccaacaaatcatggcttcagaggaatgctgagtccatgggattattattggagacaagtgacagtgaggaggaacgtgtacaggggcataagcaaaggaaagcaacttctgcgaacctccagaagcttcaacaggatttgagtgagctcttgcaacgccccttgcagcctaagactttttcgcggcgctatttagctggggctggtgtttcaccgttacttcaaaagcaactggaagagttgtccaaaaggaatgttaagggcagtgctagtgtaaatgcaaataaaggatcccgatttgttgttattggtcaggatcaaatagaacccttgcaagctcttcagaattctgggcaagaggtgtgtgtgagcattgacaagcaaagagaaaagcgaaggcttgctgaaaattggaggcgaaagaagcaaaaagagaagaaaagtacacgagagcaaaagagaaaggagaagaggatagctaaagaaagggactaaatgacaacgttgtccaactactcatcattgtaggcactaccacttgtnccctgttgggaaacaagttttgggggtgttggatatcatttttgcaattgaagatagggttataatcaactgtaccagcatcatatctgagcatcaactgtggcatgcatgatacccaccagtttattgatctgatggttgctggacgcctgaaatattttcttcaaccacataaaaaaaaaaaaaaa

SEQ ID NO: 82848 - DNA, 732 bp, Oryza sativa
  Clone ID: PAT_MRT4530_82237C.1
atggcagcctccaccaccgcgctgagcatgaagctgctcgtcgacaccaatgcccagcgagtgctgttcgcggaggcgagcaaggatgtcgtcgacttcctcttctccctcctggcgctgccggtcggcacggccgtcaagctgctcgggaaggactccatggtcggctgcgtcggcaacctctacgccagcgtcgagaagctcgacggcacctacgtccagcccggcgcctccaagaacgcgctgctcagccccgtcgtgctctcgccggcggccagctccaacacctccgtcctccgcttgccggccccgtcttcttcgcagcccaagagcttcttcagctgccgctcctacgactgtttctactacgtgacggacgtgagcggcgtcaagtgtccgtcctgcggcaaccagatgacaacggcatgcacgtatgccgcaccaaccgctgcccagaagctgcaggccgctgcagccgaaggggcggggaaggggttcgtgcagggcatcgtgacgtacacggtgatggacgacctcaccgtgtcgcccatgtcgtccatctccagcatcacgctgctcaacacgttcgccgtcaaggacctgggcgcgctcaaggagcagaccgtgcagctcggctacactgagggcctggcgatcctgagggcctcgctgcagtccaagaccgttctcagcgacgttttccttgccaggaggcctgcaaagcaagcctga

SEQ ID NO: 82849 - DNA, 539 bp, Oryza sativa
  Clone ID: PAT_MRT4530_82238C.1
ctcaccccatctcctcctcccctctcctcccctccagcggggcggcgggatggaggccggccacggcggccccggacagggcgacgggatggaggcctccgcggcggcccgacgcgaggcgacgagatggaggcggcggcgggctgcatcgagggcggcggcgaccggcgccggtcgagaggggcggtggccggctgcatcgggcgcggggcggcgagatgggggcgactggcgccggtcgaggtggcggtggccggcgccggtcgagagggcggcagccggctgcgtcggggacagccggcgccggtcgggagggcggcggcggcaggcggagaactttttttttcttttctctatgctatctgatgaatgctggagatgttgtagatgtgaactttcttttttctttctctattctctgtgatgaatgctctctttgttctctgtgatgaatgctcattgttctgaagatgttgtagatctgaacaagtgtaaagaatatggatgttttgttgtttgattttaaaaaaaaaaaaaaa

SEQ ID NO: 82850 - DNA, 506 bp, Oryza sativa
  unsure (1)..(506): unsure at all n locations
  Clone ID: PAT_MRT4530_82239C.1
ctnncgaggccggccggggcgcagacgcccgtccaacgtacctccgtgtccgnccccagcatggtcatcgagcattttacctacgacacggccaagaagtacctcaaccgggaggacggcgagcctgccaagatcccgatccctatccccctctgcgccggagacctcgtcggtgccctctccacgcctctgcactctaccccatggtagctggcaggacccgccttaccatcgagaaggacgtgtacgacaacgtgctgcacgcgtatgcgaacatcgtgcggcaaggcggactcgtggagctgtaccgcggcctgtcgccgagcctgatctgggtggggccctacgcggacaccaacttctacgccgtctgtgggcggtaggtgtaccgtcacgggctacagccatgtactgaatcctccgtggtgagggcgcctatagcatataccgcggactggctcacgtctgcattgagctcatgcaccgccgacgctatcttcttgatg

SEQ ID NO: 82851 - DNA, 219 bp, Oryza sativa
  Clone ID: PAT_MRT4530_8223C.1
tgcgggaaacagcgagcagatctgcagtctgtacctccgcgcaagtcggtgccaagccaccacgcgacgggacccgtggccctactcgccctggcggggcgcccgacccgcgccataccgggcgggctcaaccatgcggtgctcttccccatccccgcgcaccgagtcagggcgccgaggagaactccgggggctgaggttacaccgctcctactatga

SEQ ID NO: 82852 - DNA, 673 bp, Oryza sativa
  Clone ID: PAT_MRT4530_82240C.1
atattttaggacaaattctgaatactagaagctttatattttgggacgaacgaagtaccaaataattggtagggcaataattgccatcaaacccaaacagccatatatacttctgttttaacagcaaaactatacatctgggataatttggaacacatgtattttttttcctgaattccaggcattgcagcatttttgcaatgaacctgcgaaactttcttctgtgctttgactctcagaattttgtgtgatcagtaaatcctattgctgttagagactatgggtgtgcatgctagcatattgcactggtaagagatacagttaacgcaagctgccaaggtctgatgctgataggtgcagcagatcatccgtcagatgctacagaatctgaaagaagaggctgataggtagcgcccctgttgcgacccgaatcggctagtaaatgggtgagataactgccagcagatatgatccgtgactccatattcctgggggtatgggtatgtccattggattgctcgatttgctgaagtatgttgatggcattaggtcgaaacatgttcctgaagtatctcaaagccagcaccgggcccattctaccgcaacaatcagacccatggttatccagtacgaaggttggctacacaggcggaacattatagtatacatttgg

SEQ ID NO: 82853 - DNA, 392 bp, Oryza sativa
  Clone ID: PAT_MRT4530_82241C.1
ttaaatagccctactttaccgtaatggctatagctggtttactggttggtggtactaattgatatggtttgctggttggtggtactaattgacttattttgcccccttgcattagttttaatatggatcagatttccaaatagattggcatcttttgatacagaaattggataacctgccgatgaagtggtggaaggccgtggatgaacaattccactttgctgctaaaaatggacaggtctatgttgaaggatctgacagtatgtgttgctagatatcatacattgacttagagaagcatgatggctggatttaatatctgaagcagtcgttgtgaaattactttgtctatgctttaaccaagagcgcttaaacactatcttttaatttat

SEQ ID NO: 82854 - DNA, 2236 bp, Oryza sativa
  Clone ID: PAT_MRT4530_82242C.1
atgtcttccgctccgccgccgccgcggtcgccggctgcgacgcccgacgcggcggcgccagcgtcaccggcccggacgcgcgtggtccgcgcgcccccacggccgccgcggccgcggctggcgcacccgggcgccgcgccgccggggtgggcggagcgccgccccgccgtgtccgtggactacgaccggggccggcgcgaggcccgcgccgaggtggagggcgtgggcgccgcttcgctccccgcgcgccaccgcctgcgcgtggaggggagccggtggcagcgggactggaaggtgtcggaggccgccgcgcgcgtgctcgcgctcccgcgcgccgaggcccgcgccgtcgacgccgtgctcaactgctgggccggccgcttcgcccgccgcaacttccctctcctcatccgcgagatcacaatttctgggaatttacagcatgctgtccatgtgttctgctggatgaaaaatcaggataactactgtgctcgtaacgacatttatggcatgatgatacgactatatgcgaggcataaccaggttgatcaggcacgtggcctgttctttgagatgcaggaatggcggtgtaaacctgatgctgatatatacaattccctcatccatgctcattctcgagctggtcaatggcgttgggccatcaacattatggaagatatgcttcgtgctgctatacctcctacccggactacgtataataatgtgataaatgcatgtggggctgctggcaactggaaaaaagctttagaactgtgtaagaaaatgacagaaaatggtgtgggaccagatttggttacacacaacattgtcttgtctgctctcaagaatggagctcagtactcaaaagcaatatcttattttgaaataatgaaaggagcaaatgtcacctctgatactttcacgttaaatattatcatccattgccttgtaaagattggacagtgtggggaagctattgaattgtttaactcaatgagggagagaagaaccaaatgtcctccagatgttgttacatatactagcatcatgcattcttattgtatttatgggcaagttgaaaattgcaaagcaatctttgatttgatggttgctgaaggagtgaagcctaatattgtagcatataattcgcttttgggtgcatatgcctcacgaggtatgcatagagaggccttggcaatttttaatttaataaagaaaaatgggttacgacctgatatagtttcgtatacctccttactgaatgcatatggtagatctgcacagcctgagaaggctagggaggtctttaacaagatgaagaagaactcatgcaaaccaaataaagtcagttacaatgcacttattgatgcctatgggtctgcgggaatgttgaaggaagctgttggcttgctgcatgaaatggagaaagatggcattcagccagatgttgtttccataagtactctgttggctgcctgcggtcgctgcaggcagataacaagaattgagacaattcttgaagcagctaggtcccgaggtattgatctaaatacagttgcttacaactccggcattaaaagttatttaagttttggagattatgagaaagctttggagttgtatacatcaatgagggagagcaatgtgaaaccagatgctgtaacctacaatatactcatcagtggatctagtaaattaggaaagtatacggaatctttgagattttttgaggacatggtggactccaaggtttcttcaaccaaggagttcttatggaccataaggtggttggaagagagcttgggacctgttcaaagagatggaagtaaatgggatacgtgactggaaaacagcaagtgagatgattgaatatttggattcttcgctctcatccatttctgttggaacactaaaccatgttttaaattttcttggaaaatgtgggaagacagagaacatgatgaagctgttttacaagatggtgacttcatgttctactgtgggtctttctacttatgcggttgttcttagaaatctcctagttgttgggaaatggagaaagtatattgaggttttgcagtggatggaggactctggagttcatccaacactatatatgtttcaaaatgtccttccctatatctggagagaaaatggcatggattttgctgctactatgcaagaaaaaataagtatgatacgtcctactctaattatcatttcaagaagactatga

SEQ ID NO: 82855 - DNA, 1363 bp, Oryza sativa
  Clone ID: PAT_MRT4530_82243C.1
gacgctgccgccattggcattgtttgtaggcgatcgatcgagcaatcgtggatggggaggaagccgtgctgctccaaggaggggctgaacaggggggcatggacggcaatggaggacgacatcctggtgtcctacatcgccaagcacggggagggcaaatggggagccctccccaagagagccgggctgaagcggtgcgggaagagctgccggctgcggtggctcaactacctgcggccggggatcaagaggggcaacatctccggcgacgaggaggagctcatcctcaggctccacactctcctcggcaacagatggtcgctgatagccgggaggctgccggggcgaacagacaatgaaatcaagaactactggaacagcaccctcagcaagcgggtcgccatgcaacggaccgccgccgccaccagcatgccggcggcggccaccaccagcagcaatgccgacgccgccggcgctgctgcacgacgccggcgatcgccggagccccgcacggtcgtcgtcagcccaatccggaccaaggcgctgcggtgcaacaacaacagcagcagcgggatagtggtggtgcagcaggcaggcgcctgcagccacggcggccgtccgccggagagcggcgcgccgggagacgcggcggctgataaggtggccacgccgcaggcggtgcagcagcagcagcagcaagagctggccggagcggaggatgacgacgacctgccggtgccggccgtctgtatcgaccttgacttggacgacatcgagctgggaggactcgacggcttcctgatcagcccgtggcgcggcggcggccacgacgacggtaacgccgccgccggagcggtgccgaatctgccgatgccgattggctatgagctcggcggcgccggtggcggtggcgaggctggagctgttgacctggaggcgttgctggggcagctggaagcagaggaagacgacgacggtgaccaccaccaccaccaccaccaccaccaccaccagtaggaggaggaggtgccttcttcgcttggggacgaagacgacgactacttggagttcgcgccatggctcctctgatagcggcatccatccatggatcattgtggaatcgaatcagtcgagctgagagttgagagttgagaaagatcgatgattgctttgctggtcgtgtgttcctgcgagtcggatcatcggcacgaagagagatctcatcgattaagtaggcgcagaaggcgtacgttgaagcttagctgctgaagaattactgacgtagtcagatgaccatttccttatatattgtacagattataatggagcagattaaataaatctaaacacaccgcatttgatc

SEQ ID NO: 82856 - DNA, 1947 bp, Oryza sativa
  Clone ID: PAT_MRT4530_82244C.1
gatccgtacaatctgttggagacagatccagctttatattgtagaaaaattgttttgcgctagacattcatccagcacgttttcccatttttttgtgagtacacaccaaaatgacagatccagcttcatatcttagagaatgatgtatagcatctaagggaatggaatcaatagcatatactattggctgtggcaactagtgtcaattcacagcatcacgaacgagagtaaaatgacagacagtggctttttgatcccatatatccaaaattattacaaaattttggaatttgtgaagccaagcagtttggatgttaaaagcaaaacagaacttaaatgtgaatcgcctttgtgaaggtttgcaggcaggcctccttcaaggcttcgctcacggtgggatgagcgtggcatgtacgagctatgtcctcacttgatgctccatactgcaaagcaaggacagcctcatgtattatctctccagcaccgggagccatgatatgcacgcccagaatcttgtcagtttccttctcagccaccaccttcaccaagccctcagcatcgtcaatggcctttgcacggctgtttgccaacagcggaaatttgccaacacggtagggaattcctaaagctttcacctgctcttcagtctttccaacagacgcgacctctggatgtgtatagaccacaccaggcactgtgtcatagtcgacgtgcccctccttgccagcaatgaactcaacacaggcaacaccatcctcttcagctttgtgggcaagcatgggcccagggatggcatccccaattgcatagactccattgacgttagtcatgaagcgcttatccacgaggatcctgccagctttgtctgtctcaacaccaacactttccaacccaataccagcagtatatgggactcttccagcagaaaccaatacaatatcagcttcaatgacactctgctcacctccagctgcaggttcaagtgttagcttcacaccatctccggaggtatcaaccccaactacctttgtcttgagcatgaacttcatcttctgcttctccaacatgcgctggaactgcttcctgacttcaccatccattgatggaactatatctggggcaaattcaacaacggtgacctctgaaccaaggcggttccagaccgaacccatctccagaccaatgtaacctgctccaataaccaccaatttctttggaatctctgacaagcacaaggccccagtagatgagacgattttcttctcatcaattgtgactccagggagtgattttacatcagaccctgtagcaatgattatgtttttccctttgacaactgtgctgccaccatcgctcagatcaacagacacctctgagggcgaagcaagtttcccaaagcctttgacatacgtcactttgttcttcttgaagagaccttcaatccccttagtcaggcctgccacagccttgtctttctgtgccatcatagctgggaggtctacctccagattggaaaatttcactccatggtgtgcaaaggaactttttgcttcatggtacatatgagatgagtgcaacagagccttggaggggatgcagccgacgttgaggcatgtcccgccgagggtgcccctcttctcgatgcaggtggtcttgagccccagctgcgccgccttgatcgccgccacgtaccctcccggcccgccgcccaccaccaccacgtcgctctcctcccccgccaccgccgcgtacgacgccctcagcgccgacacccccgccgcccccagcggccgccgcagcagcgcctccgccgcccgcctcctcgccaggattgcgagcgccatctctctctctctcctcgcttcgggctccttgtggtgttattggatttattttttttttcttcttttgctccaagaaagaggcctgcagcccggggatccacta

SEQ ID NO: 82857 - DNA, 2157 bp, Oryza sativa
  Clone ID: PAT_MRT4530_82245C.1
atgtcttccgctccgccgccgccgcggtcgccggctgcgacgcccgacgcggcggcgccagcgtcaccggcccggacgcgcgtggtccgcgcgcccccacggccgccgcggccgcggctggcgcacccgggcgccgcgccgccggggtgggcggagcgccgccccgccgtgtccgtggactacgaccggggccggcgcgaggcccgcgccgaggtggagggcgtgggcgccgcttcgctccccgcgcgccaccgcctgcgcgtggaggggagccggtggcagcgggactggaaggtgtcggaggccgccgcgcgcgtgctcgcgctcccgcgcgccgaggcccgcgccgtcgacgccgtgctcaactgctgggccggccgcttcgcccgccgcaacttccctctcctcatccgcgagatcacaatttctgggaatttacagcatgctgtccatgtgttctgctggatgaaaaatcaggataactactgtgctcgtaacgacatttatggcatgatgatacgactatatgcgaggcataaccaggttgatcaggcacgtggcctgttctttgagatgcaggaatggcggtgtaaacctgatgctgatatatacaattccctcatccatgctcattctcgagctggtcaatggcgttgggccatcaacattatggaagatatgcttcgtgctgctatacctcctacccggactacgtataataatgtgataaatgcatgtggggctgctggcaactggaaaaaagctttagaactgtgtaagaaaatgacagaaaatggtgtgggaccagatttggttacacacaacattgtcttgtctgctctcaagaatggagctcagtactcaaaagcaatatcttattttgaaataatgaaaggagcaaatgtcacctctgatactttcacgttaaatattatcatccattgccttgtaaagattggacagtgtggggaagctattgaattgtttaactcaatgagggagagaagaaccaaatgtcctccagatgttgttacatatactagcatcatgcattcttattgtatttatgggcaagttgaaaattgcaaagcaatctttgatttgatggttgctgaaggagtgaagcctaatattgtagcatataattcgcttttgggtgcatatgcctcacgaggtatgcatagagaggccttggcaatttttaatttaataaagaaaaatgggttacgacctgatatagtttcgtatacctccttactgaatgcatatggtagatctgcacagcctgagaaggctagggaggtctttaacaagatgaagaagaactcatgcaaaccaaataaagtcagttacaatgcacttattgatgcctatgggtctgcgggaatgttgaaggaagctgttggcttgctgcatgaaatggagaaagatggcattcagccagatgttgtttccataagtactctgttggctgcctgcggtcgctgcaggcagataacaagaattgagacaattcttgaagcagctaggtcccgaggtattgatctaaatacagttgcttacaactccggcattaaaagttatttaagttttggagattatgagaaagctttggagttgtatacatcaatgagggagagcaatgtgaaaccagatgctgtaacctacaatatactcatcagtggatctagtaaattaggaaagtatacggaatctttgagattttttgaggacatggtggactccaaggtttcttcaaccaaggagttcttatggaccataaggtggttggaagagagcttggacctgttcaaagagatggaagtaaatggtattccaccagatgccattatatgctcatctctcatggaagcattcaataagggtggcgaacctgaaagagtccttcaattgatggaattcatgaagaaaaaatccatcccgttgaaccaaaaatcttattttgagataatagcttcatgcaccatgatacgtgactggaaaacagcaagtgagatgattgaatatttggattcttcgctctcatccatttctgttggaacactaaaccatgttttaaattttcttggaaaatgtgggaagacagagaacatgatgaagtttatagttttagtggatatctttctaagaacatag

SEQ ID NO: 82858 - DNA, 406 bp, Oryza sativa
  unsure (1)..(406): unsure at all n locations
  Clone ID: PAT_MRT4530_82246C.1
gcagaaaacgagctcgatttgtcataataggatcanccctgctagagctgtgtgtgnttggaaatcagtgattcagttcttgtaatttatgtagacagcaactggatnggcgggatgcagngagcatgatttaagaggtttacctgactaggtcgaagagttgaattgtcaggattttttctatcgaatagccgatttcaatacataatcccaagaactgataactgatttggttgcaaagaagtgttggaactcgaaacagataggagattctcactgtccacatgacatgccagttccggacgtgtcaagttgaaaatttaaaagttgagcaactgtattttaaatggatgcatgaacattctatgtatatatattcgtcttcagaagtaaaaaaaaaaaaaaa

SEQ ID NO: 82859 - DNA, 693 bp, Oryza sativa
  Clone ID: PAT_MRT4530_82247C.1
tcccgggtcgacccacgccgtccgggcattctcgccagttccatttcaacgtagaaccacctgaagaaaagaatggtgaacatatgcagcgtcgaccgctggacatattggttgctcctgatttatgacgaaccacactccttgctgcaggctcaacctttatacttgatatagatagttatgtactgccctcgctctctaacaaaaaaaaaaaaaaaaaaaaattttttttaacaacagaaacaaaggaaaaaacaaaccaaaaaaaaaggggcgatgccatctaaaggatccaaggtaacgcacgccgggcatgccaaaaggatagagtctacatagtgctttgaaaatatgctggctgcattgcgaaccacaagggagagaactgggaaactgctgtcactggacctatcagaaaggagcgcgctgattctctggcccaggagtgcatgcgcagcaaatgaggtcgtctaatcgaaccagccattgaaagtcccattagcgcatgctctaggtgaaagagttaaacgagctgctagttatgcctcgaccttaaaaatagttccccaggattatgtttgtgccgctggatcatgccccgctagcttctttaaacacatttgagcattatgatatggcactgatgcctagcctgacatttggtgcctaaaacatagttaaaactaaaggggc

SEQ ID NO: 82860 - DNA, 1396 bp, Oryza sativa
  Clone ID: PAT_MRT4530_82248C.1
cagatcagatgtgccgccgccgccgccgggcgagccggctggccgccatggagctgagctgcgacgcgcatctgcgattcgggccgccctcctcttcttcgccgaagtaaataatgcaaagatgagaatatgagtctagctagagcggcggccactggcggtggcgagtcgagcagcagctgccatgaagggcgacagggtgcggagggggaaggaggaggcgcttggcgccggcgggggtcagctctgccctgagtgcgggtacgagtaccccaacgccaaccccaaccctaggctccgccgatcccacagcaagaactgccgccgaaagatgaagatgcccgtggtggccgaggaggctggcgtggctgtgcacaagcggcggcgtggcttggccgtggagaacgccagtcggggaggaggaggagacaaggtggtgcacgaaggctcttctgagcaaggatgctcggcgaaagctaaggaaatttcagctgagccaaaactgatggccgatgatccaatgtcatcacatgagaaacatatgatatggcatcgtcactataagctctaccctaccaaggttgcaccacaatgcaatgatttgtcttttggaccatttttgggtcttcgtaggaaggccatgattgtgactaaaggcattaaagtgatgtcaggagaaacacttgattataagccagaaggaggccgaatcatgttcttatttgaggctggagttgtggatgaactgcatgctagtgccatcagagaccctattggtatatatttgaaggacaaaaatgagacaatgtgcattggctccataaccaaggcgcaacccagggcacggctctggttgatgctatcagaagaaatgaagctatttcacaattctgagaggaggtcggtgtacttcaatggatatgagttttatcctatgtataagcgcttgcatccattggagacatacagaaaactatgggttgtggaagtgaaaccatttgaagatgcttcttttaatcctgtagaggatgagaggaaatattatctattgaaggtcttttcaactgcgattcctaaagaagaaattgatgtacatgttcgatctaacaaggaagttaaaaggcttggggttatttcatcttatgacacttcattctcctgtaaattggactttgaagaccagtttactctatcacatacttcacaagaagaggatgtggtattctatggatacacacttcgtcacgctggcacaatattattatttgtttacattgatataatcacactctgtttacttaacttctatatgatgatggaacttcgtttgaatatagagatgatccagagtatcgtgcgtctaaggcactcactgcaaagagagaaccagagatga

SEQ ID NO: 82861 - DNA, 395 bp, Oryza sativa
  Clone ID: PAT_MRT4530_82249C.1
tggaatgcgatgaattctatgcgaattcgctcttcgtcgtcggcgagtttggtggcaacgactacaatgcgccgctgttgcgggaagggcctttaggaggcctacaacaattgattgctgagggcgcaagggagctgattgtacccggtgtgatgcccactggatgcttccctgtctacttgaacatgctcgatgagccggccgatgggtatggcccccagagcggctgcgtccgtcggtacaacacattctcatgggtgcacaatgcacatctcaagcgcatgcttgagaagctccggcccaagcaccccaatgtgaggatcatatatggcgattactacacgcctgttatccagttcatgcttcagcccgagaagtttgatcaagtcaactga

SEQ ID NO: 82862 - DNA, 516 bp, Oryza sativa
  Clone ID: PAT_MRT4530_8224C.1
atggcggaccagctcaccgacgaccagatcgccgagttcaaggaggccttcagcctcttcgacaaggacggcgacggttgtattactactaaggagttgggaactgtcatgcgttcgctggggcagaacccaactgaggcagaactacaagacatgatcaatgaggtggatgctgacggcaatggaacaatcgatttccctgaatttctcaacctgatggcccgcaagatgaaagatactgattctgaggaagagctcaaggaggcgttccgtgtgttcgacaaggaccaaaatggttttatctctgctgctgaattgcgtcacgtcatgactaaccttggtgagaagctgacagatgaggaggttgaagagatgatccgtgaggccgatgttgatggtgatgggcagatcaactacgatgaattcgttaaagtcatgatggccaaatgtaattttgtggggatagatatgttccaaaccgaaattcttgatattcagagacatcctatgctgtag

SEQ ID NO: 82863 - DNA, 1943 bp, Oryza sativa
  Clone ID: PAT_MRT4530_82250C.1
tgttcttttttttttttttttttttttttttttttactcaaaaagacaatttgtatcatatttccggaggcaatttacacaatcatgtgtctgttacattttcatagttatgtcgcctgacaaataaacaaaatcaagcttttgacagccctattccacctttgtacctgactgcaatgaatgtaatagaatgaaaatatacatgtatgcaaccttggaaccatatggaagaactactttccctgctccatttcagtgcactatcgtgatacacctctacaattacaacggaagaagtgactttctcatgaagattggaagatcggttggtcagcgaaaggaccatatacccaacctctggcaatgtgaccgtaagccgcctctgtcaggtgaatgccatcccagctccaatgggttgatggatcatcacacgcggttgcaccagcctcaccacatttggctgtgacattgaagttgtaagcggccttcgcaacggacccaggagccccgcagcatgccctaggtagctgcttgtaaaatccaaacttctcgggctgaagcatgaactggataacaggcgtgtagtaatcgccatatatgatcctcacattggggtgcttgggccggagcttctcaagcatgcgcttgagatgtgcattgtgcacccatgagaatgtgttgtaccgacggacgcagccgctctgggggccatacccatcggccggctcatcgagcatgttcaagtagacagggaagcatccagtgggcatcacaccgggtacaatcagctcccttgcgccctcagcaatcaattgctcgatgccatcggagatagcctggatgacatccggcatgaacttgtaggcctcctcaaggcccttccccgcaaacagcggcgcattgtagtcgttgccaccaaactcgccgacgacgaagagcgaattcgcatagaattcatcgcattccaccttggtggagttgcagaagaagggcttgagatcgcggaaccactggatttgggtgaggagggcgccggagttccagacgacggcgccgagccccttggcctcgaagtagggggtgtcgagcgcggtggcgccggtgatggcgaagttggcgccgtgagcgaagctggagttcttgagcttggacggcggcagcagcggcaggccgaactcgtcggcgaggtggtcgacgacgaggcggccgtcggagcagcggccggtggggtggccggggaaggtctggccgtaggggagctgggcggtagcgaggcggaagtcgacgccgttggcgaggaggttgccggcgtcggccagcgagtccccgaagttgaacagcgccctgtacttccccttcgccttcccgttcaccttcccctccgccgccccagcaagaatcgccgccaccgcaagaaccaccgccacgaccaaaatcccccgaactgcccccatcgccgcccgccctatccctcctccgttcttgggtcaaacccaccaccacaagaagagggaagaagaagaagaagaagagagaggggtagcggctaggtaggtgtccggggtgggggtgagggggttcttcttgtagctaggagcacgaggagagagagagagagagattgggatgggttggtggtggtggcgtggcgcacggcggcttagctctctctctctctcgctctcgggtcgcgtggcgttttcttctcgcgagctagctgccgcggctgcgcggtggcggatggcgattagtttactctcgggctctctcgcggcttggggagtaattgcgatttgggattgggagggggaggagtggggaagaagaggggaggaggcgaagagaggaggaaggtgagaaggaaggaaggaagctgggggcagactgtccggtgtggaggaggtgggggattcgacggcacgtatgtgcccacgcgtcaaaaa

SEQ ID NO: 82864 - DNA, 141 bp, Oryza sativa
  Clone ID: PAT_MRT4530_82251C.1
ccacactttcttgctggcggtcgtgcgccactggctcgcgggaccgctcaaccgacttacggtaccgcggcgccgaagtggtcgcctaccgccctctaggagggcgatttttaaaaatcgccatcccagagggcggcgaaa

SEQ ID NO: 82865 - DNA, 1423 bp, Oryza sativa
  unsure (1)..(1423): unsure at all n locations
  Clone ID: PAT_MRT4530_82252C.1
atgggaaagtggaggggatgggaaatgggaggaaatggaggtggaagggaaggtcggcgagcacggtggtggccatggcggagaggcggaagcgtcggcgagccaggcgtggcgaagaggcgacgccaacgtccactccgatgtccgcgtacgacgtggtgttcgacggccattgcggcgcaccgctacgggtggtgcacctcctatgctgccgcagcgcaagcgatgtcctacaaatcgacgcgccatgctccggcgtggaggagctcgttcagggccattgaactgcatggcctccccgagctccgccacttcacgtgcctcggcaatgaccatgcgccggtggtggctctcgtcgtcggccccacccccgctcccacgatctcacctctccaccccctccgcccccgcctcgatccggcaatggcttcccccggaccggccaccgccggcgagctcctccgcatcgaccccgtcgaactccgcttccccttcgagttgaagaagcagatctcgtgctcgatgcagctatcgaatctcagcgacgactacatcgccttcaaggtgaaaactacaagcccaaagaagtattcggtgcggcctaacacaggggttgtcttgccacggtctacctgcgatgttgttgtgacaatgcaagcacagcgggaagccccgcctgacatgcagtgcaaagataagttcctagtccagagcgtcattgcaccttccggtgtaactgtgaaggatatcacgggagaaatgtttacgaaggagtccggaaataaggttgaagaggtaaaattgcgagtgacctatattgctcctccacagccaccatctcctgttcccgaggaatcagaagaaggttccccatcaagggtttctgagtcagaaaatggagacagtcttggtgggggtttcactagagcactgagagaacgcattgagcctcaagaaaattcattagaggctggagctttgattaacaaattgaatgaagagaagaactctgcaattcaacagaaccataaaattagacaggaactggatatgatgagacgggagataagcaagaagcgcggagggttctccttcataatcgtcataattgtcgccttgatcgggatcttcttgggctatatgatgaagtcataattctttgagtcgacatcgaagggaactggaccccacattcatgccaagttattcttgggaggcaaagagaccgtcatgaagttctcctttctgttttgtcaatataggagtgttgcgtacgtgggaaaatcttcaaccagattaagcttgttttcttttgcagtttgttgtttgttgtattgggtgagttgtgcacttctgacactgtaacttggaaatgcattaatcgcttctgttgacagtttatcttgcccatctgaaanaaaaa

SEQ ID NO: 82866 - DNA, 524 bp, Oryza sativa
  Clone ID: PAT_MRT4530_82253C.1
aaccttagtactacaagtaacagtttgtttgttcccccaaacccccatgtcccaagttggatccgcccctgttaagactattctgatgttcttgagccgcttactggcttatgcatgatccttatgttattagtcactccatctagcttgctatgtgctgctcagtgtcttttacctcatgcgaaatgtggtcagaattgctttttattttgagatagttcagtcccggatttggactgtaaccctaacatcaaagggtcttgattttcagtattttccactttttttagcttttgttcaccatgtaaattgaggcgtgtcatcatctagcatgatattaaccattttctagcatgccctgtactgattggagtctttcaactcatgaaaagaattatttcggttctatttcctcttattatatggttcttttggttaagatgtactgattaagagaaactagcttgcttaccttgttctaactgagtgagttcttctggtaatgattcagagctgctatcccc

SEQ ID NO: 82867 - DNA, 922 bp, Oryza sativa
  unsure (1)..(922): unsure at all n locations
  Clone ID: PAT_MRT4530_82254C.1
atggcgctggtggcgggggcgaccggcgtgagctcggtggaggtcaccggcgacggcaaggaccggctgcaggtggtcggcgacggcgtcgacccggtctgcgtcgtcaaccgcctccgcaagaagatcggccacgcggagatcgtgcaggtggaggaggtgaaggagaagaagccggatctgcccaagaagccggatccgcccaagccggagccgcccaagccgccggtggtgtgctaccctcctactccctactaccaccaccactacggcgggccgccgccgccggtggtcttctgcgaccagccgagcccgaatggcacatgcaggtcggctgcaacagctacagctgtggctgcgcatagtgagtgcggcactgtttatgtcggctgtggcgcagctgcgaaggcacaaaagatcgtgatcaaggcgtgcatgccgtgcgacgggtgcagggtgaaggcgctgggggtggcggcgaaggcggacggggtgatctcgatggcgatcaccggcgacgacagggaccgcctcgaggtcgtcggcgacggcgtcgacgtgacctgcctcgtcacctgcctccgcaagaaggtgcgcttcgccgacgtcctgcaggtggaggaggtcaaggacaagaagccggaggaggagaagaagaagccggaggaggagaagaagccgccggagtgcccgtgccaggccacgctccccgtgccgtggtgccctcctcctccgtgctactacccgccgccgtcgatggtctactgcgaggagcagccgagcccctgctccatcatgtgatcagtcacacagtacagagatcgatcgaattttttncagtaatatcgtatcttcatcgntcagnaatcaagtacagcagtacacaccggtcgggtcgagttgatgaccatatntatccatg

SEQ ID NO: 82868 - DNA, 823 bp, Oryza sativa
  Clone ID: PAT_MRT4530_82255C.1
tttgtttacggccgaactactggaggaactccacaccgaaaaccagccaacctcctccccccttccccgtcgaactccacgccgggctctcctccccctttccatttccggagctcatcaatcccacccacggtttctggaaccaccacccccccccccccggaaaatttcaaaaatttatctcacaccaacgatctctctctctctctctctccctccccgtctcgtcccctccaatccccaatcccgccgcgccgccgccgccgccaccgccaccgatctccatcaccgcgagcggctgtgccggcgtcctgccgcatcctctccggtgaacgaccgtacgcgcatcctctctcgctctgtgtgtgtacgtggctctcgtccgctcgaatcgcacacctcctcgatccacccgcattcgccaaattcgtgccccagtttttgctccgaatcggtagatctcggtctcgggtcggtgctgcctttgcccaatcgcgcggtccgagattttgggccgtttttggtttgggggggatctcaccggtgctatttccttccgcgaattcgcgctgttccatttcaaaaaccacagggggcgacgagattttttccccccgtacggattgcagcttccactgttgggggtactggtgctagtcgcggcattggatcgaccggccattggggagggggttggtggtggtgggttggtggtgaggcctgtgatccgcgctgcccgccacagccagagacagccgccgccggcggatgctcctcctcctcctcgtcgccgctgccgtgctcttctgcttcctcttctcat

SEQ ID NO: 82869 - DNA, 296 bp, Oryza sativa
  Clone ID: PAT_MRT4530_82256C.1
ttttgatgcgcacgctcgcgatcgcgaacccccccagcgagggcaaggaagggagaggagacgaggaacccgagcgcgcgcgagcgagcgagcgcaagggcgggcggccccggccgcggcgggggggcagccccggggctggatgagaaggagggcgtcggcgccggcgtcggcggcggcggcggaggcggcggcggcggcggcggcggcggaggaagcgccaggcgaacccggagacggagcccgcggagaaggcccacatccaccacgccgacacccaggccgccaaggccccc

SEQ ID NO: 82870 - DNA, 184 bp, Oryza sativa
  unsure (1)..(184): unsure at all n locations
  Clone ID: PAT_MRT4530_82257C.1
gctgatacatacaacccaagagctggaagggttacaaatntcaacagccagaatttncccattcttaatcttgtacagatgagcgccgttaaagtaaatctataccagaatgactcctttcaccgttctggaacacaacgtcacagcatgtgtatattactcaaggcacgagccagtcagtgtc

SEQ ID NO: 82871 - DNA, 473 bp, Oryza sativa
  Clone ID: PAT_MRT4530_82258C.1
gtcgtcgtcgtcgtcgtctctctgcacgcgagaaaacgggagaggcggccggcgcggcgcgcggccactagtcatcccgccagggcgcgcgccatgtctctgcacgctcgcgtcgcgctcttcgccgccgcgctcgccgccgtcctcgccgtctccaccgccggcttcatctcaaatgaggcggtgggcgcgtcgtcggcggcgagcggcggcgcggggcggagcttgctgcaggcgaagaaggattgcccggtgaacttcgaggaggcgaactacacggtgatcacgagcaggtgcaaggggctcgatgtacccgccggccgctgtgctgccaggcgctcaaggacctggcgtgccccttcaccgcctacatcaacgacgcccagaccacctgcgccgccttcatgttcagctacatcaacctctacggcaggtacccgccgggcctttttgccaacacctgcaggagggcg

SEQ ID NO: 82872 - DNA, 168 bp, Oryza sativa
  Clone ID: PAT_MRT4530_82259C.1
atgccccgcgtaagggatgattggtcagaccaggagcggcgagcgggcggcaaacgggagcgccggtctatcaccgagggcctatgggaggagcacgcagccggtctatcaccgagggcctatgggaggagcacgcagccagtgggtgccgatgacggcggcggctag

SEQ ID NO: 82873 - DNA, 936 bp, Oryza sativa
  Clone ID: PAT_MRT4530_8225C.1
ccggccgggaaaaaaaaaaaaaaaaaaacacgcgtcccaactcgggcaagctctcctcccccacgactcccctctccttcctctctctctcgctcgcgcgcgcctgcgtcgccaatggcggaccagctcaccgacgaccagatcgccgagttcaaggaggccttcagcctcttcgacaaggacggcgacggttgtattactactaaggagttgggaactgtcatgcgttcgctggggcagaacccaactgaggcagaactacaagacatgatcaatgaggtggatgctgacggcaatggaacaatcgatttccctgaatttctcaacctgatggcccgcaagatgaaagatactgattctgaggaagagctcaaggaggcgttccgtgtgttcgacaaggaccaaaatggttttatctctgctgctgaattgcgtcacgtcatgactaaccttggtgagaagctgacagatgaggaggttgaagagatgatccgtgaggccgatgttgatggtgatgggcagatcaactacgatgaattcgttaaagtcatgatggccaagtaagttgaagcatcatttggatcaacacagggggagttccagtagccatactgtcagaggctaaaattatctttattaattttatgttcagatgtaattttgtggggatagatatgttccaaaccgaaattcttgatattcagagacatcctatgctgtagacaatgctttctgtttgtttgtgatttttctgtttgtgaaaaatggctctgatctttgtgattttgtttattcaattactctatgtttgtttcaacttttcaagggtgtagccattctgttgttaatcaaaaccatccatgcttgtgctatattcattctaccaatattaatttgggtgatatacgatcatattctcatattgacaatgtgatg

SEQ ID NO: 82874 - DNA, 426 bp, Oryza sativa
  Clone ID: PAT_MRT4530_82260C.1
atgccccggaagaaagagcacgacgaggggaactcactgagggtgacggcgacgacaatcaatgacggaaaacggccggcgacgagctccgaagggcggcgaggtaccagtcgacgacgacagcggctttccggcgacgagcagcggcaacggaggggtggacgggcttctcctcggtgctgcgatgccgagggaggtggtggcacaggtcggggacgaccgaggcgacggcaaggcgcggatggaggcgaagcagatcggcttgacgtcggcgatggccttccggttgtcttcggcttcgagggagtggaggccggtcttcctctcttcgatttggtcccgatggaggcgacggcgctgaccggtgatggcggagccgacggctatagccggctggagcggcggccggaggagagagatggctag

SEQ ID NO: 82875 - DNA, 2811 bp, Oryza sativa
  Clone ID: PAT_MRT4530_82261C.1
atggctaggtccgcggggattgtggtgagcgcatccatgggggtgatgaaacccctgcttgcaaagctaaccactctgatgggcgacgagtacaagaagctcaagggggtcaggaagcaggtgtccttccttaaggatgagctcaccaccatgagtgcttttcttgagaagctagctttcatggatgatgatggtggtgagctcgatccgctggtgaaggactggaggaaccatgtcagagagatgacctatgacatcgaggactgcatcgatgacttcatgcatcagcttggtggtggtgctgatgcatctggtttcctccagaagacggctcgccgtctcaagacgctgcgcgtgcgccatcagattgccaaccagatcgacgagatcaaggctcgtgtgatcgaggtaaatcagcgccgcaagaggtatgagcttgatggatgcagcaattccagagcttctgaccctgtggttgtagatcctcgcttaacatcgctctaccaaaaggctgataatcttgtgggtattgatggcccaacagaagagctaatccaattgttgacagatgcagggcagcagaagctcatggtggtgtccattgtgggatttgggggtcttggtaaaacaacacttgccaaacaggtttatgataagatcggacagcaatttgactgcaaggcgttcgtttccgtttcccaaagacctgatattgcaagactactcagcaccatacagtcaaaacttaacatacaggagtcttcccaagctcatgaggtgcaagacatcatcgacggcattagatactatttgggaaataagaggtatcttatcgtagttgatgacttgtggaaacgagaagcatgggatattattagctgtgcttttccagaaaatgctaatggtagcagagtgatagtaaccacccgtgttgaagatgtggcttgttgggcatgtagcaaccatcaatacattcacagaatgaagcccctcaatagtgaggactcaaaaagattgttctttaaaagagtaattcgatccaaggatggttgcccctcacagtatgaagaagtttcagccgaaatcttaaaaaagtgtggaggtttgccacttgcaataattactatagccagcctattagcttgtgaacaggcaagaataatgcaagaatgggagagtatacggaattctttgggcaccccatttggcacaaatccaagcttggaaggcatgaggcaaattctaaacctgagctacaagaatcttcctcttcatcttagaacatgcctcttgtatctcgccaaatacccagaggactccagtatcgacagggatgatgtggttagacagtggatagccgaaggcttcgttaggagctctcccgggcaagatttggaggatgttggcaagagctatttcaatgagcttatcaataggggtttgattcagccagagcaaaataattatggagtggtgatgggttgcagggtgcatgatatgatgcttgatctgatccttagcaggtgcaaggaggataattttatcagtgttgcgtacagctgtgaagagtatatgctcatagccgggcagcacgggtacaactacaataaggtccatcgactgtccgtgcagtcaatggattcagaatcagattgcacaatattaatggagggtggggtcattcctgctcgcctggctcacgttcgatcagtttctctgtttggaaagcatccaagagagctcccattgctgctgccgttgtttaaatatctccgggtactgcatataacgttctatctcctcgatcaagccgatctcactgccatcagacatctggttcaactaaggtatttgttgtttgtgtcacattgtttcaaggtagagctccctagtagaatatgtggccttgtgcatttggagacgctggaaatagttgcgtatcatgctgtaagcttcccatcagatattgttagtttggcctgcttgtcccacttgaggcttccacggggtgggctgcccaatgggatacccaagatcaagtctctacgcactctggaaatgttccatcccccagatatggatatcaaggcccttgctgagttgaccaatttaaggaaactgagtctcttctttgacctagaggcaacaatgggaacggctagtaaccttaatgctctcgggtcttccattggaaaactccaaaacctcagatacttggaatttacagtcccgactgttaaatttgatgatgatggcctgctgggttcattgtctgcttttccttgcagtattgagatactgaaactggaaacttggcgcttctccagaattcccacatggatcaacgctgatctctgtcacctccacctcctggagctgctggtgtcagagacgtgcaccgatgaggttggtgttgttggagagttgccctccctcatccacctccatttgcaagtggagctgaagatgaagggtaccgtcgtgttcggagctagtgggggatcattcccagctttggagtctctcatcttgacctgtggtggagatgttgcctcacagctgggcttccaggcaggtgtaatgcccaagctccagatgctcgatgtacgattcgaacgttgtgattcgggcattgatacaccacctgttggcatggagcatctcttgagcctccaacacatccgtgtcgagatcaatgttgagctggaggacagaaaaatttatcctcgggacaccgctgagcatgttctcagggaagccgcacaagcgcaccccaacaagcccgccttcaatttctatttcttctcgtaa

SEQ ID NO: 82876 - DNA, 477 bp, Oryza sativa
  Clone ID: PAT_MRT4530_82262C.1
cgttgttatagttctttatactacaaaggagtgcaaaagtttctctcaactagtgtggaaagcagctagagacaactacagtccatactaggctacatgaaaccttttctgaattcttcaattataaagtatgagatccaagagatatctacatgactaaacagaggatggcatgtcaagctttttgtagcagacattagaacatggcaaattgacaatgaacagtgatgcaatcaagaagaaatggtgagagttctattggctgctagatagacaggccggctactctactgatcctattacaaaaagccctggaccttgtcaaatgagggatgattgaagataccaaattgccggctttgttctcggtgctttctggattggagtacaggtcaattaggacggcccagcccactaacaaacttggcaatcaggaggccattgactcgttccttccttttcctctttgattattat

SEQ ID NO: 82877 - DNA, 522 bp, Oryza sativa
  Clone ID: PAT_MRT4530_82263C.1
atgggggcggcggcgccagcaccctctcctctgccatatctagcaggaggggaggcggcgcacctcggcgacggcagcggcggcgtctgcgccttcccctttgccggatctggcaggaggggaggcggcatgcggtggcgcaagagaggaggtggcggacgacaggcggcaggcgacggcaacgccctcctctccccaccggcgacgaacgcagcgaacgcacgtcgatcggcggcgcgggcgctgtgggactcagcaggtcgtgggtacgcgacaacaggtccgggctttaacgccgtggctatgctgatgctcggaagagtatcctctgatttacttgtaacggtaaaatttgacaagctccggaatcgtcatcggtctaaagtatttggaatcttcatcggcctaaatggtgccgaggtgaccaacaagatggtgctctgcgtcgaggtgggccagaccgtggcagcgtcaggcggcgtcggaacgatcgtgatggatacaactctttcacccccttag

SEQ ID NO: 82878 - DNA, 319 bp, Oryza sativa
  Clone ID: PAT_MRT4530_82264C.1
aggggaggtcatgccaaaatttctagtgaatttattttggtgattttatacaaatcggaggtgcctaaaaggttaatggatcggcaatggatgtacgctgactggcggtccaaagagtttactaacggcgtgcattattttttgagagtggccaaagctaacaggcaaaagggttttatttgttgtccatgcaataagtgtaagaatcagaaggagtattctgcatccaggactattcatttccacttgtaacacagccaaaaaatgcccgattgaaatatggtcgcacagacatattagatgggcataaaacttaagc

SEQ ID NO: 82879 - DNA, 768 bp, Oryza sativa
  Clone ID: PAT_MRT4530_82265C.1
atggccgatcaaattgaatttcgacaaacctgggttgccaattatttgacagggcaaatcagaaatcaccatcagtataaggacgcagatgttattgcgtttcacatactattcattggcctcacacgccacaatacggggaaggttcttatcgaatacggtgggctagcactgcagctggtagccgtgttcgtgtatgttatgcttaaggttggtgacaagaaatatgttctctctgaagagcgcaacaaaattctcacccattctgaagcaaaaacacataacattggcttgctctcatttttcatgatcgctgtattagctgctatcatccagattcagttccaattcccttttcccgaaaactacagcacactagcgaaagctattggtatttttgggatgttctttcaggtgaagggagagaatggtttaaaaaatgatgctccacatatccgcaagttgaaaatcactgcaactctgataaagttcatgaccttatcttatgagttgtgggctcaaatctctcaaggatacagacaatctgttctaacaaaaccactctgtgatatgaccattgcagctcttattgtcaactgtgtactatttgcagcgagatacattggtccaaaaaccataaaggaatatttcttcccacccagcccaccaacagagactcgacaggaatattttacaaggacattggctttacttcacaaggatgatttccccagtgctgtacaaagggccgatgagaaacatgattag

SEQ ID NO: 82880 - DNA, 123 bp, Oryza sativa
  Clone ID: PAT_MRT4530_82266C.1
atgagcgtcgagtggagctcccctggcggcgcggcgactagcgtcgagcggagctcccccgatctggcggtctctcgtgccaacgagggctgcaacgccggtggtcgaggcaagctccgatga

SEQ ID NO: 82881 - DNA, 453 bp, Oryza sativa
  Clone ID: PAT_MRT4530_82267C.1
ggggggactcaaattttaaaaatgatagacaagcttgggggtatacattaatccttactttttccggtttaaaaaaaaattaaaaaggatcccctaggggggggtttgacacgagcaacataccctaaatatgtcattggtcatggggcacaggaaaagcatttgttttgcccagtatggaacgattaccccttccaatttccaaggggggttttttgaataattggggccaggggcgcccaagacacagagaaaagaactcccttttcaggggttcaggggtttcaccaatttggccctcggagagcttttaaaggttaagcttttccccccccaaaatgatttttgggaaaattagggagttttttaatttttgggtatttttttttaaaaaaatttaccgggggggggtttgaggcgggccttgatgattttttaaccgggtttggcttt

SEQ ID NO: 82882 - DNA, 568 bp, Oryza sativa
  unsure (1)..(568): unsure at all n locations
  Clone ID: PAT_MRT4530_82268C.1
ggcaaaaccaaaatttcnttgtcaanggattcaaatatgccctaggcatcntattacatgatttcttttttttagccggaaattttgcattccctttccctgtctccccgtccccgaacaaaaaaccgatnnttgttttattactcttgcaacaacgggaggtcggaacncaaaaaaacaattactttcagcttaacccggaccccccaaaaaaaaagaaaaanaaagaacttgcccgaaggaacgaaagcccttatttgccgcctgaccctcccaacccggtggcttttaccccatnaactgattaactgccctgcctaacgttntccaacccatgangccaacnaagngtcgggtttcctcnttgcncccccaaccccttgacactgggttgctcggnccccnaacttggcntttcccctgtccattcnaccgtctnttccggttntttttgntcnccgntaaaaatcaactgtaatnccacnggccccttnntgangntccattnctcagncccctttaggggattaaaatttcattctnnccngnggcnnntttantttatncn

SEQ ID NO: 82883 - DNA, 515 bp, Oryza sativa
  Clone ID: PAT_MRT4530_82269C.1
agtccatgctcaagcaggactaccgcgacgggatgacacgggaggaggccgtcgccctcgccctcaaggtgcttagcaagaccatggattcgaccagcttgaccgccgagaagctggagctcgccaaggtgttcttgcagcccggccccggggaggtgcagtaccaggtgtgctcgcctgaggcgatggggaagctgctcgccaaggccggcctctcgcagccggcgcctgaggcttgatctactgagatggtttgcttcttgttctcgcaattcggttggtgtttaatccatgtgatggtaaacagttgatgaatttagtataaattttcttttaagagttgccatcagctatggtttgaaatcaatccagattgttgtgtgttatcgtcctatttcttatcagcaagaacccttcttagtgattatatggttatattgagtatatttatagagcccaaataccttggccaaaaaaaaaaaaaaaaaaaaaaaaaaaaaaaaaaaaaacaacaa

SEQ ID NO: 82884 - DNA, 1125 bp, Oryza sativa
  Clone ID: PAT_MRT4530_8226C.1
atgggaagcgcggtggagacgctgtgtgggcaggcgtacggagcgcacaagtacgacatgctcggcgtgtacatgcagcgttccaccgtgctgctcaccgccaccgccgtcccgctcgccgtcatctacgtcttctccaaggagatactcatcctcctcggcgagtccccggagatcgccggtgccgcccgcctctacgtcgtcggcctcatcccgcagatcttcgcctatgccgccaacttcccgatccagaagttcctgcaggcgcagagcatcgtggcgccgagcgcctacatctccgcggccacgctcgccgcgcacgtcgccctgagctggttcgccgtctacaagcttggcctcggcctgctcggcgcctcgctgatcctcagcctcagctggtgggtcatcgtgctggcgcagttcgcgtacatcgtcgtctccgacaggtgcaggctgacgtgggccggattctcgtccaaggcgttctccggcttgccggagttcctccagctgtcggccgcgtcggcggtgatgctttgcctcgagacgtggtacttccaggtcacggtcctcatcgccggcttgctcaaggatccggagatcgccctcgactctcttgcagtgtgcatgtcaatatcaggatgggtgttcatggtgtcggttggcttcaatgcagcagctagcgttagagtgagcaatgagcttggtgcgggcaacccgagggcagcagcgttctccgtgaaggtggtgacaagcctgtcgctgatcgtggcggcaatcatagcagcgattgtcatgtgcctccgtgagtaccttagttacgtgttcacgcagggcgaagaggtcgcccgtgctgtttccagcatgaccccattgctcgctgttaccatcgtcctcaatggaattcagccagtcctgtcaggctccccctcccatgcggcgacagcaacgacgacttgcggtggtggcaagcggtggacccagccacccctactcccgcaagatgacgaggacaaggacaaggatggggacggtgacaagatgacgacgacgacgacgacggcttcgagcaacgatggcgacaatgacccggcggcttcgagcaatgaaggcggcgacgagtag

SEQ ID NO: 82885 - DNA, 229 bp, Oryza sativa
  Clone ID: PAT_MRT4530_82270C.1
tttttgtttaactgataggaggaaaacatatttataaccgcatctatctaaggacatggaactattagcaatgcttataccccgaaatacagttttactacaatatcttaaaaaagacgttagttttacctcacaggatggccagttgagcaaagctgttgacacaaaaaacactggatccctttgaaccaaaccgcatccatcgatgaagacacagggtactctactg

SEQ ID NO: 82886 - DNA, 328 bp, Oryza sativa
  Clone ID: PAT_MRT4530_82271C.1
ggtttggggggttttttttttttttttttttttttttttttttttttttttttttttttttttttcaaacggccacccaggaggaggcaggacttaattttaaacattggaaccattaacccataacaattcaggcccagacaccaccaagggggggggggccccccggagcaagggagtagttaggaaagaccccacaaagggagggcaagttaaaggccagcaaagctggagccggacctggagccggaccaaaggaaacaacaccgaccggcggaagcggaagtggcggcacaatccgccggaaccctacaaagggcccgggaag

SEQ ID NO: 82887 - DNA, 8049 bp, Oryza sativa
  Clone ID: PAT_MRT4530_82272C.1
atggaggaagctgaaaagttttcgccgacaccgtgcttgctccagtttggaactcaacctcctttggtggtcatcgagcatgggggcaaggtctacgtccacgcgacgcaagactctgctgattcatgtgctgccctatccaagaaagctaagaagcgtgcaggttccaaagctaggaaggaaaggttggccttagtaactgaggctcgagagttgctcaaaaattcgaagacaagctcaaccacagctgctgctaaggagcttcgctccaccccagctgtgcaccaagaggaaaccaagatcatggagaagcttgacaaggaggcttaccgtctttcctggtcagttcgaagcgctcggtcccaaaataatataaatgctgcgcgcaactaccggaggaagcggagccaagtgaataaactgcatgctcagttgaaggatcaactcaatcaaaatgatgaacaaaaccaagttgacgatatcgggtcagagcaccctgatcctatcaatgagccttacacattcttcccgggacagtgtgctaatcagccacaccggttgaagcagctcattagacaggctatcatgaatgagttctggacgcgtctcctaaaacgcgtagccaatttcccaggaggtatgcttaataatggagtaaataatttccgtcctctgaccctagtttcggcatgtcacattactgccggaactagtaaagatgaaaataaatttgcggcgctagcaaatgaagtgccagcaccccattcagacccattacaacaacagctccagcagctgcaatctcaaatgatggagatccaacaacaacttcaacgccgaaataatggtggatcagggcgttcttctcctaggcgctatccacaacaacctgaatcatatgcacgatctgggggcatgctaagccgttcttcccctagacgtcattttgaaataccggagtcgtctcgactggccggtgctaggcattacgtgccaagctaccgccctcaacacgagcgaaggacttgggcaccgcggcggaggtctcctccacctgcttctttccaaccaaggcagtcacacatgcctcagctttggaattcatggtcacgcccacaatggcggcctgtagaatctcaacagcaacaacgtcatgatgaacccaagagagaatcaacaccacctcatccaggtgtggctaatatgcaacaaggtcaacggtcgcctccgcggcaacttgatcaaaggcgagaggcggaacatgcaaagcgtgagcctatgatgggccctcgtgttgcgccgccacttctccctacacctccaagccaatcaagggctgcttatgttcctacagtgaaccaacgaaaacgtgacaaacgtagacaaaatcggcgtgccatgtaccaggaattgcaagaacttgtactaggaaatgtgcatgttcgaccacgacaaccacagggagagatggcccaaaaccttgatggcagccatcagccatcatttcaaaaagctcctgatcaaggagagaagaaacatgaaccgatgatctccaaaaaggaagatgttttactagaagcaccaatagtggcttcacaagtggcggataaacaggcgagtcatcaaaactcacctaatattcatgagaggaagaagtctactctgtcatctcatgtcaatgagatcgactctcagtcaagtagtgtgaaggtcagacctaaagaggtggatccaaatacgatggatatcgtgatgtgcggagctttaactgcacactctgattcagaaaatgatacaaattgggtacctcctcgtgttgagaaggaactctcatatccctctgatgaggaaatcgtgcccatcccaaagacggtgttcactaaaaaaatattgccaaaatttgaaaaagtacgtgaaagaaggatactccaaacatcggcattataccacccttatactgagctcacagctcgtcttcctcaaaacattcgttttttggaacaaatagcaagtcgtccaggtattgggactcgcttgaaagttatagcttctcagcgtgtatctaacgcaagggaagatggctatctgactgaatgcactgatgatgactctagctcttcattgcaatttctccctaatcaccccgactaccctgtgttggcgtcatcgatattttcggatgatgaggggatgctaggagatcaaaacaccgcaccggcacatgtgactggtgaagcaactgatgtcctgccaggtactgggtcccaggcattactggccgtacagattccgccaggcaccgggtccctgacattaccggccgtacagatcccgccgggcactgggtccctgacattgccagccgtacagatttccactgacctggctgcatcatcacgtgatccagagttagaagaacgactgcggtcgcaacaacgacaattagataacctccatgcgaggtttgatcaactctttgatatattgacagaatattatgatgtgattgaggacttgattgacagaaaaatgaagcaagtaattgcagaacaagctccgatgaactctgaaagtgaactcgacaagccatatgattcatggcatgatctagtgccatttccagttggatggcacccaccaaagttccgtcagtttgatggaaccggagatgcacgggagcacttggcatattttgaggcgacgtgtggtgatactgcacgtaacccatctcttctcttaagacagttctctggttctctaacaggggctgcttttcattggtatagccgacttccggttggctccatttctgattggaagagtatgaaagatcttttcaaagctcattttgtgacgatgaaaaaagatttctccgtcgttgagctagctcaagttcaacagaaacgtgatgagaaaattgatgattacataatccgcttccgcaacagttatgttcgtcttgctcgagagatgcaccccgaggatgccattgaaatgtgcgtccacggtatgctacatcattggtcaatagaagtatcccgacgtgaaccgaagtgttttagcgctcttagtttagcggtggcagcaacaaaattggagtatgaaaaatctcctcaaatcatggagctctataaaaatgctagcggttttgatccttcaaagaggtttaatacgaatgtcaaagcaaataatggtggcgctaagcctaaggcgtcaaatgaagctaatactacaagaatggtgaatcaaaataatgttcccatgttaggctcaaggagcgagcctaccgggggcaaatctcgtccttctattcaggagcttttgaagaaactatatgttttccgccgagaaatggttaaaggtttctttaatcaagtgatggctcataatcacttgaccctgcctgaaccaaggaggcctgatcaagttggaatgactgataaccgtttgtattgtccatatcatcgatatgttggacatgtcatcgaggattgtgtggccttcaaggaatggctacagagggcggttgatgagaaaagattagcaattcaacctgacgctattaaccctgattaccatgctgtaaacatggtgacagtgggaccaacatctaagatgagaaacacaaatattgaaaaaggtgattgggtgccattagcccaagtggaacgccagttggttaaccttgccaacactcagaagcaaatccctagaagggctgcacaagaacaatataggcgtccattcaataatacttatcgacatgatggccatgccacattcacaagaagatggcacgacccgagtaaacgccgtatgccacctagattcgtgccaaggtccgagggagatgaatcatttcctcgacctcgccgaattcctcctactctagcgcaattcatgcctcgcaattgggggcaattgccaaaagaagttaactcgagttctgaaaaagaaagtccatcaacaccatctcataaagccgcgtgcaatgtgatcctcgattacaaggataatactagcaccgactcggatgagggggtcacaccgcacgagcgtgaagcaatgcgtgccgaagctgaattagaaaaggtccttgtgaaggaggtgaacatgaatctccgaggtgggaaggttcttcctgaaagagtttaccttcaaaggcccggcaaggagcaagcccaaccagtgaaagatgatggcgtgccagatagcacacctaaagggggtgtgcacgagaaaggaagagtgaccgacattgactataatgtggttgcacatttgaaacgtataccggcactgttaagtgtttatgatgcattaatgttagtgcctgaattgcgtgaatcacttgtgaaggcattacaaacgcctgaactatatgaggtgtcaatggctaagcaccgcttacaatgtaattattttaatacaaatgagataactttctcggaagaagacaaggtggtggcggatgataatcataatcatccattatatatagaaggaaatattggagttgcacacctgcgtcgtatcttgattgatccgggatccgcggtgaatatcttgccggtgcagtctcatttcaatcaaagttcttcgaagaaacaagaaagacggagagccacgtcaagcaagaaagcggcggcgtcttcctctacacctccattttcgctgagcaccggagtatctacttcagtgccgctcatactgaggtctgtacctgatactaaaataatatatggctcaacatatcatgagcctttgcttctttctacccctatcttgactgcttcactcactaataaaaatgatacaggagctcatggagttcctaaatcctctgctactgaaaatgatttgcttcctccggtgattttgcaaacgccgcaagataaaaaggataaagatgtagcgccggaaggaggagtagttcgacagagggtagcagaaattgaagaatcaattggaggtctacttagacaaccgccggcgatgtatgtaacagtaacaacaccattggaagtctgggcaattcctggcccatacatccatactttccctactttattctataaggtcccagaggtgcatccctgtgattttatttttaaattacctgcttctgttcccgacactgaagtagcattagtttctttaaaggctgaaccaaaattggttcgcctattggaaaattcaggaattaaacttcagagaaaccgcaggttaccgccaccacccgcaatttgcgaggagtggtgggagcaagctgaggagtttattaaaaggaagtgcaaggatcaaccaaaatatggcttgggatatatcccttcagaattctcggaaagcgaggatgaagaagatggagatcagtgtgttacatgccatgtgatacacactgataatgatcaatatctctctgatgaggaggtgcatagagcgatgaatgtaaaagaaggggaagtgctagaggctgctcctgccccccaacaacttgaagatggtggccagctcacggtcgatgagctcactgaaattaacattgggacagaagaggatccgcgtcctacttttgtcagtagctccctctcgcctgaggaaaaagaaaattatagagaattccttatggaattccgcgattgttttgcttggtcatacaaagagatgcctgggctcgacactcgcgttgcgacgcacaaactcgcaattgatcctcaataccagccagtaaagcaggctccacgtcgctgtcgcccggaattacaagatgatatcatcgccgaggtgagccgattaatcactgcaggatttattaaagaaattcaatatccgcggtggctggccaatattgtccctgttataaaaaagaatggtcaggtacgagtctacgtggatttccgcgacttaaatcgtgcctgtcctaaagatgattttcctattcctattactgaaatggtggttgatgcaactacaggttatggtgccttgtcttttatggacgggtcctctggttataatcaaatcaaaatggatgagcaggatgcaacagacactgctttccgaactccgaaagggaatttttattacacggtgatgccatttcgcttgaaaaatgctggggccacgtaccaacgggcgatgaccattgttctcgatgacctcattcacaattcggtggagtgctacattgatgacatcgtggtgaaaacaaagaatcgattgcaacaccaagatgatcttcgggtagtttttaatcgacttcgacaacatcaattgaaaatgaatccgcttaaatgcgccttcgcggtacagtccggtgtgttcttagggttcattgtacacaaccgtggcattgaaatctcgcctaagaatattagggctgttacaaaattgccgccaccgactgacctgaacaagttaaaaaaattgcaaggtcatttggcgtatatacgaaggtttatttctaacctttctgggcgtactcaaccctttacaaggctgatgaaaaagggggtgccattccaatgggatgataaatgtcaaaatgcttttgacagtatcaaacggtaccttcttaattctcctgtattggctgcacctgttaaaggtcgacctctcattctttacattgctacgcaacctgcctctgtgggcgctcttctcgcacaacataatgatgaaggcaaagaagtagcatgttattatttgagccgtactatggtgggcgctgagcataactattctgccattgaaaagttgtgcttggccctcatttttgcattaaagaagctgcgacattacatgttagcccaccagattcagctcattgctagagcggatcctgtgaggtatgtattaaatcaaccagcgcttatgggacgccttggaaaatgggctgtcctaatgatggaatttgatattacttatgtgccacaaaaagctgttaaaggtcaagctttagctgattttcttgcagcgcacccggtgccggacgactctccacttgtagtagaacttcctgatgaggatgtgttcgctactgacattgagtccccatgggagttatattttgatggagcctctcgcacagagtcggatcctgacggtactcctagaagaagggcaggtgcagggttagtcttcaaaaccccacaaggcgggatgatttatcattcgttttcccttctgaaggaagaatgctcaaacaacgaagcagagtatgaggcccttatttttgggctcttgctcgctctctccatgaatgtacaatctctgttggtttacggagattcccagctcattattcgccaagtcaatgatatatatgaggtacgcaaaccagaattggtgccgtattatgatgcagttcaaaagcttatgaaaaaatttgagtatattaatatttcacatgttccacgaagcaagaatgcttctcctgatgctttggctaaactcgcagcagcgcttgtgctcccggaagggaagcccgctcaaatcatagttgaagagaaatggttacttcctgccgtcttggagctgatcccggaggaatatgaggttaatcatgtcatgaccgttgatgacaaggaggatgattggaggaaacctttcctcaattattttaaacatggcatcatgccagacgatcctgtagagaggcgaaggctgcagcgccgcctaccgtcttatgtctacaaggcgaacaccctatatcggcaatcatttgggcaagaaattctcttgaggtgtgtctcgagggatgaagctgagaagattttgaaagaagtacagcatggtgtatgcggggggcatcaaggtggacccaaaatgtatcatagcattagaattggcgggtattattggcccggcatcatgattgactgccttagagtggcaagatcatgtcataattgtcaaattcatggcgatcttaagcatcagcctcctgtccctctacaccccactatacccggccatttgatgcatggggaatggatgttgttggcccttttgatccaccctcttcgggagggcataagtttattttag

SEQ ID NO: 82888 - DNA, 468 bp, Oryza sativa
  Clone ID: PAT_MRT4530_82273C.1
atgcggtggcttaagagtcctaagaaagatcctgcagcttgcgtagagttcagctttcacgtggagtatcactgggcagccctcgagagtatgcttgatgtcttatgtacgggataccaagatctcggccttagggtggttgtccttactggaaagacaatggattcgactttagtccacaccagcggtgtcgaggtaaaggctcctcggtcgacgccggtgttagtactactaccgattacaaagagagtagtcgagacagatgataccgacgagatcatagtcgagggattcgacgagatcccccgacgacttggctcagcgtactccggcttcgtaaactatgcgactaacagggaaaggcacaacagccggcgggagaggagcagcgactacggtggctcctgcttaccgagcaacgtcggcgacgacacctcgttgtgcagcggtggatggatttggagctag

SEQ ID NO: 82889 - DNA, 652 bp, Oryza sativa
  unsure (1)..(652): unsure at all n locations
  Clone ID: PAT_MRT4530_82274C.1
aaaaacaaaggggaaaaggaggggcaaactttttattctgatctgttcggtggatgccccccttccccactgggaatcagaacaactgttaagtgtttcataggatgcatgcacctttcaaaatggtcagaacttccacaacagcatctgtaagtgattcttccagtggaaagcctctcatgcttctacacaaatgggtgatcaaaggcagcagcatcatttgatgtgggagagctcgccgtctctgcgtcgccgctcctgagccagtacagctgcctgaatgaagccgcgctgctggggacatcctccatgacccactcaaagcccttgggatagtagatccctgttcttgggtgtggcacccacaatgctgtctccgctgaccttgcttctgaaggctgcacccggctcataaggttagagctttgtttgttcttgatttcccggagcagaccagccgattttgcaattgcacttcggcccatcgatgcgaggtggagaaacacaataaaggttctactggcagacctttcctccttggtatcgaccggccgatgcgctgatggcagttccttcttgctttttttttttttttctttttttttttttttttttttttttttttttttttttntnccggccggnncctcga

SEQ ID NO: 82890 - DNA, 367 bp, Oryza sativa
  Clone ID: PAT_MRT4530_82275C.1
ggttcccccgtattacgtccgccggccatgtttactggaccatggtggaaacatgcccattttggatgcatccacgccacccagtgctctaggtagctcgaggagccccaagaaggcgtaccctgaggcattcgtccgctatcaatcggccattcgtacatacgtcagccacgagtgcagctcatctagcttcatcgcctacaagcccccgggctgcgaggagtctggtggcactaagccgtcatcgtcattatatagcctcgtttaattgttcatctctgattcgatgatgtcgtcccaccctggtttcgtgtgttcccagtttgttcatgcgtctttggattttaccggccgtgctctgctttgt

SEQ ID NO: 82891 - DNA, 816 bp, Oryza sativa
  Clone ID: PAT_MRT4530_82276C.1
atggcttcagctccactcccacaagcaactcaactggggtataagccaaacgtcttctccttctggatcctttttcttcaactgagccacggcacgggtggcgacctcgccggagctagggtggtcggccggacttttggaggacacctacgcgtagaggacaacattgcgaactcaatggtgctcaccgatacgacaaacgacgacggacgacggccggcggcgaggtggacggcggcggcggcttcggtcggcggtggcgccggagctgcggtggtcggcggcttcgggggtcaggcggccgggcttctccaccctcccgcgcacctaacggtggtgacggcgaccggcggcgacgacggaggcggcggcgcgacgcggatggagctcggccggcgacgatggcggggctcatatgaaggtgttgatgccgccggagatggaggtactgccgcccaagatggaggcgaaggagatgccgccgccggagatagaggtactgttgttggagatggagtatttgtatggattgctactggccacatcaacagcaacgatgtccacggcgacttgggtatcaggaacttccgtgtcgccggcaaaggagtcctccacgacatgaacctcatcggaatcatagaaaatcgcctcgcatgcagccacggcggaatcgagctcgctctcggggacagtaactgcggcaccatcgagctccatctcggccacagccacggcggcatcgagctcgctctcgatcacatcaactgtaacaacatcaactgtaacaacatggaactccatcacagccagcggtag

SEQ ID NO: 82892 - DNA, 1839 bp, Oryza sativa
  Clone ID: PAT_MRT4530_82277C.1
atggactgcttcttgtcctccgtctgcacgccgctcaatctccagttcatcgacgtggcgtaccgggtcaaggtgtcgaccacggcggcggcggcgaagggggcgccgccggggaggatatcgcacgccgggggaacaggtggtggcggtggcgcgcaggaggagaggacgatactgaaggggatcaccggcgaggcgaggccgggggaggtgctggcggtgctgggcccatcggggagcggcaagtcgacgctgctctccatcctcggcggccgcctcgccggccgccacgccgggacggtgctggcgggcgggcgcgcgccgtgccgcgccgtgcagcggcgcacggggttcgtggcgcaggacgacgtgctccacccccacctcaccgtccgcgagacgctcctcttctgcgccatgctccgcctcccggcctcctcccccgcagccgccaaggccgccgccgccgaggccgtgatcgccgagctggggctcgcgccgtgcgccgacaccatcgtcggcaacgcgttcgtccgcggcgtgtcggggggcgagcggaagcgcgtcagcatcgggcacgagctgcttgtgaacccgagcctcctcgtcctcgacgagcccacctccggcctcgactccaccgccgccgcgcgcctcgtcgccacgctctcgtcgctggcgcgcaggggccgcaccgtcgtcatgtccgtccaccagccgtccacccgcgtctaccgcatgttcgactccgtcctcctcctcgccgaggggacctgcctctacttcggcgccggccgcgacgccatggactacttcgccgccgtcggcttctcgccggccttccacgtcaaccccgccgacttcatgctcgaccttgccaacggattcgctcaaacagagtatgataattgcaacgcagccgatggcggcaacgtgaagcagtcgctgatctcgtcgtacaaccgagtgctcgcgccgcgggtgaaggcgtccatcaacgccggcgacgtccacggcggcgagcagcagccaccgccgccggcggcggagagctgcagcgggtgcacgagctggtcgaaccagttcgcgatcctgctgcggcggagcctcaaggagcggcggcacgaggcgttcacgtcgctgcggctgttccagatcatcgcgccggcgctggtggcgggggccatgtggtggcggtcgtcgccggcggcggtgggcgaccggatggggctcctcttcttcgtctccatcttctggggtgtgttcgcctccttcaacgccgtgttcgcgttcccgcaggagcggcccgtgctggcgcgggagcgcgcgtcggggatgtacgcgctctcgtcctacttcatgtcgcgcatggcgggcgacctccccatggagctcgcgctccccgccgcgttcaccgtcatcgtctacctcatggccgggctcaacccgtcgccggccgcgttcgcgctcacgctcgccgtgatcctctcctacgtgctcgtcgccgaggggctcggcctcgccgtcggcgccgtcatgatggacgccaagcgcgcctccacgctcgtcaccgtcgtcatgctcgcctacctcctcaccggcggcttctacgtccacaacgtgccggggttcatggcgtgggccaagtacacctccttcacctactactgctaccggctgctcatcgccgtgcagtacagcggccgcctcgcccgcctcctcccgccggaggaggcccgcggcgaggccagcccggccgcctgcgtcgccgcgctcgtcgccatgttcttcgcctaccggctgctcgcctacctcgcgctccgccgggtcaggaagtga

SEQ ID NO: 82893 - DNA, 427 bp, Oryza sativa
  Clone ID: PAT_MRT4530_82278C.1
atttcaaagcccacccctaacttcttatgggtaaaccccacccttgcgccacggaaagagttccatcctgtcccgtggctcttccccaactggatggttctacgccaaatgcgctattatcgcgctatcctccaagagtaagaggcctcagaggctcaaagctatacaccgagggagatggagttcggtgcaattcaactgcccctgccaatgacacagagctacccagacgtttataatgtggcggaatcctgcttaagttggcacatggctagataaagatatatactgaaataaataaataaataaattggcacagccattggcgtgtggctgctatgtactgtaaaagtttcttataatatcagttctgaatgctaaggacctccctcacagatggtctttctaaaaaaaaaaaaaaaaaaaa

SEQ ID NO: 82894 - DNA, 622 bp, Oryza sativa
  Clone ID: PAT_MRT4530_82279C.1
atcccccgggctgcaggaatcggcacgagggagagagagaactagtctcgagtttttttttttttttttttttttttcggaaacacacttctcaaactataaaccatatatagtttacaagaaatttctatataaccttgtcttttcttcactatatgaaagcaacgttggcagtatatccatcaaattgccctacttgtaaatctctgaatatattagaccgaaattcatcaagaaatcaagacaccaaaattgtaaaattcagcgtgcgattatacaccttcgggacgcttggaacgtctcaggagtcagcgtgcgattttacacctttgtaaaattcagcgtgcaattttacacctttgggaatcttgggaagttcacgtcgaaacagatgttcaacatatctaaaaggaagatagtaaggttcggaaatgttccttgtaattcagagctcaaaatgtgtcctcaaaatgtgtccctttcaaaatgtccagaacctccaacattcaagttgaagaagtctttgcaaagacttggccgaagacttggcttaggtgtccaggggattcccattagaattgaagatggacttagctagctgtaggtggctggttcatccagg

SEQ ID NO: 82895 - DNA, 2337 bp, Oryza sativa
  Clone ID: PAT_MRT4530_8227C.1
atgcgcgcgggggggtacacggtgcaccaggcgctgtccgccgacgcggccgcggtgctcaagctcgcgctggcgctggcgcgacgccgcgggcacgcgcagctcacgccgctgcacgtggcgttcacgctgctgaggagctcctcgtcctcgtcctcgtcctcgtcgccgtcggacccgcctccgttcgcttgctccgggggcgagccgtcgtgctgcgcccacggcctcctcaggcgcgcctgcgtcagggcgcacccggccgtggccgcctgcgcgcccgcggcggcggcggcgtcgcacccgctccggtgcagggcgctggagctctgcttcaacgtcgcgctcaaccgcctccctgccaccaatgcgatggccgactgcgggcgggcgtgctcgccggcgtcgtcgctcgtcccgcccgacccgacgctgtccaacgcgctcgtcgccgcgctcaagcgcgcgcaggcgaaccagcggcgcggctgcatcgagctgcagagcctgcagccgccgcagcacgcgcttcaaccgcagcagcagcctctcctcgcgatcaaggtagagcttgaccagctcatcatctccatcctcgacgaccccagcgtgagccgggtcatgcgggaggccggcttctcgagcgccgccgtgaagagcaccctcgaggaggggggcgccatgctcccgagcctcggcggccaccacgtctgttactcgtcctcctcccccgagccgcacattgacctcgacgcgcacgccgccagcggcggtggcgcgccgtggccggctcagttcttgcaccgtcctgacaccggttcgtcgtgcaaggaggaggacgtgagggcgatcttggaggtgatggtgcggaagcagtgggcaagacccaaccccgtcgtcgtcggcgactcggtgtccgtcgccgaggcgtcggtggcggagctcatgaggcggctggagacgggcgacgtcccgggcgagctgcgcggcgcgcacgtgctgaggctccacctctcccgcgtccacctccgcctcatgacccgcgccgacgtcgacgcccaggtggccgagctacgccggaccgcgaactccatcgtcgtcgacgccaaggccgccggcctggtcatctacgtcggcgacgtgcgctgggccgtcgatgatgacgaccaccaccaccaccacgccctcgcggagtactccgcccctgaggaccacatggtcgccgagctggcgcgcctgatgtccgagctccgcgcggcgtcgcgcggtcgcgcctggctcgtggcggccgcgagctaccagacgtacgtgcggtgccagcagcggcggcggcggcgccgggcgccgtctctggaggcgacgtggtcgctgcaggccgtggtcgtccccgcgggcgcgggcgcggacgcaggcaccggcctgtccctcggccgccgcgcccctccggctccacccccaagcagggtggcagaagatgatcagattgccaagcttggtgagatccccacactggaccttgcattgggaggagacgacggtggcgtgccggccctttgcgccgagtgcgccgacggctatgagaaggaagcatcgcaggtgagggcgaaggcagatggcaccacccttgccctcacctatttccccggttggccacacgcaaacgagccccagacatcacacaaggctgagctgatggagctgaggaggaaatggggaatcttgtgccagagggttcactcccgcagccacaatgatcaggcgtctgttccctcaccgatgccatggtggtgcagaccatcatcggtgagccgtgacggcgaggcgcgaactgagctgaatccaagctctgccgggctacgcttaagctttggcacaccgggcgatcatgaccggagcgagagcgtcgacgaacgtggtgccgacactacactgagcctcctgcctccggactcggcggcggcggcgacgacgtggcaggatactcgtggtcgctggagcgagggaggaggaggaggagcagacggcgagatgatgacagtgaacggattggatgccaccgtcgacgcggtgagcatccggcgggtgtggctggagcagctgctgctgtccggtgatctcaagaggaaggcggagaagggcgggctctccggcgagcccaagccccgtcggagaggcggtgtcagcctcgacctgaacatctgcgccgcggctgacgacgacgacgacggtggcgacagcgaagaggaggcggctccgagtgacctgacaaatgaaggtggatgtgacggcggcggtgagccgggacgcctcgacgacagcctcgacagccacgagtag

SEQ ID NO: 82896 - DNA, 2121 bp, Oryza sativa
  Clone ID: PAT_MRT4530_82280C.1
atggtggcgcacggcgttcttccggcgaaggagatcatcgggtggcgaccagccttcggcgaagcattcccaaccctcgatacacacgaggtcgtggttttttctcagttcttttatggtggattttctcttccaacttcaagatttttccgaggaattctgagcttctatggaattagcctgcatcacctgaatccaaactccatagtgcacattgccaatttcattcatgcctgcgaagcttttttggtcattaggcctcatttcgccttattccgccgaatcttcttcctcaagccccaaccgaacaagagcaaaccatgcgtggttgggggcgctggcttccaactcagaggaacactaagccaaaagtatttctccatgcccttgaagacctcaaacaatggttggcacgcaaactggttttacgttcaaaatcctgaacccgcactccccgagtactcctgtcttcctccggtttaccaggacacatggaattcattgcctatgggagatgaagctgctcaggcggtggaattgatggaacgcatgctaaaggtgaaggaacaaggtttgcatggagaacaaatcactcggcacttcatcaaaagtcgattagctccaatcaaagagagatcccgcacggcttttgagtttgacggcaaacatgatccaaatcatgaagatccagactctcttgactttaaggtcatgaaggaaagaatgtacaagatcttctcaaatgctattgtcgtcagttattcacatctgcttccagttgtgccatacaatgcattcaatcctcccccaccggaatttgctctaatgaagtcagatcccacaatcgctcagcgccgatcacctcgccgtcaaactggtcaggggagcgggggaccaaagatccggtccgaagcccagcctaacacctctaatccagccagccagtcagattcccgtaagaggaagttagtgctgagtgacgacgaaggcgacaacgctaatagcctggagatagagaaacaaccagaaagctgccgaagcaggctattccaaagaagaaaacatctagtcatcctacgccaaagatcaggaagtcttccaaccagcatggaaataatactgataacaaaaacttgtaggaaaccatctgatatagatccttctggaaaggactctgatccggctaatatggaaacaagttcttccaaagaaaccgggccgactgctgaggatcatccgagtgacaatcagctggcaaccgataatgtagaatccagcaatcaacccccgaccggaaaccagtttgccgaagctgaagccagagtcaatcaggagcccccgactggaaaccagtcggacctagggccaagccaagagattccagaagttgaagctcaggctgatagccctcacggacatgatgccagcaacgacccgaggcctggatctcctgctaagacacaagagccgactcgtcctcgcccgggaatcatcacgggaccaatgattggtgatgaagaggaagttctccggatacgtgcagctgaagactcgcgccctcccattctggtcaagtggtgggatgatgacttgcaacctcaaggaattgtaataaaccggcaaaaagaagacgaagaggtatgcctactgaaaaaggcactcggccaagggactcgtattgtaaacatatctcaattggagaaacggattcaaactctggaaagcgataaagcagagctggcgagtcagagggactcagctttaaaggacgttgaagaccgcaagatcaagttgcaagcccaattcgacgtcctggtcggcaaaattaaaaggcttgaaggggcccgggatgaagttgctaacgccgctactccactcactcaagcaatgttctttaataacaacggcccgagtacattcgacgcttccgagatctttgataagctaagagttgctctggatacatatttcaagaacatcaaagaagccggaagtatgggagcaagtctagcgttggcgatgaccaaatccctttacccgaaaatcgacattgatgccgttgatggctttgcggacgggacgagcgaagaagctgctctcgatcttatcaacgatgcgtag

SEQ ID NO: 82897 - DNA, 355 bp, Oryza sativa
  Clone ID: PAT_MRT4530_82281C.1
ggctgagcgagagccaatccaagatgcaggtcgcatggaagcaatgcgagcagggcatcctcgtcagcttctctccttggtcgaagccctcaaagcacacagcgcagtcgctctccctcgcctcgctcacctgcgcttcctgcagctcggccatggccttgcttgacgcaggcacagagccgaacccaccattcctgtacatatcgtcctcctctatgtcaggaacctgctacagactactactccaggaagagcaggacccacatgagggccaaagcccaatcctcgttaccatgggtccgcgtgggttgcgtagcccagctatctgttgtccagctggcttctgtgtgtgtcg

SEQ ID NO: 82898 - DNA, 1626 bp, Oryza sativa
  Clone ID: PAT_MRT4530_82282C.1
atggtggattatataagattgctagttaaactgcatttccctcgtgttccgaaggaggaagaaaaggtggctcccatcgccatggcatggctcaagtgcagcacgctgcgcaaccaccttcgtgccgatcagatgcagctggcgtgcagtgccatatcatctcttgaacatgtggactttgttagcgagcttggcctggtcggcatctcctctgtcgaggctgttggcaagggcggcaaagagatcgctggtatccggcagagcgccgcgatgggttttggcgtggttggacatgtcctccagaatcctgagctcatcggccctggaccacgagcgctcaaatctcgccacccgcttcctcttgttgttgcatcggtcggcccgtcgtcccgaggcttcatcgtgcgagtgcttcgccagcgaggcgcccctgctactgcttgttggggaaaagggatggggggggagggggaggacgaggtgctggatccggagaaagcgtcggcattgctgccccctctgttgcccaaggaggagaagaggatgagccaagaccaccatgagctcatcgctgctgcggcttctctgtttcttggggaaaagattgggggaaaattcgactccagggtgaagaaaattggtggtacaggagggctgcgggtagtgcgaggacagggtgtagactacgtcaccagcatgtacctggtggcgttggtgtcgcggctgcaccacctgccactccttggtggtggcgtactagtagtagtagtggcagtggtcgaatctgaccggccgctgatccagcttggccttccgtacgtcaagcagtgggcgccctccgatgtgacggaggagaatctgaaggaaatggtggcgcacggcgttcttccggcgaaagagatcatcgggtggcgaccggcattcggcgaagcattcccaaccccggatacacacgaggtcgtgactccctttgacttcaaggtcatgaaggaaagaatgtacaagatcttctcaaatgcgattgtcgtcagctattcacatctgctgccagttgtgccattcaatgcattcaacccccctccaccggaatttgctctgatgaagtcagatcccccaatcgctcagcgccgatcacctcgccgtcacactggtcaggggagcgggggaccaaagatacggcctgaaacccagcccaacacctctaatccagccggccagtcagattccgggctgaggaaattagtgctgagtgacgacgaagtcgacgacgttgaaaagcctggagatagagaaacaaccagaaaattgccaaaacaagctattccaaagaagaaaacatctagttgtcctgcgccgaagatcaggaagtcttccaggaaaccatctgatatagatccttccggaaaggactctgatccggctaatatgaaaacaagctcttccaaagaagccgggccgactgctgaggatcatccgagtgacaatcagtcggcaaccgacaatggccaagccaagagattccagaagttgaagcccaagcagatagccctcgcggtcatgatgctagcaatgaccggaggtctggatctccttcaaaggcatctgagcccactcgtcctcgtctag

SEQ ID NO: 82899 - DNA, 1917 bp, Oryza sativa
  Clone ID: PAT_MRT4530_82283C.1
atggcggaagagagagaaagtttcgagagtcagtgggcgccctctgacgtgacggaggagaatctgaaggaaatggtggcgcacggcgttcttccggcgaaggagatcatcgggtggcgaccggcattcggcgaagcattcccaaccccggatacacacgaggtcgtgtgcacattgccaatttcattcatgcctgcgaagcttttttgggcatcaggcctcatttcgccttattccgccgaatcttcttcctcaaaccccaaccgaacaggagcaaacaatgcgtggttgggcgctggcttccaactcagaggaacactaagccaaaagtatttctccatgcccttcaagacctcaaacaaaggctggcatgcaaactggttttacgttcaaaatcctgaacccgcactctccgagtactcctgtcttcctccagtttaccaggacacatggaattcattgcctatgggagatgaagctgctcagacggtggaattgatggaacgcatgctaaagctgaaggaacaaggtttgcagggagaacaaatcactcgacacttcatcaaaagtcggttagccccaattaaagagagatcccgcacggcttttgaatttgacggcaaacatgatccaaatcgggaagacccagattcccttgactttaaggtcatgaaagaaagaatgtacaagatcttctcaaatgctattgtcatcagctattcacatctgttgccagtcatgccattcaatgcattcaaccctcctccaccggaatttgctctgatgaagtcggatcccccaatcgctcagcgccgatcacctcgccgtcaaactggtcaggggagcgggggaccaaagatccggtccgaagcccagcccaacacctctaatccagccggccagtcagattcccataagaggaagttagtgctgagtgacgacgaaggcgacgacgctgaaaagcctggagatagagaaacaaccagaaaactaccgaagcaggctattccaaagaagaaaacatctagtcgtcctacgccaaagatcaggaagtcttccagcatggaaataatactgataacaaaaacttgtaggaaaccatctgatatagatccttctagaaaggactctgattcggctaatatggaaacaagttcttccaaagaaactgggccgactaccgtggatcacccgagtgacaatcagccggcaaccgataatgtagaaatcggtgatcaacccccgactagaaaccaatcggccgaagctgaagccggagctaatcaggagcccccgactggaaaccagtcggacacagggccaagccaagagattccaaaagttggagcccaagcagacagccctcgcggtcaagacgctagcagtggaccgaagaggattcaccttaggaatgaagtgaaaaccacaaccctagagaaattagttcctcatcttggaacccttgaagccgtcagagatcaactgcacgaggcaaaagagcttgccaagaaagctgagcacggtctaagagatcggattgcccagctccaggagtctaacttcgaactgagtggctcgtcaaaagtgcaagccgccaagatatctcaattggagaaacgaattcagactctggaaaacgataaagcagagctggcgagtcagagggactcagctttaaaggacgttgaagactgcaagatcaagtcgcaagcccaattcgacgtcctggtcggcaaaatcaaaagacttgaaggggccgactgtgataacgacgcaacccttgcaagtatcgggccgactgaattaaggctgcttcgcgggcctcttccagccggtgtaggtcatccactaggtcgtctccgtagcgctcttcgcgaaaattgcgaaaacgcaaagattcaaattctacttcactag

SEQ ID NO: 82900 - DNA, 573 bp, Oryza sativa
  Clone ID: PAT_MRT4530_82284C.1
cctgaaacaatattccctatatctgttggagagtgcggactactaggtaagaagtgtggcaccgtgcttccctcctccctcctcgtcaatgctccggcgccggctgtgaacgccgtgcccgtgacgcctttctccatgatgccggcgacccgcgcttcgcgctgcacctccgatccgcgccaccccggccggatctggacggctggcgtcatggtggcggctggacggtggtggctggacgggggtgtccgtggcggtggcggtggcggtggcgatggtggctgacggtggcggctggcgacggtggtggctgtgatagtggcggtggtggctgtcgacgatggtacggtgcgtcgtcgtcagcggcggtatgtggaggctgggaaggggtctggcggcggggaaggaggagtccaggtgcgggcacgccgtcgacggtgggaacaactgtgggcggtggccttggccgaatcgctgaagggacaatgttgttgaccgacgacgatccttcttgtgcggattggtggtgtaggtttggacagggaattgcgggcgaaagccttgccgagccat

SEQ ID NO: 82901 - DNA, 2136 bp, Oryza sativa
  Clone ID: PAT_MRT4530_82285C.1
atgacggaggagaatctgaaggaaatggtggcgcacggcgttcttccggcgaaggagatcatcgggtggcgaccgacgttcggcgaagcattcccaaccccggatacacacgaggtcgtgtgcacattgccaatttcattcatgcctgcgaagctttttctgggcatctggcctcatttcgccttattccgccgaatattcttcctcaaaccccaaccgaacaagagcaaaccatgcgtggttgggggtgccggcttccaactcagaggaacactaagccaaaagtatttctccatgcccttcaagacctcaaacaaaggttggcacgcaaactggttttatgttcaaaatcctgaacccgcactacccgagtactcctgtcttcctccggtttaccaggacacatggaattcattgcctatgggagatgaagctgctcaggcagtggaattgatggaatgcatgctaaagctgaaggaacaaggtttgcatggagaacaaatcactcggcacttcatcaaaagtctattagctccaatcaaagagagatcccgcacggcttttgagtttgacggcaaacatgatccaaatcgtgaagatccagactctcttgacttcaaggtcatgaaggaaagaatgtacaagatcttctcaaatgctattgtcgtcagctattcacatgtgctgccagttgtaccatacaatgcattcaaccctcctccaccggaatttgctctgataaagtcggatcccccaatcactcagcgccgatcacctcgccgtcaaatcggtcaagggagcaggggaccaaagatccggtccgaagcccagcccaacacctctaatccagccagccgcatagaaataatactgataacaaaaacttgtaggaaaccgtctgatatagatccttctggaaaggactctgatccggctaatatggaaacaagttcttccaaagaaaccacgccgactgatgaggatcacccgagtgacaatcagccggcaaccgacaatgtagaatccgacgatcaacccccgactgaaaaccagtcggccgaagctaaagccggagttaatcaggagcccccgactggaaaccagtcggacacagggccaaaccaagagatcccagaagttgaagcccaagcagacagctctcgcggtcaagatgccagcaatgaccgaagttctggatctccttcaaaggcatctgagtccactcgttctcgtccagaaatcatcacgggaccaatgattagtgatgaagaggaaattctccggatacaagcggccgaagatttgcgccctccaattctggtcaagtggtgggatgacgacttgcaacctcaaggaattgtgataaaccggcaaaaagaagacgaagagaggattcaccttaggaacgaggcgaagactgcaaccctagagaaattagttcctgatcttggaacccttgaagctgtcagagatcaactgcacgaggcaaaagagcttgccaagaaaaccgagcacgatctaagagatcggattgcccagctccaggagtctaacttcgaactgagtggctcatcaaaagtgcaagccgccaagatatctcaattggagaagcagattcagactctggaaagcgataaagcagagctggcaaggcagagggactcggctttgaaggacgttgaagactgcaagatcaagtcgcaggctcaattcgacgtcctggttggcaaaatcaaaaggcttgaaggggccagggatgaagttgctaacgctgctaccccactcgtccaagctatgttcttcaataacaacggtccgagtacattcgatgcttccgaaatctttgacaagctgagagttgctccggatacatatttcaagaacatcaaagaggccgggagtatgggagcgagtctggcgctagcaatgaccaagtccctttactcgaaaatcgacattgatgccattgacggctttgcagacgggacgagcgaagaagctgctcttgaccttatcaatgatgcgcagaaagccgccgacaagatagcggtcgatgtagtcgagaggttccaggacaccgatcttcgaccgactggtcctgataactctgatgatgaaaaaactgatactgattga

SEQ ID NO: 82902 - DNA, 817 bp, Oryza sativa
  unsure (1)..(817): unsure at all n locations
  Clone ID: PAT_MRT4530_82286C.1
aattaatcctgtattatattgacatcccaacgtgatgtgctcatgtgcatatgcatgtcgacaaaatcactgattaattaatttactagtttacttactatactactgctgcaaagaggaggcccaagctagcaaaagctttacagtcttcatccctgaatattttctcaattcgatctgcagttgtaacttgctagctatctgctctctactaattacaccccaaatcacacatacagcctctcgacttatgtaattagacgctggattaattatgtgaatttgctaatagctagcagggatatgaaactactacaagctgttccagcagcagcagcagcagcagcttcagcttgactgaattcatgctctcccaggacctttgggagggtcatggcggttgttgggtcctgacccggggtagtcgttcacctccacgtccatcctcgccgccggcctcctgccgagccctctcgccgccgccgccgccgccatctcatctggagagaggttcagagacggcgggtgttgctgctgctggctgctcaagtgcaggcttctcgacatgggcaccgaggagacgagcagtgggaggaggaggaggaggcaggacagagccaggacggcgacgaggtcacgaggcctcctctccattgcgcggcgcatgcaggagcaaaagcagaagcaaaccgagccagacaaagccaagaacggccgcgagggcgaagagctcgccgctaggtgttcttggtgtgtgtgtgatctgtggtaggatgagacgatggacacgtggacggatcacgcgtccgcnccggga

SEQ ID NO: 82903 - DNA, 1321 bp, Oryza sativa
  Clone ID: PAT_MRT4530_82287C.1
atggacttcctgacctcggagaccgcacacgcgacccgacccgcgcctctcgctgaccgccctggcccacgccacccgtggggccacacgtcagcaactcaccccgcccccacacccctcctccacagctgtcgcgtgccaaacagagagacggaactcttcctctcgccgaccggtggacctcccgaccggctcaccgacccaccgcggtcgctgacagtggggcccacatcctcgcgtaccccacctgtcgtgccaaatctaccaactcttctcccctccccctcctcgcgatctcgcgctctcgacctcgtcgccgccgccgatcgccgccgccgcagccgcagccggacggagagtcggagaccgtatggaggtgatgggagcggaggaggcgaggacttcgagggtggtggtggcggcggcggggcgcagcctcaacccgaacgcgaaggagttcgtgccgcggtggcaccgccacgccgccgccgccgacgacgacgacgccgccaggaggacgaagctctccgcggacgcgccggagttcgtctacgaggggttctggcgaggcgttgatggtctcaccggctacggctacggctacggcgacggccacgacggcgcgccggaggagctcgtcgtcgtcgtctcggagcgcctcaacccggacgcgccggagttcaccgccgccgcctcgatccgccggagaagatcgccggggagcgggaatggcatctcctccacccgccactggagtaggaggggtagtagaaacttctccagacaaggaagatcagccccgttttcttctagggtgcgaagggcccagaaggaagagtttgtgagaagaacaatatttgtcagtgatatagaccatactgttactgaggacatgttagctgaactgttcgggagctattgcagcgtggtggtggattgccgcatctgtggagatcactcatctggccttaggtttgcatttattgaatttcaagatgagagtgatgcttatgctgcattggatcttgatgggtatgttcttggcatttgccctcttagggtttcaccttccaagactgcaatcatgcctgtgaacccttcttttcttcctcaggtcaatgtaacagatttgaaatacttctgcgaggaacactttggtcaggttttccgcctaaaactgttaggtgatgatggtcaccccacccgcatagcttttattgagtttgctgaggttgatggtgctattaacgccctgaactccagtggcatatttgcaagtggccagcctatcaggttcaataatccttactataccggataa

SEQ ID NO: 82904 - DNA, 2235 bp, Oryza sativa
  Clone ID: PAT_MRT4530_82288C.1
atggcggaagagagagatagtttcgagagtcagtgggcgccctccgacgtgacggaggagaatctgaaggaaatggtggcgcacggcgttcttccggcaaaggagatcatcgggtggcggccagcgtttggcgaagcgttcccaacccccgatacacacgaggtcgtggtattttctcacttcttttatggtggattttctcttccaacttcaagattcttccgaggaattctgagcttctatggaattagcctgcatcacctgaatccaaactccatagtgcacattgccaatttcattcatgcctgcgaagcttttctgggcattaggcctcatttcgccttattccgccgaatcttattcctcaagccccaaccgaacaagagcaaaccatgcgtggttgggggtgccggcttccaactcagaggaacactaagccaaaagtatttctccatgcccttcaagacctcaaacaaaggctggcacacaaactggttttacgttcaaaatcctgaacccgtactccccgagtactcttgtcttcctccgatttaccaggacacatggaattcattgcctatgggagatgaagctgctcaggtagtggaattgatggaatgcatgctaaagctgaaggaacagggtttgcagggagaacaaatcactcggcacttcatcaaaagttggttagctccaatcaaagagaggtcccgcacggcttttgagtttgacggcaagtatgatccaaatcgtgaagatccagactctcttgactttaaggtcatgaaggaaagaatgtacaagatcttctcaaatgccattgtcgtcagctattcacatttgttgccagttgtgccatataatgcatccaaccctcctccaccgtggaagatattatgtctagcaatttgctcagcgccgatcacctcgccgtcagactggtcaggggagcgggggaccaaagatccgtcagattcccataagaggaagttagtgctgagtgacgacgaaggcgaagacggtgaaaagcctggagatagagaaacaaccagaaaactgccgaagcaagccattccaaagaagaaaacatccagtcatcctatgccgaagatcaggaggtcttccaggtataaatcatataacattcttgttctgatgctcacttatcatgaaaacaacgctgacagtacaactcaaactcgtaggaaaccatctgatatagacccttctgtgaaggactctgatccgactaacatggagacgagttcttccaaagaaaccgggccgactgccgcggatcacccgagtgacaatcagccggcaaccaatcggccgaagctgaagccggagttaatcaggagcccccgactggaaaccagtcagacacagggccaagccaagagatcccagaagttgaagtccgagcagacagccctcgcggtcaagatgccagcaatgaccgaaggaccaatgattggtgatgaagaggaagttctccggatacgtgcgactgaagactcgcgccctcccattctggtcaagtggtgggatgatgacttgcaacctcaaggaattgtaataaaccggcaaaaagaagacgaagaggtatgcctactgaaaaaggcgctcggccaagcgactcgtattgtaaaccttcaattaaccggagttaatgtagtgcaagccgtcaagatatctcaattggagaagcagattcaggctctagaaagcgacaaagcagagctggcaagacagagggactcggctttgaaggatgttgaagaccgcaagatcaagtcgcaggctcaattcgacgtcctggttggcaaaatcaaaagacttgaaggggccagggatgaagttgctaatgttgctaccccactcgtccaagcgatcttcttcaataacaatggcccgagtacacttgatacttccgaaatcttcgacaagctgagagttgctccggatacatatttcaagaacatcaaagaagctggaagtatgggagcgagtctggcgttagcgatgaccaagtccctttacccaaaaattgacattgatgccatcgacggctttgcagacgggacaagcgaagaagctgctctcaatcttatcaatgatgcacagaaggttgctgacaagatagcagttgatgtagtggagagattccaggacaccgatcttcgaccgactggtcctgatgactctgatgatgagaaaactgatactgattga

SEQ ID NO: 82905 - DNA, 2067 bp, Oryza sativa
  Clone ID: PAT_MRT4530_82289C.1
atggcggaagagagagaaagtttcgagagtcaatgggcgccctctgacgtgacggaggagaatctgaaggaaatggtggcgcacggcgttctttcggcgaaggagatcatcgggtggcgaccgacgtacggcaaagcattcctaaccccgaatacacacgaggtcgtggtattttctcacttcttttatggtggattttctcttccaacttcaagattcttccgaggaattctgagcttctatggaattagcctgcatcacctgaatccaaactccatagtgcacattgccaatttcattcatgcctgcgaagcttttctgggcatcaagcctcatttcgccttattccgccgaatctttttcctcaaacctcaaccgaacaagagcaaaccatgcgtggttgggggcgccggcttccaactcagagggacactaagccaaaagtatgtctccatgcccttcaagacctcaaacaaaggttggcacgcaaactggttttatgttcaaaatcctgaacccgcactccccaagtactcctgtcttcctccggtttaccaggacacatggaattcattgcctatgggagatgaagctgctcaggcagtggagttgatggaacgcatgctaaagctgaaggaacaagagagatcccgcacggcctttgagtttgacggcaaacatgatccaaatcgtgaagatccagactcccttgactttaaggtcacgaaggaaagaatgtacaagatcttctcaaatgctattgtcgtcagctattcacatctgctgccagttgtgccattcaatgcactcaaccctcctccaccggggagcgggggaccaaagatccggtccgaaacccagcccaacacctctaatccagccggccagtcagattcccgcaagaggaagttagtgctgagtgacgacgaaggcgacgacgctgaaaagcctggaaatagagaaacaaccagaaaactgccgaagcaggctattccaaagaagaaaacatctagtcgtcctacgccgaagatcaggaagtcttccaggaaaccatctgatatagatccttctggaaaggactctgatccggctaacatggaaacaagttcgtccaaagaaaccgggccgactgctgaagatcatccgagtgacaatcagccggcaaccgacaatgtagaatccggcgatcaacccccgactggaaaccagtcggccaaatctgaagtcggagttaatcaggagcccccgactggaaaccagtcggacacaggaccaagccaagagattccagaagttgtagcccaagcagacagctctcgcggtcaagacgccagcaatgaccgaaggtctggatctccttcaaaggcatctgagtccactcgttctcgtccagaaatcatcatgggaccaatgattggtgatgaagaggaaattctccggatacaagcggccgaagatttgcgccctcctattctggtcaagtggtgggatgacgacttgcaacctcaaggaattgtcataaaccggcaaaaagaagacgaagaggtatgcctacttaaaaaggcactcggccaagcgactcgcattgtaaacaggattcaccttaggaatgaagcgaaaaccgcaaccttagagaaattagttcctcatcttggaacccttgaagctgtcagagatcaactgcatgaagcgaaagagcttgccaagaaaaccgaacacgatctaagggatcggatcactgagctccaggagtctaacttcgaactgagtggctcgtcaaaagctgagagttgctccgatacatatttcaagaacatcaaagaagctggaagtatgggagcgagtctggcgttagcgatgaccaagtccctttacccaaaaatcgatattgatgccattgacggctttgcagacgggacaagcgaagaagctgctctcgatcttatcaatgatgcacagaaggctgccgacaagatagtaggtgatgtagtggagagattccaggacaccgatcttcgaccgactgatcctgatgactctgatgatgagaaaactgatactgattga

SEQ ID NO: 82906 - DNA, 131 bp, Oryza sativa
  Clone ID: PAT_MRT4530_8228C.1
gcgcacaacactaccacttacacaacagttctacaacccgtggaggaagcatatgccggggcgcgtgcactgctaacgtagggactcacatgcatcatattgctctctgcctggacacacttatcatttat

SEQ ID NO: 82907 - DNA, 264 bp, Oryza sativa
  Clone ID: PAT_MRT4530_82290C.1
aaaaaaaaaaaaaaaaaaaaaaaaaaaaaaaaaaaaaaaaaaaaaaaaaaaaaaaaaaaaaaaaagagaaagagtgtatttataaataacggtcgcccccttcaaataatccaatcttttatttcgcgtccattggtagttaaaacctttcctaaagtcccccctaaattcagtccgcggccccttcttttacacccttttccctgggaaactccctcctttccctatctaaatggctttgcataaaatacgcctttgcccacg

SEQ ID NO: 82908 - DNA, 2917 bp, Oryza sativa
  Clone ID: PAT_MRT4530_82291C.1
cccccgtggccggctccctctcctctcctataaaatggaatccccatcctccgttctatcgttttagcctcatcccgagcctccccgtggtcgtatcacccctccccgccgtcgcccttctctttcccccgcgccggccgcctccagccgcctctccctcctcgcccgagcgccgtccggccgtgccgtcgcctcctccagcgtcgcagccgcctcctctccaccggcctgccctccgtttcgcgcggtgaccaccggaggcgcgttcccgccgtcgtccagtgccgttgccgccactgtaccacctccagccgcccctgccgcgccgctcaggtgcgggccggccgcgccgtctcctccttcggcgtcgccgcgtcgacctccaccccggcctgctctttgattcgtctggagaccgccgtcgcccgcgccggcctttccatcctcttcgtcgccggcgtccctttggccgccccttcctcctccccggctcgtcggcttgccctcctcggtccatcgtcgtcgtctccgttcgttctcgtcgtcgacgtcccgtcgatcgcccggcttgtcgtctggctgcgctgccaccatcgtgggcatcgctgcggcgtgtcccacgccgtcctcacctccgtgcagctgctgccggctgccctcatcgcctccccgtcggtcgtcgtcttcctccttcctcctcgtcgtggcgttcgtccctccgtcaagccgatcgcgttcgccgcccgcgtttcgtcaagtgtgcagcagccccgtcatcgtcttcgtcctcggctccgcgtcgtcaagccttgtgccggccgcgtctcgcctgtgtaccggtgtcggtaatcgttcgtgggtgcgtgtggtgaccgtgtttgtgtgcccgctcggtagccgcgtggtttccacgtgtgcagcccgcgtggtgtctagtggagtccgtttgtcggccactcgcctcggttggcacacggggtccgcttccgtcgacccgtggaccgtctctgtgtactcggttttctttttatgtattgttatttcttctttataggcttgtagctttgcttgtgtgcttcgcgtagcttctatcgttccggaggttccagaagcgtggttcgcgggtgtcgccgaaggttcggaaggccgttctccctctcttcctctttcaaaacccctaaaacctgttttctggtggggtttgggtgcatgccagttgtgggaagtagcaccccggccaatataaggattaagctcgggcctctgttgcaaagcactaccgtacttccacatgtctagtgggtaaggcttagtttgtggctcagtctggttataaacaaaagtacacggatggagatggatgaagtcggggctcgatggacatctcccggcttttcctgggacggggattaatacactagcgttcgggaaaaggtaattttctcggtcgcgacagatcgtgctcggttttcttggcaagctcttttgcctcgtgtagctgatctctgacagcttcaagggttccaagatgagggactaatttttctagggtcgcggttttcgcttcattcctaagatgaatcctgtttacaatgcgagtcgcctggccgagtgcctttttcagtaggcacacctcttcgtcctctttttgccagtttatcacaattccttgaggttgcaaatcgtcatcccaccacttgaccagaatgggagggcgcgaatcttcagccacccgtatccggagaatttcctcttcatcaccaatcattggtcctgtgatgatttctggacgaggacgagtggactcggatgcctttgaaggagatccagatctccggtcattgctggcgtcttgaccacgagggttgtctgcttgggcttcgacttctggaatctcttggcttggccctgtgtccgactggtttctagtcaggggctcctgattaactccggcttcagcttcgaccgactggtttccagtcaggggttgatcaccggatcctacattatcggttgccggctgattgtcactcggatgatcctcagcagtcggcccggtttctttggaagaactcgtgtccaagttagtcggatcagagtctttcccagaagggtctatgtcagatggttttctggaagacttcctgatcttcggcataggacgactggatgttttcttctttggaatagcttgcttcggcagttttctggttgtttctctatctccaggctttttagcgtcatcgccttcgtcgtcactcagcactaacttcctcttgcgggaatccgactggccgactggattagaggtattcgactgggcttcagaccggatctttggttccccgctcccctgaccaatttgacggcggggtgatcggcgctgagcgattgggggatccgacttcatcaaagcaaattccggtggaggagggttgaatgcattgtatggcacaactggcagcagatgtgaatagctgacgacgatagcatttgagaagatcttgtacattctttccttcatgaccttaaagtcaagagagtctagatcttcacgatttggatcatgtttgccgtcaaactcaaaagccgtgcgggatctctctttgattggagctaaccgacttttgatgaagtgccgagtgatctgttctccttgcaaaccttgttccttcagctttatcatgcgctccatcaattccactgcctgagcagcttcatctcccataggcaatgaattccatgtgtccacgacctcgtgtgtatccggggtcgggaacacttcgccgaacgctggtcgccacccgatgatctccttcgctggaagaacgttgtgcgccaccatttctttcagattctcctccgccacatcggagggcgcccactgactctcgaaactttctctctcttccgccat

SEQ ID NO: 82909 - DNA, 906 bp, Oryza sativa
  unsure (1)..(906): unsure at all n locations
  Clone ID: PAT_MRT4530_82292C.1
ggcgtgggcaggggccaccacccgcctcctccctcgctccaccaccaccgcctcccgccgcctcatcacctcgacgacttccgggagccgccgctgctccccccgcaccaccgcctcgacgacttccgcgagccgcaccacctgccgcccccgcaccaccaccaccaccgcgaggaattcggcgagccgcctcgccaccacgtgttcgcgggccacggcggcggcgccgggccccccccggcgccgcacgtcgtggcggcgctggaggagcggctcggcgcggagatcgaggaggcgcacgtgctgcttggccagaaccagcggctggccgcgacgcacgtggcgctcgtgcaggaggtctccgccgtgcggcacgagctcggccgcaccgctcgcggccttgccgctgcccaggaggaaggcgaactccgtcttcgcgaggtctatgagaggtcaatgaagatggaggcagagctgcgagcagtagaggaaatgagggcagagcttgcacaggttcgcctcgacattcagaagttgggtgcagcaaggcaggaactcatgggtcaggtccaggggttcacccaggacttggctcgatcagcagtggacctgcagcaggtggctgcgttaaaagctgagatccaggagataaggcatgaaacacaacatttgagatctggcattgaggttgagaagaaaggatatgccgagagctatgagcagggacaagagatgcagaagaaattgatatcagtggcttctgaagtggagaagcttcgagctgaggccgagaagaggtcacgagctgcttgtctgaggcaataagtgtacgtcggagcttggaatctaggccgattgccganatctatatgctgatcacataatcaccacatccagcaacctgtg

SEQ ID NO: 82910 - DNA, 1566 bp, Oryza sativa
  Clone ID: PAT_MRT4530_82293C.1
cccacgcgtccggaaactcgaggttattcgcgcaaaatctcctcccgtcggtcgcccgaggtctgacctagggttccggcgactcccatggccggccgccaccgtaacccgccgcccccatccttccctcgcggcggcggcgggggcgtgggcaggggccaccacccgcctcctccctcgctccaccaccaccgcctcccgccgcctcatcacctcgacgacttccgggagccgccgctgctccccccgcaccaccgcctcgacgacttccgcgagccgcaccacctgcgcgcccccgcaccaccaccaccacctcgacgaattcggcgagccgccgcgccaccacgtgttcgcgggccacggcggcggcgccgggccccccccggcgccgcacgtcgtggcggcgctggaggagcggctcggcgcggagatcgaggaggcgcacgtgctgcttggccagaaccagcggctggccgcgacgcacgtggcgctcgtgcaggaggtctccgccgtgcggcacgagctcggccgcaccgctcgcggccttgccgctgcccaggaggaaggcgaactccgtcttcgcgaggtgaaccgtgaactgctcacttcatttgaagtcatcttattcttctccctcttgcaagattggttcaaagctgcatatctgagtgagaaaggttcattgaaattttcagttgaagagaaactgcattgtttggtaatattttcaaatgtggtcatgtcaagcttatgtctctttgacccaaagctatctgacttagtctatgagaggtcaatgaagatggaggcagagctgcgagcagtagaggaaatgagggcagagcttgcacaggttcgcctcgacattcagaagttgggtgcagcaaggcaggaactcatgggtcaggtccaggggttcacccaggacttggctcgatcagcagtggacctgcagcaggtggctgcgttaaaagctgagatccaggagataaggcatgaaacacaacatttgagatctggcattgaggttgagaagaaaggatatgccgagagctatgagcagggacaagagatgcagaagaaattgatatcagtggcttctgaagtggagaagcttcgagctgaggccgagaagaggtcacgagctgctgtgtctggaggcaatcaagtgtacgtcggaggctatgggaatcctaaggccgcatatgccgcaaatccttataatgctggatacaacataaatcaaccacatccccaggcaaacactgctgattccggctcccagtttgggcctggctcaacgcacgctccctggggtgcctatgacatgcagagagctactggacggagatgatttttttttcagaatgtattacttaattacaaaagcatacttttctgggacaaacctaacagctttcatgcaatggtgaatcatgaatgtattacttactagtatactctactgtgagttgtgctgtacatgtattacctccgtttcccaatgttgcaacctaggacgtgatttatcctaatacaacaaatctagacaaagttctatccaaa

SEQ ID NO: 82911 - DNA, 1266 bp, Oryza sativa
  Clone ID: PAT_MRT4530_82294C.1
tcatttctcaacaataaactcctgaatctctattccagtgtgacgggcaccgccctgtttcctcaccaaaacctcatcaccaactttcagtgaagtcacaggtatagcagttcttccactagatcctttttcaggagtgataagtgcaactgtctcggcattttgcaggaaaatgctgtaagtatcatctccaccgttctcctttgcttctacaaggattagaggccttgattcaatcttaacacgaccaacaatcgcagtacgccacaaaccattttgatcaacaactattacttcccgacctgattgcagctctgagaggtaactagttcggccaccagggactgcaacatatgcatgaacagggcccgcattgaccctgaaaggcctgcttgcaatataatttgtctccaggcattcagagtgaacaagaaacattcctcttgcataggagccaaccagaaggccttcaccaggtcgcatcatactgcaaagatccacacaaacacgatcacccataccaacaacttcaacctttgacacagtagcctttgtcaacattaactggctctttgcctcgttccttctgtcaaaataatccttgagtttgataatatcatccatgtcctctactttaagtataactccatcaagcccttgctccaaggcctcaagaaaaacctgagcctcagttgagtttgttgaaacagccaatacagttcctctacatccctgccatccacctcggaagtctatcacgatgttttccacttccacattgtctggttgtatgagttccagctctcctggggaagagacttcagaaattacagcaatcttttgttttttctcatcgaatatctccaggccatcgataaaaagaggattgatgcgagcagtagccagacggtcttctttgactccgacggtgaggctgaagaagcgcacatcttgatagaatgggagcaagccgaagctaatgctgcgtctccgccctccgccggaattccgctcccgcacctccgccatcagcgctccgctccgtatcagccgccgcgccgtcctctgcatcgcctgtctgccaccgatccccgccgccagctcgctctccacgatcctccgcctccccgatgcacgaggtcctcccgtcaccaggtcgtcgccgccgttagtcatcaagcaagaaaatccttggcggttctgcttcctggaagcagtaggaacaacaagagttactgaaccagaaattgaacttgccttcttcat

SEQ ID NO: 82912 - DNA, 538 bp, Oryza sativa
  Clone ID: PAT_MRT4530_82295C.1
cccccccccccccccccccccccccccccccccccccccccccccccccccccccccccccccaaaggaaacatttccaaaatgcctatttttagtttttcacacccaatcagttcacaagcacaaaagggaccctcataagtttgtacaaaaccatacattaatattgatacccccagggggggcaggcaaaaaagtctgcgctagctttttaaaaccaaaacgatggaccctagcagcaacattcaaattttttttggggaaaaaacggttgtgtttcccccccttgaggatcgcggcccggatgggggactctttgcccgtgatctccccggtttgacttgggccaccgccgatcccacaggagggaccaacaccggacgggctcgccatttttttccctggataatgggaataataaagttcgtttcacgtcgcgattaacaaggtcgatctcaaaattgccgggattaaaccaaacgctgggcacgctatttggtccacaaattcagtgaaacaaggacccgtccccttggcc

SEQ ID NO: 82913 - DNA, 366 bp, Oryza sativa
  Clone ID: PAT_MRT4530_82296C.1
atgtctccctccacctcgcgccaccgccgaccatctcctgtagagctccacactgacgacgacgatgtcactgcaaggctcacggtcaccggcgccgatggcatatctcctccctccctttatccctctacgcggctggcaaggcggagtcgggaaagagggaggccaatgagtcccaaatccggtcacctctcctcaccacgaagagtccctaggcgacgaagaaacgaggaccgaggagcgagcagccgcctgacgctctccacctccccgccgccgaccacctcggcacctgacgcggcgaggatcgccttcgtgaagagccgtggggacctgtccggtgctctctgccacctcggcacctga

SEQ ID NO: 82914 - DNA, 264 bp, Oryza sativa
  Clone ID: PAT_MRT4530_82297C.1
atggacatcccagcgacccccacggacctctcgccgcttctcagtctggcaccccgtaatgaaccatgctattcaaaaggtaaagctgtgacgtgcacacgtctatggatcacgtgtgacgagaagttgtggcccgatcttctcaaaggatccacgaacttgataactatcgccgagagtctgcacacgcgacgaactatcgagacaatcacccttccacgtaccgacgaagccagcccacgcaatcacaccataaagatgtga

SEQ ID NO: 82915 - DNA, 492 bp, Oryza sativa
  Clone ID: PAT_MRT4530_82298C.1
atggcgaggtacgcggcgagatggatatatatggcgttgatgatgtgggcacatgatcagaagggcgcgtcaaattcaggtgaggatttggcgaggcagaagggccgcgtcggtggcggtagcagaatgggagaggcaaggaatcgcaatcgtggcaaggctgaggagattgcagttgggggttggggtagaaggacggcggcgcgatgcgttggcaacatcgggggcgggcgtgatgcgtcggcggcattgggggcgattggggtgggcagagggggctgcgaggatgtcgtcgggggcggccgttggcgtgggcacagggaggaacgatggacagcaacaacgattcaaggggcgcagcgacgaggcacggaccgcgatgacagcggaggggagcgatgcggcgccgagagcgaggggaccgcagcggtaacgggcaagggcaacgggaggcaagatggacgacgcccgatctggaggaatcgatggtga

SEQ ID NO: 82916 - DNA, 2037 bp, Oryza sativa
  Clone ID: PAT_MRT4530_82299C.1
atgcaagcctttgttttcatctttgctgttcttgctcttcttgcaggagatgtcgaggggcggcaagggtgctatcctttctcctgtggacatctccagaacatttctcatcctttccgccggcgaggtgatccacaaagatgcggtgttccgtcatatgagttagactgcagagatagcaaggctaccattaggatcaacacagggacatactatgtaaccagcatcaactacactacttctgtcttctgggttgtggatgccagcctaaaagatacaaacagcagctgccctcttcctcgctcggatcagcttcctttcgtttcggggggtatccagggatcacatggcggctgggacctggcccttgaccctggacctggagctacatgggttagctttgtgaattgttcacaggcagtaaggaataatagtgtgtacgttcctgttgattgcctgagcacaagctcttcgtttgtttatgtgtttggttcctggataatgcctccatctgtttttccaatcatcggaaaccttgagacttcatgtcgctaccttgccatgattcccttgggtggttgggactcgccattgccacataatgcaagcttttcagacatcgtcagatccatgaggaatggatttgctgttcattttcccataatacataggtggagtaggattgggcacatcaaggattgtctgatggggtcgattcggggctttcatgaagaaccattgtccaatcaaaccatcaaggatcagattgtggacatcctttttattgactttagtttctggtcctgcataattggaggagtgggcatgaaagattatttcgatatgccacaatacatgatggggatgcttcgtggaaaaatagaattttatggcggattcattgtacaatttgctttgtttgttttcaagtggattgctgttttatgcaggttcgtgatagctccgttgacactattgaccttccttgccttcaagtattggaaaactagaataaaaatcgacgcagttgagaagtttttacaaatgcagctgatgcttggtccaacaaggtacgcctacacagacatcattgcaatgacaagccattttagagacaagttgggccagggtggctatggctccgtgttcaagggagtgatactgcctggtgatgtccatgttgccatcaaaatgctatccaactacaattgtaatggagaagaattcatcagcgaggtatccaccattggcagtatccatcatgtcaatgtagtacgtctagtggggtattgtgcagaggaaatgaggagtgcacttgtgtatgagtacatgccccatggatctcttgacaggttcatcttctctcctgacaagagtctctcttgggacaagctcaatgagatcgcattgggcattgctagaggaataaactacttacatcaggggtgtgatatgcagattctacattttgatatcaagccgcacaacatccttcttgatagcaattttgtcccaaaagttgccgattttggccttgccaaactgtacccacgggataacagttttatgccagttagcgctgcacgaggaacagtaggttatattgctcctgagatgatatctcggagctttggtatcatatctagcaaatctgatgtttatagctttggaatgcttctgttggagatggctggagggcgaaggaattctaagcagaacatgtcgagctcaagccagtcatattatccatcttgggtgtataatcagctggttcaacaaaagatgggtgagattgccaatgccttcaatatgcatgagctggaaaagaagttgtgtgttgttggtctacattgcattcaaatgaagtctcatgatcgtccaacgatgagtgaggtcatagaaatgcttgaaggtgatgttggtggtctgcagctgccttcaaggccattcttctgcgatgatgaacccctgccactgctagtggattcttgccgtttctcctctgaactaactgaaatctcagaggaggatgagtga

SEQ ID NO: 82917 - DNA, 498 bp, Oryza sativa
  Clone ID: PAT_MRT4530_8229C.1
ttttttttttttttttttttgcagtcgtaaatgaaatcttgattaaattagctaacaagtgtgcggacatcaacagctgaacagatttcagatgttcaaaggtgacctgcagtctattttacaaacaacactgacctgacaagtgacaatcaccctcatgtacaaaaaaaggaaaagaaaaagaaaacgacggcgcaatgtgcaatctattacgattagaaagagctgcggaaaagttacttcatgctgtggaaaatttgactcaggtagaagataaaatcccatttcaatcttgttattactcttcaagtttttggggcttttgaaggaacaccttgtgatcttatatcagctggcgaatgggctcgggaatgcgataattactacagaacttcatatcccaatggtgagtcaagtgaaatgcgatgccaatgagatgtagatcggttcgacaaaccagggcaggagcgcattggcctggggcatcagttaatattt
